United States Patent Application Publication US 2008/0114160 A1 - sequence listing, part 68

SEQ ID NO: 24721 - DNA, 4892 bp, Oryza sativa
tgtgaaataaattaaaacagttggaaacgaggtcacaaattttgtaattttgaataactggtttcaaaagaaagttataaaatcaacatactaaatttattttattgcagcaagattaaataaaacagtattgtaaaacttttgctggtaaatgagccattagtacagtaatagatgtacagtactaataacactggaataaattttgaatgagaaccattaaaagagattatgaagtgcatgtgccattagtttggtttaattaaaagagaaagggaggagaacagttctacttttccaatatttttcagagggcttctatgggtaaccatttggcataacctagggtcaaagaggctctgataccaacttgtcacgcccggaatttctatccaaaattccaaacgcttacatgtgtgtgaaccctcgtccaggaatcagccgaggcacacaataacaaattgataatagagtacaaatattactctaattaataagcgaataaaatgtcattacagaggtagatagttcctctcaatcaataaagttctagcagcggaaaataaataaacggcgcagacggctccactccacaggcagcttgaccaaggctacacctaatcctccacaccatcagcctcattgaagaactcttcctctgatgaatgattgcaaggtgagtatatgacatactcagcaagccacgcagcaaatatgcaagtgcacaggataacaaaggatggcataatagggttgcatttgcaaaagcagcatttagcaaacatttgagaatttaataaaacagttaagtaattaaacaatattaatccaacgctatacaacataccctgttgtataggcccaaccattctgaacaaccaccccggctgcacagttctatctccaaaccaggaatgtaccattccaaaccaggagctaatcaaattattaccagtttaagcatcttttacaatgatgagaggtgtgagactaatcacgaaagacattgttagacccgcccataaccgcgggcacggctattcgaatagttttactctgatcagaggtgtaccactgtacccacaagacacaaccccacatcatgtcaccatgtgcctcaataccaccacggtatctcggaaaggagttgtgacaatacccctcgcataacacaatccactgcagcgcaccttcctggatcataatcacccccttataaaacaaggcatggactccccagcgacccccgtgggcttatctccgccacttctcagtctggtgccccgcaatgaaccatgctatacaaaagataaagccgttgcccatgctggcttgtggttggcacgataaatgtttcacaaccgaaactcgtgaaccggtccttaattgccatgagcacgaccttcaaaaccatgtgctcacaacccaccattaccaggttttagttggcacattaattaattaactaatcacgattgaccatcgtgaactatcaataagccatcatgaaataatagtgagtcattagttatcccataagtgtactaatgtttctaagcagggctaagcaattatatctaatatctagttgaaccaatataaataaagctcaactagtcaaattaatataacccaaggtatcaaggaataaggtaatcaatgtacaaaagggccataacaaagaataggtcaattccacccaatgacattcgaaaatagatgcaatagttgaatagaaacaatagctttaaataggatcaacatgctcaaagggttgtttgggatctgtgtgacttgccttgctggccttggaactcttcaaactcttcttccgcgaaaacggactctccggaaacgacggaatctaagcaaaaagaagcaaaatcaccaaaacagcacataaacaagaatgaacagtacatgtggatatttttaatgtgtagatctcaattttagaaaaatttagagacttgaaccaactaaatcggagctaagatgaattagttatgaatttttaaagattaaaccggattaaaacacttaaatcggtttaaaattgaattatgacgcaataatgaattatttttgaaaaggaaaaggggatttattgcgtcagcggctagggtttgggtggaccgggcgcatgggcggcggttcacgcgaacggacggccgagattgatccgatccaaatcggacggccgagattgatcgggtccacggcggttcacggcggacggccttgatgacgccagcaatgacgtcaccgacggcggcggcggctcggcgaggcagacgactcgagcggcgcacgctcaccggcgaacggcggcgctacggcacgaacggaggacaccaacgggtagcggacggcacggcgaactcaccgacgaccaaagcgacggcggacgaccaacggacggcgacggcgacgaggttgaaacggcggcggtcttcggcttgacgacggcgacgatgctccggtggtctccgacggcagcgaaagagcggacgaggacggcgacgacttggcgacgacgacggcgaccttcccgagcgacggcgacggctggaacgacggcggcgcacggctggagcggcggcggcgaaggcaaagctagggcacacggcgctagggctactccggcgacgagaggcgaaggcgagggtggcggcgagaagagaagagcacggggatccttttaaaggggctcggaggcggcggcggaggcccacggcgacggcaacggcgaaggaaactcgcggcttggagagaggaaagccgatccgattcgaactcgaatccatcgatttccaaaccgatttagccgaagtttccaaaggagaaaaggtagaggagatcccgaagatcatttcccctctatcaattcagccggaaacggaaaggagcggccggattggaaagcggcggcgacggcagctcggcggcgcgaaactagggtttcggcccgaggaggacgacgggcctgacaggtgggatgtcgcgaccgggaaaattgccttttcccgaacgctagtgtattaatccccgtcccaggaaaagccggggtacaccatacaaacatgatataaaagacacatctttattatatcgataatatttacattattacaaaggcacttaaggcctgacaatcaaaaataaacagcagcggactagcggcctacggctccatcttcacaggcgctcaactggggtataagccaggactccacctaagacatcttctccaaagcttctcttactgaagaggggaaggattgagcaagaatgagtacaaccacagtactcagcaagccacaccggagatgcataattaatgcaagggaggtacaagggaataataatatagggattaagttttgcagtaaacagcatttaaaagtcacttagttgcccaaagccattttgtaaagacgatcctagagctacacagtattattaaacaaggccgtgaaccctcacgaacctgccttaacccaaggcctacgatgatttggaccgaactggcaacccgacctgggttccagctcgtcccaagccaacccaggccaaccattccacattttagtgttgagcaaattttaagaattagaacactgacttgggtacattgctcggcttgcccatatccgagggctcggctattcgaatagatttactctgatcagaggtgtacatctttacccacaagacacatcttcctcacgtgttgccacgtgccacataccaccacggtatacggacggaagacgtgacatagtttccaacccatcctagccttagacaagagtaccgacccaatcctacctacggccgggatacccgggacaggcaggcagaactgagcccctagcattgggcaccaaccctccgccgtatgacatctcgactaccgggccgcagctcgtgtagccttcatttgccctggagaatgtccatcgacgcccgacttcatccatctccaatccgtgtacttttgtttatgactagactgagccacaaactaagccttacccattagacatgtggaagtacggtagtgctttgcaacagaggcccgagcttaatccttatagtggccggggtgctacttcccataactggcatgcacccaaaccccaccgaaaacaggttttaggggttttgaaagagaaagagaggtgtatgtccaattccaccataatccaaccattccatggtgtccaaaagatatgagaactcccaaagtctaaaattataaaaccacctaatgttgcctaattaaattgcgaagcatctacctaaatttaaactagtggaaccataaatagagtgtccactagatggggttttgtttaatctagggtgaacaaggtaataataataacaataacaataataatatggtcgtaacaaaggtaaataggcatggctaaataaaacagtgataacgcgggaatttaaataaagcgataatgcaataatttaaatcaacataattttacaaactgggattcaatatgctcaaggatgatgtgacttgccttgctcgctttcccaaacaccggcttcaacttccacgaagagcggatcttccgaagctgcagcgtctacacgaccgacggaaaagaaaaggcttttactctaataaactccaaataacagcataaacaaagcacaaaaatgggttctttacttcttaaggaaaaattagagacttgaacggtccaattccgagttcaaacggccaagatatggccatttgaagtttatatgctctttaaatggatatttgcgaatttcttcatttaattttcaattaaaaaaatcggattattgcgtcagccgaggggcgggcgcccggaccgggtccacgggaagaggggccc

SEQ ID NO: 24722 - DNA, 7805 bp, Oryza sativa
ggagacttgatcttaattttcactatcagacactctacctccattagctaaaagatgctctgtcaactgttgtgcacctcggaaggaatttcttctctgatgttttgtcattcctggtggaggccattctgtgctggtaatgatcatcttacggacttcatcttcggttcgcattggtgcttttcttttctgctgaggacagttccttgcgtagtgcccttgctcatcacacataaaacagatgatacttgcttcttttgggtcaacctgtggcatggcatgaggggccttctgggatgttggcggtgcgctgacttgtggtgtgagtgctgggactgcctccaactgcacttgaggttgtatttgactcaagttcagaattggcgtctggtgctgctgtagtatctctataagcaatttgttctggttaatcaggtgttggaccactgccacacaactggtgtctggtgcttcattcactcgggagcttgaggtaccaatgtcctgacttctgaccttattgcctttctcattgtcagccatctgttgcaaaggtttggagagggagagagggaaaacaaaggggagagacagattagaaactaaggataggaccttaacagatctaagtcttttgctgttatgatgtatgttaggcttattctgcaagttgattaagcaaacaacctagcatggttacatcacaccccactgatgcaaaccacgcgctacacacacaagcaaggaaacacacgactaacgactctaccctagagggtggcttaggttcagcgacaggttctccaagatcttcactcctgcttcacagctggcttcactgcttcctccacttcactagcagatcctgcagtcttctggagcttcggcaaacaactgacgatgtcctcttcttcactgacctgaccatctagtactagttgaaaatccgaagaaggaagaacggagtaaaccttttgcaaatagcattaggggaaggagaaaaaggaactttcgcaaataatttttatttataaaatatgtccttgggttttatccacttggcttatcctacagtcgagatggctctgataccagcttgtcgcgaccgggaaaattgccttttcccgaacgctagtgtattaatccccgtcccaggaaaagccggggtacaccatacaaacatgatataaaagacacatctttattatatcgataatatttacattattacaaaggcacttaaggcctgacaatcaaaaataaacagcagcggactagcggcctacggctccatcttcacaggcgctcaactggggtataagccaggactccacctaagacatcttctccaaagcttctcttactgaagaggggaaagattgagcaagaatgagtacaaccacagtactcagcaagccacaccggcagatgcatgattaatgcaaggggggtacaaggggataataataggggttaggttttgcagtaaacagcatttaaaagtcacttagttgcccaaagttattttataaagacgatcctagagctacacaatattattaatcaaggccgtggacccacacgaacctgccttaacccaaggcctacgatgattcagaccgaactggcaacccaacctgggtcccagctcgtcccaagccaacccaggccaaccattccatattttagttgttgagcaaattttaagaattaaaacactgacttgggtacattgctaggcttgcccatatccgagggctcggctattcgaatagatttactctgatcagaggtgtacatctttacccacaagacacatctttactccgcattccatggccttggaacccgtcgtaaagatgtgacataacccttcacccatcctagccgtgaacaaaagtaccgacccaaccctgcctacggccggtatcccgggacaggcaggccagggttgagcccctagcaacaagatctagaccgggtgcgccacacacataggggtgagaccacccgcgtactagtccagtgccatggcatctcgactaacgggcaccgacccgtgtagtcttcatttgcctagacatctcgattaccgagccgcagctcgcgtagccttcatttgcctcagagatatccatcgtcgcaacgacttcatccatctctatccgtgtccttttgttcaggactagactgagcaccgagttaagccttacccattagacatgtggttagtacggtagtgctttgcaacagaggcccgagcttaatccttatagtggccggggtgctacttcccacaactggcatgcacccaaactccaccgaaaacaggttttaggggttttgaaagaggaagagaggtgtatgtccaattccaccataatccaacaattccatagtgtccaaatgatatgagaattcccaaagtctaaagttataaaaccacctaatgttgcctaattaatcagcgaagcatctacctaaatttatactagtggaaccatgaatagagtacccactagttggggttttgtttattctagggtgaacaaggtaataatatcaatagcaataataataaggtcataacaaaggtaaataggtatggctagataaaacagtgataacgcgggaatttaaataaagcgataatgcaataatttaaatcaacataattttacaaactgggattcaatatgttcaaggatgatgtgacttgccttgctcgctttcccaaacgccggcttcaacttccacgaagagcggatcttccgaagctgcagcgtctacacgaccaacggaaaagaaacggcttttactctaataaactccatacaacaagcaggaacaaagcacaaaaatgggttcttgacttcttaaggaaaaattagagacttgaacggtccaattccgagttcaaatggccaagttatggccatttgaagtttatatgctctttaaatggatatttgcgaatttcttcatttaaattttaattaaaaaatcgggtttattgcgtcagccgagggagagggcgcgcggaccgggtccacgggagtggggcccacgcgtcagcctctcggtccacggtggaccgggagcacgcggctggcggcggccggcgccgtgggtcccacgcgtcagccgcacccgcgggcgcgggcggctgacggccgggcccacttggcagccgcgagggcgcgcccgagggcggcctcgccggcgcggccgacgggagcggcgcgcccgcgccccgatggtcaccgccggcgaccaacggcgcggcggagcggcgcccaagagagaggagggaagggggaaacgaacggagcggtcctcggctcaccccgggacggcgaaggcggtggaaacggcggccggagcggaggaagacggcggcgcggctcgggatgacgatggcgacggcgctccgacggtcggcggacggagcggagcggcggacggggtcggcggcaacacggcgaagcggacggaggtgtcgccgagtaaggaggaagtccggagcggcggcggcggcggaacggagctcggcggcgatggcggagagaacggagcacggcgcgagcacgaatccgacggcgagggcgagcggcgagcggcggaaacggaagagcggagctcgggcaacgtttaaatagcgccgggggaaggaaagagcggccggagagggaggaaacgggcgcggagatctcggccgccattgatggcgccggcgaggtttgcgggagcgattccggacgaatccgagggagagagagagggaaaaacggggggaaagagagagggaatcgcggggaatgattcccccctcattatggcgcgcggggacggcgggatgcggcggaatccgcggcggcggcggcgctagggcacgggcgagcggcgggagcggcgggaggaaggcgatgacaggtgggccccacccgtcagcgagggcggcgggcgggcccgcctgtcagcggcgcgcgcgcgggggaggtgccgatgggccgcgggggagaggagagagagggagggagagttgggccgagccggcccaagagaggaagggggggaaaagaagacttttagggatttttctttttataaaccttttcaactttgtttatttcttaataattattatttgtgctctgaaaattccactaaaatttgagggctccttttagaccaaggagaatttaacaaaaattctccgggccacatttgaatttttcttgtacgtattttagggtttgccaatttcttttcgaattttaattaattctattattccttttagaagttgatttttatttcgggatgaatttatcagggcgtgacatgggacccacctgtcagcggctgcgagggcgcgcgcgcgcgcgggcggctgcggactgggccggctgggccgaggagagagaagagaggttttgggccgactttcggcccaaagccaaaagagactttttaaaacctttttcaatttaaattatttcttaaatgcaattccatttattaaaaatacttccttagctcaaataaatcccagaaaaatctaggaattatagaattaagcaaagtatttaatgaaattttatctggcccaattttatattggaatttattaattaaacttagatcttctcttcaagacttttaaaattatttctagaaattccaattaaacaacaatttatatattttgaattttcagggtgtgacaactaacccaaggtagctggtggcaagcaagtcaataggaaaagcgacaccccaccacctccaccaatacataattgatttttttttgacgagaccccctataggtgggccatacttgctcccgcctgcaaaaatcgtttccctaaggcccatttagtggctgcctgcaaaaatacattttcaaaggcaggcctttaagagacctgcctacgagtctgacctccatcctctcttccctctaaacatctttaatttcttccctcaaaaaacatttttcatttttttcaagtcacatgcttatctctttaccttctctctctccactcatttcccctctctctctctccaacttctcccctcctctcccattgctcgggctagcagggacatggctgggggcgacggcctagacgaatggtggtggggagggctcgggtggtgggcttgacgatcggacgtcacggagcggaggatccattggccgcagatccggtctgggcggatccaccggtgataggcaatggcgacggcggaccactctgcctctccatcctccctcccacggcttctaaataacatgagagcttcctaagtgcccaattattataggtctagaaagactagaggcaagccatctaaaaaatgtggcagcacaaatcataaatgttcaacaatgcaatagagaatactacaacaattataaaaatatgaaattatgacctccatgtaattcagcattattttgtgtaatagtatttggaacagcttacagtagcacatacaactaggcatgcatcatgcatgcacatttataaaatgacaactttatttattctataagtaacacctcatggagctctagctctttgcatggctcaggtattacttacttgttggcttcctttctttcatattgagttattaatagaatagcagaatatgttcatgcacgctcagaggaagcagccgaggttaccgagctcagccttgccacacacgctgagcactgcctcaaggaagaggacatcggcggtgacactgaagttaatcttcgcagcctcacataggcaaccagcggcaatggtgcttgagagactgttgattggtggacaacagtcttgcatagccttagtcgggttgttgagcagcgtggacaaatcaagttgtgcgcacacattaagtgcaattacattttctcttgggcattgactaccgccagatggtgttggtggctgcgtgggtgctatggttggtggttggctaggtgctacaactggtggtggagatggtgctataactggtgccggtgttggttctacagacaccgatggtggtgatgctctccttggtgatggtggtgcacgtggtggatttcttcttggaggagtttgaggttgtttggcttgggcaaatgagaagagtgggagaatgacaatggcaagaagatgacaatggaaatacttggctagctcttgttttgaaagttcttcattatctgatgctatttataggcagcatctggttactctgcaattcaatttttgtcatgtacggttccaatttgagtggaaatttctctcacgcgagttaagccaacgaataattatggtcacctttgtaccaatagtacttgccatttgctattttgatggtcaatcaagcacattttcaattgaagaacagtgaactcatggatatttttttttgagaaacacagtacaaacgcagacgctcacaacgtgcgcacgctcacccctatgaacgcacacatgcacaccctacccctatgagcacctccggaagactgggctggcatattttgagattgacgaagttaccacaggtgcctcgctgttgacgggtacgtctggatatttggggtcattctcttgaaacttgaatcgattcagtgctgatgcggctgcattggttgactagctgagatgatgcagagaatatgtgttatctgtcctatgcctccctaattaaactgaatgcacaagtgtagatcagatgctctgtttttttttttggcatagatacttgttgccaacaattaaatccttgtttctttcctttgtcttatcaatgccttcgaatggatgaattggattgaatctctgcaattactactattttactttgaagaaacagttcaaaactgatctggatttatgggtactagtagtcaatgaggcacgagtgatttaccttctacctcagtgaaatcctcttcccgttatatatgacctggcagtgttggatgttttcattagaaacatttcaatatgatcagagcatgtacatatttacggctagctaggaggacatccggtaacaaaagcttttgtgatggtaaaattgaatatatagcatctggaggtcccttttggttttttcaaatgttgtgttaaacaaggccctgtctcacccaaattcagtgaaagaaaaaattgtctagtttacatgaggcagttgattgccgtttgtatagatggctataaggcccaaggaccacgcggcccagcccgaagcacgccattttggcccggcccaagcacggcatggcccgactgggatcgtgcccatgccagcctagcctgacagctgggttgtgcctgggctgcaccctcggcacggtgggctggcccggcacggcctgatcaaataaaaaaaatattggtatgcaaaatagacttaaacaaccatataaagcaaggcccaaagagaagaggaatacataatagacttattttctagccatttgaacacagcccacacagttgagggacgaaaaatagactttttcttggagaagcacgataggccatcgtgtcttcgggctggcccggcacggcccaagttgtattgggccgtgccttggccatgtatgccacccgtaggctggcacggcacggtccggtgtgtcggtcgggccatgccggcccgactagcctcggccctggcatggccgtgccgtgccgggcggcccagttggccatctatagccatttggatgtcaaactccttttgcattgtttcacgaggatcctttccgcaagctgcagatgagcatc

SEQ ID NO: 24723 - DNA, 637 bp, Oryza sativa
gccatcggctaccgatttcatcatatttgacaaggtattagtcaacactccagattaattaatcaaagcattatacacagcatagtcaactcgatcttgaaagttattgaaaaaatcttggaatgcattgttattctgattaagatttcccccttgcggtccctgagtgccgttaccttgaaccccatggaccccttgagggttgtcgccttgatctcctggagagccatcagtagcacctttgttactcggctgggctgattcgtctagaacttgtttcttttctccctctttagaagaaccgatcccaaaatcctcaggaaccaccttcagcttgtacttctgaacaaatgtgcccttgcgagtttgcatgaatgaacttaaaaattgatctcgtgtttgctgcatcattgcattgaagtctttcttctgttcaggagtgaacttctctccaacgtggcgtagcattggacagtgattggttaatattgattaattactgcaactgttttactgctttcaactactgcttttaaatgctagctttatgcaaaagaacctttttgcctcccttggatatatcctgcatcataccttctcttccggtatgacttgctgaatacagggggtagtattc

SEQ ID NO: 24724 - DNA, 24318 bp, Oryza sativa
ttcctgcagccccatccttataaacatgtgccaaactgcgcggtaggttggaagtacagatatagtgacagctgacagacagagacaaaacaaagttagaacatctaaaataaagtgcagacacacctttcattagagatttagagtattgaacttcttttcccgatctgtcagccaccatcacattctgctgattcagataacaccgtttttcagttaacaaaccgtcatgtaatcttgaattaacaaaaaatgataaccttggtaatacctaatggacacaaatagatggcaacacatttatgatgtgggtgttaacaataatatataatttttcagtctgaacaatgtcttagtggacaaaactgaaatgaagcaagaagtggagaagtaagagcaagaagtggaggaatgtaatgcctgactacataagtttaagtggcctatcacaagcattaaataaattacactttcatgtaaaaccatatgtttagttgtttaaaattgtgaaacagcttcatagttagtttcataatgggccataactttgatccaaattaagacacaaccaagaacacatatagtgaaatcagaaaaggacagtccgatttggttgcagtacctctccgccaattttgctagccgagataatggacatgaaggtgctacagctccatcattccttcttttatataaaagcagtacaaatgaggcatgccacaaatcatcttttattaacatttctgaggattatacagaaataaaattcatagacaatttttagataagtaaataattgtcattatcgaaagcatcaatatatgggatatggaagtatgcatggcattgcgtgcgtaacaatcacatatttatgcagacattttgatagaataaaacataactttctttttttttaggaatacataactttcattcttcaggggcaagcaaataggcagggtccctcaatcaggaaataaataaataaataaactctaactgtgaattgggggaaaagaatcacaagcttttctaacaataaaaaaaactcttaactgtgaattgggggaaagaatcacaagcttttctaacatcagcttctaatttgtattccaaatcacaaaaatgaagggaagtatctgtcctagaagaaaagcaagaataaaacaactaaccctaaccacccccaaaccctaggtaaatgcaagaataacaaaaggtatatggtttatgtttgcaacttcaccctctcttcttccctccatgttggtatcctcggtgaacctttgaaaataaaacctgcaaaggtgaaaaccaaccaatcaattttagccaaaaaaaagaaagaaaaaaacaggaaggagtagagcaaggcgccgacaccgttttatcttttcaatctctttagtttttcacttttttgttgtcacggagatgccaacactgtcttctccttccattgccaatagagccacaacacaacaatcattgaagccattccaagaatgggcagatacagagccaagtttcagtttcactccacaaaaaacagacaatatacatgtgaatcaagatataccgtggatgagtcgacgtgtggggatggcggatctgtgggtacaggctagggacaccctccatttggaaccggccctcactctcatcgcatgttcttcttccctgcggaggcgatggacaacacaaaatagatgaggataaacaaagacgacgacctgaaggagagaggggactgacctgaggtgacgaccagcaagcggccaaaagctccactggatttgtaccgccttctaggtttggagcctgcgacaaaagcgaggttgagcgaagaacggatcggtgacaaggggcgagctcgagagctggcaacgtacggctctcctcttctcgctacagcacccgccttccttgacgtcggttctggcaacggagggcagagcagcggccgttggcgaaggcagcgaaggacgcagcggcggcgctcggtgatggcggcagtagtggaggacggtgctacggcagtgctcggcaacagcagcagcagcggagcgaggcggaggcggcagcgacggcgctcggcgacggcgacagcggtggcggaggcagagacggctgcactcggtgacggtaacagcgcgaggggggaggcggaggcgcccaaagacggcgacgtgatggcggcggcggaggaggtggaggcggcgcgagggggagaggcggaggtggccggcgacggggacggctggaagcggaggtggcagcgcgatgggtcggcggcgacagcgctcggcagcggcggcgggggtcgaggcggtggcacgagggggagccgagacggtggcgcgggggggagccgagacggtggcgcgaggtggcagcgcgggagagggagcgggcagagggagagggagcgggcggcggcgggcatggtagaggttaggcaccggcggagggggaagcacaggcagggtggaggtcaggcggtggcgaagaagcgcgggtgggtggagagcaagcgccggcggagaggcgcagacgccggcgaagaggagcgaacggggtggagtgcgcggccgacggtttgttcaggagaaggattaggagtcgacgacggggtgcaagcgctaatccatgtgttaatccaactcacgatgtggatcgttggatgagaggatccaacggttaagaaacttctagctatacattttttggtggatgaaggaaaaaagcaatcaagcaaatagttatatgcctcatccatacattattcaatcacccaaaattctagcatcattgcacaaaacaacaagcttatgcaattttgtagatttagctagtcggctaggtactcttccaatgattatacctaatggatgcattactaattgacccagaagacaaatgttcagacgctgatgcaagtaaggtaaataacatttctctaactcaagtcataacttcatttaagccaatgtaacatataagcaattgaagcatatcacatattttcaatcaaaaacaattataggaattcagcaatttgctacctcttcacttaggaaggaaaacattacttgctcatttaaaagcagaatagctattcaaaaggcatcacagcaaaagcaaaagcttaacccaccatttgattgcattcttcaacaactattgtcaacaattgtgttagcttatatagattgattattgcttttgctatacagatatattaggctaaaaaatgtactaataaccactaattagaaaaaaaatgttggtacttgttattggtatgaaaaattataggttagggattacattttttcacattgtataagcatggaaaggaataaaaaaaataatgatgctttgctttttttcagcagaagaagatagtctgacaaatatcttaaacaaaattatgttaacggtaaagggaaaagtgtgaatcattgacaactttcttaatagaccaggcattgtaaagcaaacaataagatgcaagtaggtgaatacgggatcccaagattaaatgtcctttcaaaagaatttacatgggttaagtggcagaataattcatttcttaccattgaacccagtgaaatggacaggctagcaagacaaagaaggaatatagcttctgagaagtaattgaatggaaataagcatcacagacaatagagaagttttattgactattgtaacatcctgaaaattcccaacaataaaaatcactaaaatttcgaactttttaaaacttttgcatcatgctggttgttatgattgctattgcttgccaaaccgtaaatgatcacaaagaaagtaaagaaaagatctacatttaagcaatagatataatttatgagaatatgttatttattattaaccctacaaatattagtgcacaagaaagcaagccaaatcaagtataagtcaaatattaatttctattataaatcatggatcaaatattaaatatttgaaccatgctgatggcttgatgccatgattagctaaaagaaatagtaaaatcgaatctaattgatttgaatccaatctcacatgaaatataagaacacatgaaatgatgatcaccactataatgatcgtgtttataaataagtaattcaccagcatatatagattgatacttagaacattttaccgagttcctcatgacatgaacatcagtcatataaaataatagccatataaataaattaagctatatatatatatatataagaatatgtgagtgtataattgaacaattagattaatgttgtaccgagtctcaatctatatttatagaatgaatagacccacgtaaaatgcattgttatacaaataagttcattcaatgtgctattgtaataataatggccacaataggatattttaattaattttagagccctcaaagcctccaaaattatctaggttaattttagaattagacctcatttaaataatgcaatagaaaaatatatatatatatatataaaagaaataaaatatgggtaatattaaaatttggtacactttcatctaaattaaaacatatattaggtaaactccatttgtatgaaatctagaatttatgggacaagttttaataggaaataggccccaaaattggataaatagaaaaaagtcactgttcattagcccctaggtgttcgatttggttcctagccatcctagctctcttcctcctctgccataccgcgcctagccgtcctcgcgccccgcgccgccacgggctgtcaccgtcgccgtcgcctcgctccgccgctgtcgccgcgcgccgtcgcgccgtctctcaccccgcgccgccatcgccgtcgcgttccgtcgccgctcccgcgccgcgcgctgtcgccgtccatcgccgcgcccctgtcccgtcgggcccgcgcccctgccccgccgcgcgcctatcacgccgccgtcgcgtcgcccgtcgcgttgccaacgccgcgcgccgcgagccatcgccgtcagcctcgcgccccgagccgccgtgcgcccgtcgctgccgccacacgccgctcgcctgtcgccgtcccgcccgtcgcgtcgccgctccgagccccgcgccgtcgcgtcgccgcgcgtcaccgtcgcctcactctccgcgcgccgcgccgtcccatcgccatcagaccgaccacccctccccgcgcctatataaacccctctccggctgcccattgcttcccacactaccctcaccacctcccctccctttcccctctctttcccatccccggcgtcgccgcctctttggaagccaccaagccgccgctgagccgacgcgccccgccgccgcgctgcgcctcgtcgtcgcgtcgtgctccgacgtcgaccccgccgccgcgtctccgtcgaccccgccgccggtcaggtgagcctcccctttccccaccgcttgtcgtcgcgccgcgccgcccgccggttctagccgagccgtgagagagagagagaggagaaaacagagaagagagagagaaaagagaatggaggagagaggttagagtgagccccacgtgattagtaaatagtaatcctccccttgatctttattagttaagtcccttacatgtggggtccctatgattaaaatctatgaaaattcacttatatatatatgtatgttgtgtccatggcaggccggtcccacgggtcagtcaatgtaaattatggaataaaaataaatgaattaggaacagtactgtttcgcaattattcaaatttgaatctttacactagcataacttattcattttaactccgatttgaatgaaacttgatcctaaattcatctaaattcataagctttccaatggtatataattcattatttaataaaatatatttataattattaaacaattaatatcaagatgatgcatagtagtcaacttaaaaatgtgctaataaatagatttgataatgtacaatagagtagatgtaataatataggcctttaacatgttttgtcactgtagcaaccacataaattaattataatcattgtttcaaattaattaaagcataggaaatgctagtgccatttattaatacatgaccacatataattatacccataacgtccaaactatatataaataatgtttagcctcatattttgtgactaaaatatgaacacatgttgatgagtctttaacttgtttatgagaaataataccagagcttgtatgattaaaccaccaatatgaaattaattaacgatatttccaatacagtagtatatgtttaggttggaaatcgacccttaagttgtataggcagtaactcactcataaatccacttaaaatcacatgtactatatagcttaaagtaaatagcagctattcaaataaataattcaatattaagatattgtgcactaatattgtgcactcacatatactatacaatccattatagctatacgttgtaatattaaatcgcttgattgcatattttaaaattaaggaggatatatgacaaacatgtatagtggataaatactaattataaatcttggcctcgtataactatagttcaattgtaaattaggattattcattgtaaaattatgtgatgggataatctgtaaccataatatgattaacctaaacaactctaacatacaaagcatggataattattaaccttttataatttattgtgacaagtaaaatatgttcataattaaagtaaagcctccatcaattaaataataatacaaatgattcattatttgattgatcctaaatccatctaacaacagaacctctggtatgtaaccgtgctatttagatagatgcatatatagccataatccttccatagccatttgatagactaaaccaccgattagccaaatatatatgtatcccataaatgctatgttggttaactcctaaatagaccacgatgacaatagaaagattaagaaactttagcctttagcatgattgggatccgttagcaaacacgaatggtatattttgttgtgcatatttgattgttgtttgaatattggtttttctcgcgtattatagaccttgtgtatcggttagtcgtgaggcaacatctgcaacttccaggaggtgaaggttgatcaagattatatcaataataaggattatcctgagcaggcaagtcatcactattccttgaacatgttgatcccaattacgaaattattttatttataaataagattgcatgcaatgatgaacatactatttgtgaatatgccatgccttgattattgtttacccttattcccttgtaaccatgattacgtatgagtccctagccaactatgacaaatgcttagaaatgctactctagaatcatgcatactcatatttatcaaatgctatatgcttgggcaattacctttgggaaggtaattgagatgcggcatgtggagacatgagcgccacattgccatgatgttgatgacatgatttgtgaaaggagaaataaaattaaacaactgttttcgactggggcggacggagaatttaggtggtatccggaaaaggctagcaccgtccccggtcaattaaggaccgagccatgaagttaagcatgaaacgacccccgtacaaccgcacttctcgtatgggtatagacctagtggaatagatagctgagcggaggcagtatccatgcatagtggtttcttgatgtgtgaggtaggggctctacggtggggcagccattggtagaaccgcgaggcgggtgtctacagtggtgtcgccatcggtaggactgccatgtgagaatttaaacatagttataacttaatgcatgtgtgagtctttccttcccgggtgcgccagaactcctctcactgctagaaaccgtgtacgcgtagagtgcatgaggatgtaaagttcatggagcgggtactgccaatgcgaggttatcgaaatgctttgctgtgacgcgtctcatgtgttgggatgaggctcatgtgttgggcagtcgcggagtgtgggtaaagtatacatccactgcagtgtgagcaaaccaaatctattcgaatagctgtgctcgcgatgattgagcaccgggacgtgtattacacttggttagactctaaattcttaacttgtgtgggatgagatattgcatgatgatttttatgctgttggagccacttcctgagagacgggaaggtggacgtcctcagaaaaccatgacgactcaatggcgggaagctatccttgggatcacaatggatggtggacagaaccgtcgttgtttaatgtgaacactggtattaaaatttgatcagtctatgctaggtcttaggcttgtgaaaagatttgcaaaacttgctttgtgcaaaggaacctgaagccattccttgaaataccctctatcatatgcatcgttgctgtggtggcttgctgagtacagttggtactcactcttgctatttatatatcttttaggagagtgttgaagagaagtccttgttagtacgcttgcgtacctgacaagatgatcggagtgcagtcttgttctaggtctcgttcccaagtcggctgcctgtggcatgtcaaccgggcccttatattattttgtcttccgctgttgttctctgatagttgttggcctacatagccctaatgtaagtatttaactcttttagcctgaattcattcgtgatatgttgtgatccaactatgtatgtgtgtaccaactactgattcatggattggtacggataaacacagaagatttccgatttccaaaatcgggggtctacaactatttttgcagtaacagaatattttcatatcaggaaccttgtgccactattctctgtagtaaagaactgaaatctaaaggtatagtacaacaagatgtaaacttagctcaatctatctccctatacacactaaaagtgttgttttctcattttagattaaaaatgacatgccattttatttcttcaaaccacactgattactttcctaagtgggaaagatatcatgcttaccttagcagggtgattggagatatgacattggtacgcatctaagcaagagctccttttgtgacaatcaagaaaaagcttccacatctaagagattttcatttattgtactccctccatcccaaaaatcatttggttacagggagctattgctcttttatgtttggtatataatgttagagatgcatgtggccattattgctatgcttaatggactattataaatagagataacaaagcttagatagatgcctaagatttcaattcgatctaatcccactacgccagatcctcacacctgtgacggcatatctgtgacgggcttaagtgttggtcaatgatgagggtcacctttgacgggttctgcgggatgccgtcatcggtgagccatccggcgacgacccgtcacaagtaactagtcacctgtgacggtccaaaaatagaacccgtcaaaagtgaggtaaagtcacctctgacgggccaaaaatatttagcccgtcacagataactagtcacctgtgacggtccaaaaatagaacccgtcaaaggtgagctaaagtaacctgtgacaggtcaaattttgtgtgcccgtcaaagatcacaaaaaaaaaattcactctcctcacccttatcctcttcttctccctactgctgagtccatccttatcctcttcttctttctccctcccttctctttctctccttccgggcgcctcccccacagcagcgagagatcgagcgatgagagttgggcaacgaggcagccgcaggccgctcgtcgccgccggatggcgccctccctcctcgcagccgcagccccagatggcgccctccctcctcgacgccgcctcgcccttcctcctctacggcgccgccgccgccggtggcagcagcaggctgctcgccgccgccaccaccggtcaccgtgccgcctcctctctccgcgtcagcgccctcaagtactgccggatctacaagccctaccaccggatctagaagccccggagctccggtcgctgcctccttcaccctccgccccaggtcgccggtcgcctcatctccaccatctcgagctcctgggcatcagatccggtctctatgtggttggggaccaccggatctggtcacccccatgctccggccaccgccttcttcgtctactccgccgccatcgtctcttcgtctactccgccaccgagctcgggtcgccgtcgcctccatccacgtagtgctgaccgccgtttcttcgtcttctccgcgcccaagctgatggcaggtggaggcccattgttctgttcatgatggacgattatgcttgccttccttgtgttgttcatgttgctactgtgattgatgattctgcttcttgttgcgattgtgattcctgtgatttgtaattgggacaaatgtaatggagacgagaagaattgcgatgatttttttgatttgtgaatgccagatgtgatttgtgattgtccaaatgaatttgatggtaacctaggaggatggtgtttttttttcttttttccccacttttcacaccagtgacggctcctaattttgaccagtgacatgttaaaatatatacccgtcaaagatggcttttacctgtgacgggttttggttgagaccggtcagagatgactctcaccagtgacgggttttagttgggagccgtttgaggtgactcttacctctgacgggtcttcacccgtcataggtgaatcgaagtcatcagtgaccactaatctctgaccagggctaaacccgtcaaaggtgagggtttaggcccgttagaggtgacttgatccggtgtagtgtccataggaattctcatgcgttgtcaacaaaggtagttaaataggccatatatgcaagtcgcttaaccgaattatccaactactataattacagataagttatgaaaaaaccataggattcaaatcctccgtatttcctatattccaaaagagataggaaatgaaaactctactttaatcagaatgaatttgcctaccaatagaattgaaatgaactcatagtatgtagaattgaaatggttgggtagtcttacattgatacttatatagaaaaaatgcactaagtctattcctctataaaactaaactaatgtagacaattctctatatacagaaggcatgggtagattgcatgttcatttgctcctgaaactgttgacagttactttcgctacttacatgtactatgaaaggcagtttattatttatgcaagatatatgagttctaaaacaaatctatcgtactactccatgaattttatccatctaagagttttatccttgacgacaccgagaatgcataggtgttctgtatacaagattagaacttccttgataacaacaagaacatgtgagtagattgaacaatatgtcgctaggctgctagcaagggagccagtctaatgcctttatttttacacaaaccattaaaacttgcatcagtctaatacctaatttactttgtctgaaaagattattataacaaaataataatacaaatccatcacccaataaatttatgtatgcaaaactatgtgttacacattttcaaaaaaagggacgaaaattaagattcatcacaatcctaaattaactataacacatgttttcacaactgaacttatcacactttaaaaaatgtgagcctagttcagaatttagaacctcaagctgcagttagaaatatagagaaaatgtttagactaaaaagtgctactccctccatcccaaaatataagaacttttagccctcaagatttgtcccacaatataacaatttctccaccaacattctcttcccaaccaatcacatccctccactattctcttgttgcactgatcttcctgacggattgccttgtctaccagcttctcaaagttagcataatccctagagatcagctggttggtcagttcatcattaaggccagaaagaaacttctccttccgcttggcatcagtacgcacatccttcagagcatagcgcgcgaggcggttgaactcatgcaggtattctgtcattgtcctgctgccttggttaagtgctcggaactccctcttcttctgtgccactatcccgtcaggaacctgagctttcctaaagctacaacagaattccgcccaagtgacttctgttccgactagacgggtaaccaagtagttatcccaccaagaagaagcatgaccctatagctagtgagtggcaaaggcaaccttctcttggtcattgcactacagaaggttgagctttttctcaatggcatgaagccagtcatttgcctccattgggtcggtggtgcttgagaaagtaggtggcctgatgctacaaaactactgtggcttgtattgaggaggaccacactgttggttctgctcaactgcgtctgctattgcatctattgatgcacctgctgcatcatcatagtcatcatctgcgtctggttggccagcacttgagcgatagttggattctccagtggtggaggtgggccgttgcctggcacaccattgacatgagcagtctgttcctcactattgctgccatctcctgctacacgactgccagtcctagtgttgaccatctgaaggggtaacaggcaagaaggggatataaaaaaagaaaaacaaactgcttagaaactaagctttgttacattataattaaactgcaattgttcttatctgacttaaaacacttaaaagacagcaaccaagtccttattaagatagccataccatatgcacatggtatcgacaaccaactaaccctcaagcgaacaggcctaaacacggaaactaacaagcaaacgaactgcgcaaagagctaaacaaaagggtaacgagctaagcaaagaggtaaactaaagggtaacgagcttaatgctcggagcggctcttgcggttggtggagtcgtagccagtcttttgctcgtctcccagctcctctaagcgactcctggagtccatcaggttggtgttgccattggctgcctctgaactagagttgttgttgccactgggtgtagaaggtaaccatctactgctgccactagctacgcctcggaaagctgaggctagagcgaaggtgagaactggcgctggagtggaggctgaagctggtgcaagagcgggtgcgggtgcaggagctgcaactggcgaagatgaaggagctggagctggagctggagctggtgctggtgctgggactactggaggtggtggaggtgggtgcaccagtagaatgcaaactggagctgtgtgttaactgcagaatttagagataaactcaaagtcaaagaacaaatcgaggaagatttggagggagatggaattattcccaaatttcgggtgcgcatcgactggaaccatatcgggtagaaacggagtcgaactaggttgagcccatatagggtgacatgagccgatacgggtatggctgagcttgcaccaggcctagattggattacaagacattgccgtgcgaggaaagagtccattataagcaattatttctattaattaggtatattaatgtgggtttcttaaagatttggcaagagtctgccataaggacttgtttgtattttttttgtaatttaggaaagctttgagtcatgtccataatggacaagtttttactatgggtataaatatgtgcccataaccatgtaaaagacaacaatcgttcaatacaatcttggcgctttgccagcttttcttttagttcttttcgacgagttctttgctttgggttagggcatcgatttcgatctactgacaagaggtaatgcttgtctcagagatttgtattattaaggttattatgtcgctttagatattttaatcttactaatataatcattgtttatcatatatatcttagttaatctatgtcaatagttcattttatatgtatcggctagttcttttctagggttttgccggtatcggttaagttgtttttgttaaatagattaactaaggtatcctgaaaatcagccaatgacttgattgtctagatatattgcttcttttcatacttaatgctgcatcagttaagtttgatctattaatatgtgatttgaatatctagctcagcatgctttttgattgccaataagggtagaatcggggtctcagccgatcttacctaatatagatgttttaatatgtttagttaatctaatcatgctttacatgttatatctatcctttatatatatgtatcacttaagataaatatactggggcaactgtgttcttacccctactttgtattctaattgtgattttaccctttttttagggtttgcatttttgccattacttttttcaaacgaagcttcagtttacccatattctgttaacatcaggtaactgtgtcaattcactcataaaaagacatgtatacccttgaacatttgtccaacttcttttagaattttgatagcattttcacacaattggcacggttgcagaacatcagcacaaagattcatcacaaattcgtcgcaagtcacaaatactatgagatggggaaaataaaaggaaaatcaagcagcaaacgacatggcattgtttgtatttgtggacgagctgcttgtcgtgtgtcgctattgccggcttgccgcaccatgctgctcgctgctcgcttgcccgtgcgttgtgcaggagctgcctcgccacagccttcgccgccgccttcccgtggcgctgcgccagattcactgccttcctgtacgctgcgccatcccgctgccaagcttccctgctcgctggcttgctggtcgacagagccgccgctcctctccgctgcgcgctggctgcggggccgctggccgccgcgcctccctgtgcgtgcacccgcggggccgccacgctgctccaccctgcgcgcgctgttggtatttcttaacgtcattactaaaaatataattcccagcaatggcgcagaaatactcctggtatattacggttacagagttcatccgcaagcgcacggatataccattgtagcatctcacccaagagtattccaagggtatcgtatttattttattccgtgggaagatcatgtagagagaactcaactaataagttatatattatttatgataatcatattctaagcaagggttaagataatccaagagtagagtgacacacaagcattactactcattctcataataaatcatctaagctaagtggaaagaaaagagagaaaatctattcctatacttctaatatacatagtatacatacattctagttaactgatatactagctaataccccctatccgatgccctcctggtacttcgagaagccactcctaactgccgagttccttacgacagcccatcatgaccatacaaccggggctaaatacggaggaataccctccccagggaattaacataggattatatatcggcgcggaggaatacccgtactgagctgtcaccatcagtggtccacctctcatccgcaatatataaccccaaataatgatatcccataatctaaacactatgcctaaactaccatatactactctaatatcattgtcatgacatagagcaattgcataagcaaacattatacccgcaccaaagcatctcccagataagctagccgtatattcaatataacatgaacataatgtaaattaggtactcatatactcagaaagtatttcaataccataaatatatttagaagagtattctaataaaagtacaaagcttacaaaagaggaaaggaaagctactagagccatacccgagctcttccgaaggcttccggactcctgatttctactctattcctattccactagctagatactactaaactaaacttgagagaaatgagagagctattgcttgaggagtgtgagtgaagtgagaaggtgaagtccttttataactgaactatgacggttgtgacggttggaatggtcggtaatacgtaccctccaaccgtcattggggtttcatctcaaccgtccagccaaaacctggattcaacgaaggcgagggaggttcggccaccgaacctggggccggcccaatccagcccaatttcggttggcggccttctccgttattcttctccgcagacttgtgaattttggcccaattcatcgtgtcaattctgagttcttggcccattcatacacaagtctggttctcgacatcgtctaattgatttatcgtctgagttgatgttgattctcctccactttagtgtctatctaagtattgttctatcggctatgatataaacacatctaatctctaaagatggtcaatctgatttatatacaatccatattgtctctataagtttgatctataccttttgtctatgattcaaaaaagattgacttcgagattagatgattgtttgcctctacagccgatacatcatacttagggtttacttgtattattttaacatcacacctaacagtcgatcctgtttaattgcatcggctagtttaaagacaatacgtcatcaactttctagccgatcggctatcgtttgtggttctaactgtccgctcaatggcgagctcccacactaggttcacttggaggttcacgacattcctaccgttctacccaacatggtggtgaaaacaataggaggcaccttcaagcatgcttgtcagagggccgcttacatgatgatggccaggataagggagctgcacgaccataacctccacaacactgcttaccactaccaccctggtcatggcagttttgctgacgtcagcaccttcaagtcaccgtctgaggagaacgacacagttgacgaaaaatccgcgcttggccaatggttccggaactgtgttggcgcgaaataagtcgacgaacacaacgacctgggagattttcttagctccaatgtaggtctaaaggttgatgagatgcgggcaggcctttgctcctgcaagtgacaagatatacaaataaaaaatcaatgagccgattggccgacaagccgatggagtaattccaaccgattccgataccagccgatagcgatagggttttgagctattggctatatgcttgatgtagagtctgaaacttgatgtaaataatgatataaagacaatcggctgatgatgataaataaaatataatccagtagaaaccaatcggctaacaatgatatgatagaataagcaacgattcgaaggttaaagcatgaatcggttgaaggtccgatgtcataaaatcaacgagattagataaatagtgaaacatgtgttgcgattggctaaatccaaatgcgacatctagatacctcaacggctgaaaccccgatgaaaccctaattggcaataaaaaagcagggtaaaatatagggtctaaacacgacttagtagatcaaatttaactgatgcagcactaagtatgaaaagaaacataatatctagacaatcaagcccttgactgatttttagggtggtagataccttagttaatctaatctagcaagataatttagccgatatcaacattaaccctaaacggatctcagctgatatgatcaaataaagatgcttaactagattaactaagatatatgataaataggtaggaaaatatatcaactaaaccagagcaatccaagaggttgaatgtggtgatgcaaccttgaacgaccgccaatgtagccaatataattggcaggggctggcggaacgtaggacttacccctttgccggagatcgaaaaccgatgcaaccccgcatctggtgccaagttccgccgcgataagtaaaaacctcggtaaagagggtggagatgcgctgagagtagttgtattgatctgtgaatagtttacaatgaccccaggtgtacatatttatacccatgggtagatactagtccttctcggacaagaaagaaactttcctaaagataaaaggaaaacataaagtccttattggacactaaacacagtttcctaaagataaaactaaactaacagactcttcctaattaatagataaactgccatgccgcatcctccttgaactcggtcacttctggataagtttcttttaatagattaatttccttaaccgaatatagtaagaatccgactattggcgacttgataattcctatcggccgattctaggactctaaagccgataatgactctagaccgatcatgactttggagcttagcaaatttcactgttaatagacaccacctttggacgcatgtgctttgtgatgaagagtttatacaaggtcagtgctgataccaacttgttacgcctagaaattcatgaaccaaaatccccaagcagaatgttcattggaacccctgtccaggaccggccagggtacacaaacgacaaaattgatacacatatccacgtcttacaaacataataaagttttacatatggaatgaaattaaaagcaagctaaactagattacttgacgctcgcaacgtgacgactccactctcactctatatgcatccttgacggcaacgacgagcctacttctccgagtaaccttcatctgaaaagtactctgcctctgaggtagggaagatagagcaagactgaatactacctaatgtactcagcaagtcataccaagaggaggtatgatgcaaggtaattccaaaggaggctaggggttatttgcataaagtgcttaaaagcagaagttgaaagtaggaaaactactaaagtaaattaagcaatattaatcatctatgtcaaacgctacacaacattacaacaggcccaaccaaccacctgaactaaaccagttccatttaagtcgaattattaagggtgagactaatcacggtgagtctggttgatctcccataaccgcgggcacaattatccgaatagttttactctgattagaggtgtacaactatacccacaagacacagccccacgacacgtttccgtgcgctgacatgccaccatgatataccagaaagagactgtgacaggacccatcgcataaccctccttaaccaatcatacccacttcaggttttgccaccacctttataaccatggcgggctacccatcctgtgcctaggtgaatccggaagccgcaaaagccatcacatggcccatccaaactccatcacgctcacccttccggcggtacgtcagctagggaaaagctacactacaagcccagccattgaccgcactggcttgtggtaagcacggtaattcttccagcgtaatccacgaaccggtccttaattgccatgtccccgctaggccctccgacgtggccaacttgtagaaactaggacgccgccacaagaggatgagaatctagagcgtgcttgcgccgattgctcgagtgatttcgacaaggggatacctaaacgatgtctccaacgagagaagcgatggaaaaccgccgccgccatccatcaaggtctcaaaagagctaagactaggctttcgcccggcaaccacccttgagcggtgagacggcatgacaacgcccttaggagggggaatgacactcgagcgccatcgttgtcagtccggcaaaggccgggctaggatttcaaaagctgctcaccacctacgagtccatggctgacgcaccaatgctccaccaccacccaacctctaccgacatgtgggacccctccactggcgctcccgccggccagccgtcgtgcgccgtagaccgcgccacacccaccagcagctcctcctcataccgtggtcgcctcctccaccaccaacagtgcctcatcgtgccacatcggtctcctccaccgccggatgcgcctcatcgtgccaagccgacctcctgccaccggccgcgcctcaggcgccaaactggcctccaccgctaccggccgcacctcctcacgttgtgcctttctgcgccgagccggccttcgacccctcctccaattgctgcgcgccagccagatgcagccgtctgccacgcccctggctagccatccgagaccgccgtgcctcctcccgccacagccgcagccacggtcgccacagcaaccacagccacagccgccgcagccccagtcctccgcctcctgggctccgccaccgccgttgtcgctccaccaccaaccgcgccgtcatcgccaccccatcgccgtgaagaaggccgccgcgagcatgccgttctccaccttcgtagcttctacggatccgacagcctccgacgcccgccaccgacgtccactcaccggcccgctcgcaccggcgacccgcctcgagccgccggcctgccacagcctgccgccgggcacagcagcactgcctttgtgcctgctacgaccacccgtgcctccgctgcctactgccgccaactccgcaccaccgaggccgccaactccatccacaacctccactcagctgacgctgccaactccacgccgccgaccccgccaactcgacgacccggctctccgctgcccggagcaacagatccgaccatagggggaccggatccgtgcattccagcgccggatctggaagctgccatcggatcttcctcggtgttggcgccttgccctgagctccatcttgctggcaccccgactgccttgaccgcaagcgagggagagagagcccgccgccgctgtccttgcagccacctggctttgccggcagcggcgagacgggggaggggaggagaggggtggaggtggcgcggcttgtttcgccagccgcgccacccccggggcacagcgaccgggcgtcttgaactactgaaaaaagatcatgatcatagccaccatggtactttcctcatagtgagctagttgatctaagcatggctaagcatcatattagatcccaatttatcaaaggcatgtggtaaacaacatatggctgagtaataggaaccatccacatgacaatgtaaaataatgcaatttaaatagaaagcaagatgtttgcaatataggtataatatgttcaatgagggatgcatgacttgccttgctcctgtgctgctagaacctctgcaaccacttcataatagaagagagcgtcgaaactaccggaatctaagcgacaaacaaagcacataagcaaaacaggctataagactactgaaacaggaaacaaaccacttttaatggattctaggcatttttatgaatttactgagacttgaatggacttaaacggagctcggatgaattagatatgaaatttagaagattcactatgtttttactataaacagaacaatccttaatcaattactgcgtattaaagccggatgttgatgtcagcaaggggagaggcggcaccgacacgcgggtcccacccatcagtgacacaatgcccggtccactgtggaacgggaccaccgcgacagtccattgccggtccacggggataggggctcggctcgggacgagccggctaggtgatggcggcacgggagcgagcggcaagtggcggcggcgcccaccggagagcagcgatgtggcaaggagagagaggaggaaaagaggagggcctcaccgacgatgacagcgaccgacgcggagcggacgacaacgaaggcggcaaggggtgaacgggctccggagcaaccttgggaaggagatgagaggggttagagggagagaaagagagagagagagaggccacggcggcaagcattgccagccgtagacggcaggcatgcagagctcaccggcgaaccgagggaggacggttccggcggtggaagacgacaggggaacgacggctgaggtagctctcgacctcgcgaacccgatggaggcgacagcgcggcttggcgcagtagctagcgacggctggagacgacagcggcgggagtgatggtgtgggcgcgatttagggcacgggagcaagcggcgaaagagggaaactgaggaggggagcacatgtatcatttatatagcggtggggagctcggatgtggcaagtagggggcagattttgtgacggacgtgggagagagagagagacgacggctggattcgaaaatcgaatcccgccgattttgaggagaaccacgtgcggcgagagtggtggaggtggttccgggtagtggggtgcatcaggtgcgcggagagagcggagtggggcgcctccctgacttgttattttgagatgtaaaccttagatataaattttgtacgtttcaacccttggaaagtggggtgtgtgatatagaggggcacgggggccttcgggactctaagcagagtagctcctgaccgcgaacccctgccctgccacgcggttattttaaataatagctaaacaatgttttctttatgtgacgagaatataacctcgggtccccaaggaaatgggtacctagttctcatttcaccaacagtggttaatgtgcaaaatgggcctagcgttagcaggaatcatattgtatctgatggctgatatttgagatgaggaacgatcaaacggctatagcatttttgagtaaattccctgtatatcattggaaactcactcaatcctgctcatatccctaatatttatctgatcccttctataccattaaaattttaacttgatccttctatgattatactgttatattttctttcatttcactgttaagtttgtttgcaaatatcatttatcccttgacgatgtaggtttgaatataaacttaaaaaacgattgaaaattaaatttaaaattttgtttgaatgcttagtatgtgcattttataaaactaatgagactaaataattagtgcaggaaatgttaacataaaatttgaaaataaaaatgtaataaattgaaatttttatttaatattttaataggataatgactttttattgcgaacgtcataaaaaatgaggagcatccgtaaaaaagaattgtgagcattattagacccatcttgaatactcctcatttgtagaactttttaataaataaaataaatacatattgtttttctttcattaactaaaaaaaattgtgataaataatgtgtcgcataataaactcataactataataagtcttatgtaataaacttttacatttcaataatataattcataaattttaatgtttattcatgtgtaataattatttttttataaaaattagacggtcaactaataataaactgacgggaggggcatggaataaatcaaaatcaaattttgggacttcaaaagaaattttctcttttttttttatgatgggactatacgtaattgcagatacaaattatagggttcaggtacaaatccgatcctattatagggttcaggtacaaatccgatcctatcaagtgcgtgcgtgcgagggattgtggcttgataggatcgtccggacctgacgggagaaggcgtgggttcgtgcgacgggacctcgattcgtccatccagcttccactacccctccgcgcgctgcctagatctttcctctctctcgcaccctcttattggcggaggaggaggagggatggtgcgggaggttgcggagagctgtgtcgacggggtggtgatggagatggtggcggcctactgcggccgcttctacgccgccaagccggagctcgccgcccgccgcatcgaggccatcggcttccaggtcggccaccagctcacggagaggtaaacgaatctctctctctctcttgctggatggatctgctgctgcgcccctcccccgatctttccggcgagtccgccgacgagggcctcagatcttctcagtcggcagtcgctatcggttcttgctgactccgataaattttgaaatgttgcttttagtcgccctaaataagggcttattaatcagatttcgcaacaatatcgagccttagacttgatcgcgaagcacttcttgtctttgggagcaggagtgcagggccttgcctacaatcaaaatttgggttaattggatccgctattataaatttcacggtttagaaaaataccattactatttggtaccattgccattgcaatttcataagtattatcactacagaccttttcataacattttttgttttttaagaccaaattaccccctcttcttccttcttccttcccctctctcctctcttccagccgacgaactcgtatgagttcagcagctcatgccgcaggctgcagcgctggaagagccgccgcgcaggacactgctgccgatggagctgaaggagagtggcatagagttgtgag

SEQ ID NO: 24725 - DNA, 1351 bp, Oryza sativa
ctgcagccctttgtctgagtttagtgtctgaccttggcccttgcaggttgtgtaaacaatatactcctgttaccatttaaggttacgatttattctctacaaattcatactaaattcatattatacaagttcatgcttaacaattgatttggatttctaggtatttataaaatccagattattttgtgaacgtgaacatggaatgtatctaaattcagcgtgtggacacagccatgccatgtttctcaagtcagtttatgaatatatccttgcgcacatagtttccccctatttttactcttcttaaatatatattatacgccggtgacgacgacggcactatacccatcccgtggttgaacctcaatggccagctcggcgacatcgtggaccgtgccgacggctcggacgtgccgttctctgtcggcggcgagatgttccacgcacaccatgccgtgctcgccgcgcgctcgccggtgttcaagacggagctcctcgggtccatggcggagtccgccatgccgtgcgtcaccctgcacaacatcgacccggccacgttcaaagctctactacacttcgtgtacatggacgccttgctgtcgccgactagaggcggtgccagctcgacgtcgacgacaaccggatttttcaagagcttgctcatggcggtggacatgtacgcattgaagaggttgaagctgatgtgtgcacagaagctgtgggggagcgtgtcagtggagacggtggcgacgacactaggctacgccgagacgtaccattgcccggagctaaagagcaagtgcctcagcttcttgatggcggagagcagcttcaagaaggtggccttcactgatggctactttcatcttaggcaggatttcccgttaattatcgaagagataaaaaagcggattgagagttaaaaactttacatacatctatatcaatctatactgatataaaaaacaccagttttctatttagtacacccatacattcctaaccgttagatcctctcatccaacgattcacatcgcgagttggcaataatatgtattatgataacgtgccttacacgtgcacgttcattagtgattataaatggagtaggttatattaatgatacttcacatatgcatgaattttatatgaaatacattaatgcataacacaacatacagcatactgccatcaaaatattcaaacataccactaacataaatacaagtttaatcttctaaattattcaatttaacagtacacgctgaatcatcaatagtggaggcagtaacaataaaatgttaaagtgtagcacaaccgctatgttcacttgcctttttgacattaaatc

SEQ ID NO: 24726 - DNA, 6283 bp, Oryza sativa
cgcgcgaactgacttttggggaaagacactctgaaaagttggatatttgctggtcacaacatattaaaataatatttttcggttgaagaggagacgtcaaagtactgaaatgcccttgggcccacatctgatctcccctcctcgatcctgactccgtgcgacaagttcgattaccgttgcgatggatttctctggcggcggcgtgatgttgtcggagatgtaccagagcacgtggcggcggctgctctcagcctgcgatgacgtggccagtgtcggtgccaacctcgtcttcctactactcggcaccgctcgtcagcgatgtctgggattcggccgccgccgaggacgtgcggcaggaggtaacccagatctagggcttgtccgcgcggttgggacggctctggcgatcaatccgcgcgctccccgctgccatccccgttctctcttcccgaccgcctcgccttcctctccctctctacatgcccacaccgcgtggtcctgggcggcggcgtcgaccttgacttcctcctcgcggtggtgttcctcactatccgtgctcacttgtcgcgcttccggtgcaggaggatcacgaacggcaaagggaaccccgcggacgagtaacccctgctcgcaaagccgccgctgctgtctgaggttgcgatgccccgtcgagggaggttgcggaatggggtcgggctagtgaagtccgtgtgttttatggccgcgtcgctcgttctgctcatgctcgtggacctcatggcttgccacgaagtgtgttcttcgcagcacagttcatggcgtaccttgccattgtggggttgtcatgacagagaaggccgtggcggtgacggcgcgttctcactcggtgcacctccgtctcttctgggttgggtccatgacactggggaaatggggtagacccagcgcccgtggttgcagactgtcccactcgtgggcaaagtcagcgagaggattaatagataagaaaaatgtgagttctaacatgtggacgcaagggcatttcagaactttcacacgatttctctcttcttcaaccaaaaaatattattttaatgggtgcagtgtccactagcaaatatccattgagtgtattcccccaaaagtcattttgcgcagtgtcctacagctaaaaccgctaagtcacgatgtcctgtagcaaatttgcctaaaattaatagctaaagtttaaaaagtttgaccgaatattttcctaaacgtcaaaaatatatttatgctgggactatttcttcacagagaaatgatactcacccaaagtggtccaagggttggctaaaaaagttgataaacatttttttcacattgaaatacattgtcgtaacacaaggtttaaagttggcccctagggtttagggtttacaagggctgtgaactggaaaacaaattaaataagcatatttaaaaaaaataagagtgtcatacctcagaaacttaatcaggtagaagagattgctctactgaagagactgcaccatactctagtgaaggactgtcacgaccggaaataacccaacgggcgttccttacgtgcgtgtattattccttgtcccaggaggcaaagtacatcaaaagttgatacaattcagagtttaacaagcggaagcgtaaatagttaatttattacatgggcggcgaaggcccggcacacatgaagacaaacgaaaaacagcggaagactagggtgacgaccacaggcgcttgacggcaggcacgagctagacaccaaagccttcatcatccaggaactcctcttctgggtttgggaaaaattgagcaagactgagtacaaccaccgtactcaacaagacacacccacgagtgcagaataaatgcaaaggagtacaatggagtaataatatagggggttagggtttgtagtaaacagcattagaagacacttagttgctcaaagctacttttagaaaacacgatcctagatctatacaatattattaaacaaggccgtgaacccacacgaacctgccttaacccaaggcctacgatgattcagaccgaactggcaacccgaccctgggtcccagctcgtcccaagccaacccaggccaacctttccacattttagttgttaagcaggcttttaagaatttaaaacactaacttgggtacaatgctaggcttgcccataaccaagggcgcggctattcaaatagattatactctgatcagaggtgtacatctttacccacaagacacatcttactcacgtgtaaccacgtgccacataccaccacggcatatggacggaagacatgacatagtttccaacccatcctagccatagacaagagtaccgacccaaccccacctacggccggaacctccgggacaggtaggcaggactgagcccctagcagcaggacaacagccctgtgccatgacatctcgactaaccgggccgcagctcgtatagccttcatttgtcctagagatgtccatcgacccccgacttcgtccatctccatccgtgtacttttgtttataaccagactgatccacaaactaagccttatccactagacatgtggaagtacggtagtgctttgcaatagaggcccgaagaccggtccttatgtggccgaggtgctactatcaaaaccatgcaccccgagcccagcctaaaaccattttgagggttttgaatagagggggaggtgtgcatccaattccacaataatccaaccattccacaatgtccaagtgatatgaatattcccaaagtctagagttataaaaccacctaatgttgactaattgaacagcgaagcatctacataaattcatactagtggaaccatgaatagagtacccactagttggggttttgtttaatctagggtgaacaaggtaataataacaataacaataataataaggtcataacaaaggtaaataagcatggctaaataaaagagtgataacgcgggaatttaaataaagcgataatgcattaatttaaatcaaaataatttcacagactaggattcaatatgttcaaagatgatgtgacttgccttgctcgctttcccaaacgtcggcttcaacctccacgtagagcggatcttccgaagctgcagcgtctacacgaccaacggaaaggaaaaagtcttttactctaataaactccatataacaagcaggaacaaagcacaaaaatgggttcttgacttcttaaggaaaaattagaacttgaacggtccaattccgagttcaaatggccaagttatggccatttgaagtttatatgctctttaagtgaatatttgcgaatttcttcatttaaattttaatttaaaaagggtttattgcgtcagccgaggggagggggcgcgcggaccgggtccacgggagtggggcccacgcggcagcctcacggtccacggtggaccgggcgcacccgggctcacaccggccggcgccgtgggccccacgcgtcagccgcacccaagggcgcgggcggctgacggccgggccccacggcgtgcccggaggcggccacgtcggcgcggccggcgggaggcggcgcccacgcccctatggtcgccggcggcggccataggcacggcggagcggcggccaagagaggggaagggaaagggagaggaggcggcggtccatggctcaccccgggtcgacggcgacggcaaaagaggctgccggagcgcaggaaggcagcggcgcggctcgggtggacgaggacgacggcgctccggcggtcggcgagctcggcgaggtggtggacggggtcggcggcggtgcggcgaagccggaggaggcgacgccgaggcgggggacggtcccggtgagcggagagggccgaccggaggtcgtcggcgacggaggagagagagggcgacggcgcgagctcgtttccggcgaggagaaggtgcggcaagtggcggaaacgggcgagggaggcgcggggagggtttaaatagggttgggagggagagagggcggccggcggggaaggaaaccggcgcgggggatccggctgccatcaatggtgccggcgagatttgcgggagcaaatccggccgtttgaatacaggagacagagggaaaaatggggggaaagggagaggagatcacggggaatgatttcccccacttaattgcacgcgggaacggccggaggcggcgagattcgcggcggcggcggcgctaggcgcgggcggggcggcgggaggaaggggatgacaggtgggccccacccgtcagcgagggtggcgggcgggcctgcccatcagcggcgcgcgcgaggggagaaggccgaatgggccgcaggggagaggagagagagggggagggagatgggccgagccggcccattagagggggaggggtttttagggtttttctttttataaaaccttttcaactttgtttatttcttaataattattatttgtgctctgaaaattccactaaaatttatttacacattttaggtttttaggaaatatacaaaaatcctccaagccttatttgacttttagctttgcacattttaatttttggaggctttcacaaggattttaatctaggcataatttaaaggatatattttttgggtcgttttgggacgtgacaaggactcaattgagtatcacaatgaacgatctcttaaactagtaaaccatgtatgtgcaggaaggcaacagtccagtcatcatctagccaaagagattcaatgaattggaggtgtgaacgtgtacttatggcattcttagaagatatcacatgtactggaaaatgcaatccaatatgcatgggctgatcttatcttgtatatgttgaaataccttttccctagtaacagaagctggaggtgccaattgcaggtggaacaacaacaatgaccaggcaatgaagggcatcatcctagtgagagaaaacataccttccgaaagatcagtctggagaaattcagaagtagacatctcaattaaggataagagttctctcataacttctctgaatctgttatcagttcaatactttggcccatgtcagattaattcttgagtcagtgctctattaatcccggagaacactcttttactagtgaaatttgagagaggcgttcaaaaagaagtagagagtaagcagcagacgatggatgagatattggctgtgaagagaactaagaatatagcccactgactgagcccttcgcaagcccccacagttccatcaactcttgtgcattccagtctctggtgaagcataaatgacaaatgatgccacaagttcccaaaaattcatataagcaatgcgacttgaagatatgatgaatgaggcctcttcacaacaagactttgcaattgcctctgaaacaccagaggccaagaacaaataattccatcatcttgttatttctttcagcataatcccttgaatcaataatctgcaaacccaggaagtttctgtttcttgggtatccaaagcagattcaactcagttaaggtaacacaatgtaaccaacgcggattcaccaaagcttaacattaactcatctatagcgctaaccactaatttaagcttctccaagcagaggttgcaacaatcattttcttattatcagccaaccatatataactgctgttaatttcacacccaccccacctagttcagccattattgacaatgggaatcaacaatatctgccaaaaataacagattatatgaatgtagcgttgtactagtacgattgaaaaatgttatggtgcagattaccttgttgtactacttcccttgggctggatgataggcaaaagatggctacatcaagccaactcaaaatgcttttcgccaaaatcagcgtaacaagaagcttcattcaattttaattttcctgaaaacggtttgataattataattttaagctccacaaaatgattccatgtttgagtgctgaatcagagaaggtaagactgccaaatacactctcccctatccatttccaagtgcaaaggatctcagcagcaacccatgctttagagaatgaaggaacagttgaagtagtatcaattgattgtgatatgttgtaacacgtatttccaagagcacctaacaagcttgtcaacaaaagcaacaaattggcggtgtttcaaaagaaaataacctaacaactgccataaactatatatttttttgtcaggcactatgctgtcataaatttcagaacatgaacagaatttgtaaagatggcagtaaaaggcat

SEQ ID NO: 24727 - DNA, 13099 bp, Oryza sativa
agatgactctacactcaatacacacgatttgcaggatatattaccaaatataaaaccttgattccatttggtcaccacccaatatcagtgcgctgctcttttggaatatcagttgatacaggataaccgatcagcctgcaaacccaaaaaggatctcctgcggttgtaccttcaaaagcatcaactggcgcacccaacgccaaggctatacctcgcatgatctttcttgaaagatctacaagtaaattttcataacaaatgctgtcactcataagtaacaaataataaatggatcaatagcatacatgcacaaataaagatttaaactaagtatagaagttaacctcttagaaggctgatatagttttccagcagtacatcaaaatttgatggatatttgggcctgcataaaaataaatgaaccggttatttgaattttgatagatctctgacctaaaatactcaaaggcagtctaccaaagttcagaacttcttcagtaatagctgaagtaattcaacaagcaataattctgtggtacctagtaccaactatttaatatgcttctagtaacaaaaatacattgaagtatgcaagtacaattgtagccataacttctattttctttactataattcataattctacccatattggaacataatacatgttggtactagataaaatattgtaaatataaattttattccctcacattcttccaaatagaggtgtgctataagctaaattatttatattgtgagtattattaaaatatgcaatagatcaaaactggggtattgttttatatcaaagtcaagtacataatatctgtctcgcatatgtcaaataatacagtgctgtaggaaaaaaacagagatggagagttggatacataccacaaattagatcctaccattggtttagcaaggtctccatatttaccaggttcaataggcgtgtagcactgtgatgttttttcttccagggattaactcaggaacaaattaatggatgataaaaaaataataaagagaaaattaaacttacatcaattgcttcatgcatgtcaggtttacccttggtaatattttcaccaactctttggtaccctctgacagtaaagacaacaaagttatgttatacaggaaggaggattagaaggatccaatgtggaacaaggaaaaatgttggaaacttaaaaacaggttgaagctgtcattttatatcacacctgtatccactctgaggtgtcattttaatcttgagtttttcctcataaggaagctgaaagaacttctgtgtcacatccctaacttgcttcattagcgagtcagcaatcccatggcctttctgttagtaacatacagacaccatttgattaggattgatattgtgtagctagtctgctgtacccattgtagtaaactgatgctaaaaagtctgaagtaggctagtaagtaaataagtaaattttaccacataaaagaatccagcctccctgcaggcatcgtccaacatttgcacaacttgcagcaaatcctcgtcattgaccatgctcggatcatcaatctttccgacaaggggactaatgtctgacaaatgaacaaagatagaggaattcttcaaatggagatttcaaagtacaagcatatatcatctcatcccaccaagtatctttacacaaaattctacaaaagctgtatctagtatcctttgcagacaagcagtcgtaatctgtggttaattgaactaactgcaactggtggtggcaaagcaggtaaaagaaaaaaaagaatcccacgcaggattccagaatctgaatctgaatcttaccgatcaaggggattgccttgaagtcagaacccatggtgatgcagggagagaagccgcctgtggggacacgaacgcggcggcggtcgggcgatggcgattccggcggcgggcgggcgggcgaagagtggcgtgatagtgcggttgggttgggttgggttgggttggggattttggattgctgcgatagcggggtgactttcgacgtcatgtgcggcgttttatagaaccaaagtgtaagaaaaaaatgggaaagtatgtagtggaaacctatacgattggattgcccgaaaaaaatgatgcgatatgcggtgcgctctgacccccgacccgagtaagaataggattggattgccatggtcaatttggagacgaccaagcaaagcaaaaccacttttcatgtactctgtctgccgtaccataccatacggcgagaaatccgagattttgccattgccatcgccacaatgccactatgtttacgtcaaaaaagaaaacaatgacatctcacacaaaaatacccttggttcttcttcccttccggctgctcgccggcaacgaagccatggcgtgggatggagggagcaagtgtcacaccccgaagttcttctcccaagtctaaattaattaataaatagtctcgagaaattatttgtgaagtggcaagagagaaaccttaatttaataaatgcaaataataatcggaaatgacatgtgaaatttttcttgagttctacgtgtcaaaatacgctaacaggatttttagtggaattttcagagctttagaaataattttaaccaaataaaaatgagcacgagcaattatttaatccctgaaaattcatttctcctttttctttttctttttctttttcccctcctttttcctaatgggccgctggcccattctctttccccctccccctaccagttgggccggccgaagtccaaggcccatcagccggccgcccgagcccctcctcccctcgggtcaccgacaggtgggcccgtccccaacctctggctggcgccgcccgtgcccgaaatcgctgctcctgcctctcccgcacctcccgggccacgccgccggcgtcgccgccttccccgcgccccgctccctctctccacctccccactactccggtgaaatcagcccactcccagcctccccgagccccctcttcccctatttaagcaccaccgcccctccctctctctttttccccatttcgccgagctcccccgtgccctccttcgccctagcacagtcgccctcctctccgccgccgccgccgtagcttcggtcgccactagccgctgcgctgagccgcgccatcgccgccatcggattcgcgagcccgagggccacgccgtcagcccctccaccgctggagccccgttcgcaccgcacgccggtgagcttcgccatggccgccgccttcggccggcgtccccgtcctctatgatctctctctccctctctaatctttcccattgtgttccttaggtgatcccgaagctcggccactcatcgccatcatcatcccgccgctcaccatcattgatcgtcaccggtgaggaactcctcaccttcctctctctctctctcccgcgccacttagccgccgcgccgctgcctagccgctcattttccgccgctagcgttgcccgcactgccgtgtcgccgccgctctccgccgccggtcgccgccttgtgccgccgctgcgtcaaaccgcgccgccgcgcgccatggccgccgagccggcttgagccgggcccgtgccaccctctctctctccagggtttaattattgcgcaataaatcaattaaggattttttttgtttatagtaaaaacgcagtgaatcttctaaaattcatagaaaattcatccgagctccgtttaagcccattcaagtctcagtaaatcaagaaaaatgcaaagaatccattaaaaatggttttgttctctgtttcagtagtcttatagcctgtttgtattattttatcacgcccagaaattcacgaaccagaatttctaagctgaatgtgcattaaatccctgtccaggaccagccagggtacacaaacgacaactgttgacatacaaatccacgtcttacaaaaatagaaaagattacaaatgcagcggaaaagataaaagcgagctaaaccgagaagcttgacttcagtagcggggtgactccactccacaggcaaaccttgacggcagcgacgaaaccaacctctctgagacggctccaactgagaagaacttcaactctggtgtgggggaaaagagagcaagactgagtactacccactgtactcagcaagtcataccggaagaggtggtatgatgcaggatataaccaaagcaggctaggggttcttttgcataaagctagcatttaaaagcagtagttgaaagcagtaaaacagctgtagtaattaatcaatattaaccaatcactgtccaacgctacaccacgttgcaacaggcccaaccaaccacctgaactacaccagttcattaagctaaactagggtgagactaatcacggtgaatctggttgatcgcccataactgtgggcacggctattcgaatagttttactctggccagaggtgtacaactgtacccagaagacacgattccacacatgtcgccatgccccgaagtatcaccatgatactgcaaagggggaaatcgtgacaagaccctccgcataaccctcccctaaccatccacaccacgctaaggtttcacccccacccctcaaaaggcagtgggcggtcccctcttgcgccgcggtgaatccggcagttggacaaccggacaccccggccgacccaactccatcacgcccaccctcgccactggtgcctaggaaagggtcgagctatacttcagatcaagcagttacccactcctgcttgtggtaagcacggtaagtctcccagggtttcccgtgaaccggtccttaattgccatgggtgcgaccagcaaaaccatgcacccacaacccaccattcggtgtattttaattaactaacaccattgcggtggcaccaaaccaaaactatgctcatagtcagagtctatgtaataatgtgatccccttttgtgtactagttgaactaagcatggctaagcatttcctaaaccaacatctaatcattttgataccccagttatcaatggcatatggtaaacaatatatggctgagtaataggacccatcccacataacattgaaaaagaatgcaacatttaatagaaatgcgggatatttgtaaatagggtacaatatgatcaaatataatgcatgacatgccttgctctcgcactaatgagacctcagcaacgtcttcgagaaactgcggatcgacgaaacggccgaaatctacacgacaaacaaagcacacaagcaaaacatactataagactactgaaacagggaacaaaaccatttttaatggattctttgcatttttatgaatttactgagacttgaatggacttaaacggagctcggatgaattacttatgaattttagaaggtaaactatgtttttactaacaaagaaaaaatccttaattaatttattgcgcaataatacccagagctgacgtcatcaaagggggggggcggcgccgacatgcgggccccgcttgtcagcggcacaaggggagagggagggggcgccggctggtggctcaaggggaggggtggtccaccagtctgtgaggcccaccgggcagcggcacaaggcgggagggggagtggatggtggctcggcacggctcaagccgaccgaccatggcagggcggcggcggcggcacacggcctccgaagacgaccggcggacggcgaggcggcggcggccggcgcgaaggcgacggcgcacggccggaacggcggcgtggctcggcgcttgctggaagggaaaggaaaggagggggagggaaggggtcctcaccggcgatgcgagggaatcgggttccggcggcggcggatggcaaccgagtggtgaccgaggtgcgggcgacactggcgagcgcgacggcaacggtttcacggcgcggcggcggctttagcggtggtggcgcgcggccggaggcggtagtaggcagcggcgtgtagggagagcggtacggcggtggcgaacggaaagcgagcggcggccgaggtagctctcacggcggcgaagctagcggcagtgattgcgcggcgaggcgacggctcttgcgacggcggcgtgcggccggaggcggcggcaagcggcggcgctagcggcgagcggcgcgggctcggtaggaggcacgggagggggcggcgagagcgggaaggggaagaggaggctcgggggagcaatttataggtggagggggaagccgtcgtggccgggaaagcctccgatttcgccggcgacgtggggtggagagagagaatggggggattcaaattcgaatcccgccccttgcgagcgcgcgtgcgggccgggagacgcgggagagagggcggcgatgtggggaggacgcgggagcggcgcggtgtgggcgcgggaggagcggaggaggtgggcgcggtggtttcgacggctggaggaaggggacgaccccgacaggtggggcccacctgtcggcgtcccggagaaagagggcgtgagggaggacttcggggaggggaagggaggagcgggccggcccagcaaggggcacgcgggaggagaaaggtgggtcgacggcccaagaagaggaaaaaggaggaaaaagaaaaagaaaaagaagaaaggatttttcctgggatttaaaattgcccttgctcatttttaattggttaaaattatttccaaggctctgaaaattccactaaaaatcctgttaatgtattggagcatggggaacccaagaaaaattccacaatgccatttccaattattaattgcattcattagataggaaatcagctctaggttaattaagataatttcttcgggcaatttatttaaccaatttttaaagcaagaaaaaggggggaaagcttcagggcgtgacatgtttgctttgtatgtcgcatagattcctgctctcccgacgctccggtgtacttcgagatagtcgccgaggtccctccagccgcagagcaaggcaagtcatgcttgtcacttaaacatattggtcccatattgcaaatgctctattattttccttaaatactgcattgttttataatgttactatgggataattacctattgtctcagccatactattggttatcttgttcctttgttagcttggggatataacaagattagatgttcggttagggattgcttagcaatgcttagctcaactagcacacaatgggagaactacattaatgcatagatttcaaattctaatattggtgttggactagagccaccgctctagtgttggttaactaaaatatactaaatggtgggctgtgggtgcatggttttgagtcgcacccatggcaattaaggaccagttcgcgggatgtccttgaagaacttactgtacttaccacaagctagcgtgggcaacggctgggcatgtagtatggctttcctctagctgacgcatccaggcaagggtgagcgtgatggagttcggatgggccctgcgatggcctatgtggctttcggattcacctaggcatgagaggggactgcccgctgtcttgcgaggagtgggggtgaaacctgaggtgtggtgtgtttggttagagggggtaatgcgaagggtcctgtcacggtctctttctggtatgtcgtggtggcatgccggcgcacagaaacgtgttgtggggctgtgtcttgtgggtacagttgtacatctctgatcagagtaaaactattcgaatagccgtgcccgcggttatgggcggtcaatcagattcaccgtgattagtctcacccctagttagctaatggaactggttagtttaggtggtggtttgggcctgtctcaacgtggtgtagcgttgagcagtgattggttaatattaattaattactacaactgttttactgctttcaactactgcttttaaatgcatgttttatgcaaaagaacctttagcctcctttggatatatcttgcatcatacctccccttctggtatgacttgctaattgcagtgggtagtactcagtcttgctctctgttccccacatcagagttgaagttcttctcagttggagctgtttcgaggaagttggtttcgtcgctgccatcaagggtgcctgtggaatggagtcgcccgctgcaggagtcaagtcgtcaggcttagctcgcttttatcttttccgctgcatttgtaatcttttatattttttttgtaagtcgtggatatatatgtcaacaattatcgtttgtgtaccctggctggtcctggatagaggtttaatgcacattcagcttagaaattctggttcgtgaatttctgggcgtgacagcaagtagcatcaccatcgcactgtgacccctactcgccagtccctcgctccttgcgcgactcccggtgctcgcactccgcctccatcaggccacaaggcgctctcaattgttcccttttttttaatgaaccagcacaagacagtgccaatttaattgaatagagcaggagaaaaacggggcttttaactatttgccactcttacggatgttgcttaacgatttgccactagacccacatgtcatagacacataagggcccacatgtcattgacaggatgtggcaaatcgttaattgccatgtcacaagagtggtaaatagttaaatttcccgagaaaaactaatagaacgacaacatcagctaacaacgtgtccgcaatctacggaaggtgactaggaggcgatcttggaagctcatctctaatctgaagcgctgacaagtcctagccaagatcaacgtggtttctcgtttgatctttggttgtgattcgtaggtgttaagttctcttaatctgttttggattgcaactactgctacgtatcttgacgggagcgactcgggttgttttaatctgctactgccaagattgattcttggaagattctggttgacgacaaatttctgtgcaagtgacgtggtaaccctaactctacgtattgttgcttctttgtttcttgtaacctgttctgcgttggtgtcgccgtctaacatcggtgtgggcgatcaaggggattccggtgaggattctacccgcccgaagccgtttgttagtgggacgtctagggtaggacgatgtttactcaggaacatctgtgtttcttgatcatcgtcgacaggcaggacgtgggcttccatgtcaaaccatgaagacgccggcaagggcgaagtgcatatggtggacaaggatcaagtggagaaggaggatgcttgacttgtttctttcggtcatgcatctaaaccggaagataatcataacggtgcgatagttttgtgtcacagcctaattttccatttcagaatttataaattatttaataaattattaatagaatttatattaaatgtttattaatttacaagtgaagttaaatgtgggaaataaaatttcctaaatataaagcatggctggatttaatttttattaaattctccatgaataattatattctctgaaattttctcatatttttcggagctcaattcctaattttaattatacaaagaacatttcagtaattatttaaataataaattaatcattaaattatctggatattattatattaaatactttgagtgtccaagtatgttcaagagttttcttggaattatttgagcattggaagtatttttaacaattgaaagatcatttcattggttaatttatttggaaaagcaataaaatcatccttcctagtcttgggccgaattcagcccattccctcccttcctctcagcccggccgaaagtttgttttgcccccccccctcgctacagtactccatcttcctcctccagccgactgtctcccgtgccgtgcacagtgtcgccgatccccttccaaaatccggccacctcgttgctcctttttccaaattagttgcgggaatggaatcctctcaatctcctctttcttttccccaaaaaatccccaaaagtttctatggagatcctttccaatttcgcggttcaatctttcctttttccggcgagaaccctagactttcccgagtttttcccgtcgttgtgggctcgatcccggcctcccatggctatatatagagccccctccctctcctctttcggccgccacctcctccttcttctgccgccgcccgaaaccttctccccgcgctctccttctctctccaagcgccggcgccgctccagccgcatctcgccatcgccccggccgtcgccgatcagcgccgccacctccatcggctccgcaacgtcgagctctaccccggccgctgttgttttgcgccaaatccaatcggaggtagcccgtcgtcgtgaaccggagcgccgccgtcgccgccgtgtctccagccgccccgcgccgtcgctgtggtcgccgctgctgctcgccgttgcctccgtcaggttcgcaagaaggagctgcaccccgtccgccccttcgtcgccaccaaaatccaccggagctccatcgtcgccgtcaacccgaagttcgccgtcgcgttttgatctccggcgaagccctgctgctcctcccgtcatcgccaagcttcgccgtcgcctccattggattcgcagctgcgaagtgaagcctgtccacccctcggttgtcgtctctcatcgccggaaagtcgtcaccgccgtgtacagtacctcgccgcccttccaagctggtcaccggctatcttctgtcgccgtccgtcgtcgcgtaagtgttggtaaggaccgtcgcctcgcgctctttctcctggtgccctccgtttgcatatttgtgccgtggttcaccggcaaccgccgctcccataccgttcaccggtgtaggtttttccctagggccttaatttaatctaatcttgtttggccctagcgtcgtcgtcgtctccgtgtgttgtcgctggcgtcgccgttgcctcttcctcttcggtcttccccggtgaggcctcttttctgttccctaggtttaatctttgtgtagctgcaatcgtgtcttcgtgtagtcgctgttgtgcagccttagcccgtgcgtagccgtgtgtgcctagccaccgcagccgacccatgcgccgtcgctgccctagttgcatcgccgctgctgtccaagccgccgccttgcgccgccgcttgctgccatcgtgccgctgcttgctgcgctggctctgccaagctgctgctataccgcgtgccgtgtcgctgctgcatgctgccacgtcggccgtgtcgcttgctgttgccgctgctgctgcgtcgcctttgctgcgtcaccgctgctgcgcctgcacgccgtgcagcgttgccgtcgctttgccgcagccgcttgctaccaccgcgtcgccgccctagcgtcgagccggtcattgccgtgcaccgcacccgctgttgtccgctgctagccaccgcgtagccactgccctagtgcacgtactgcagtcgccgcgccgctgtcgtgcatcgctatcggctgtgccgtcaccctaaccctagctttgcgtttccgccgagccgccgcctagccgagccaagtcaccttagtgccgctatgtcgcagctgtgtgtcacttaaacctagccaccgctttagctcgttgctcagtagtcgagttgtctagccgtaggtgcaaccctaggttcctaccagcctatcgtttgccgtacctgggctttaccgtgaatcgtgtttaccccaccagtttagccacagccgttgttgagtcgttcgctcgttcgttcgaacgaggtgttccccgtgcttcgttcgtttgtccgtgttgagtcgtcctttaatttagagccgttcagagccgccgattccgttcgccggtttcggttgatcattagagtgatcccgtgtcacgtagaattgactcgttgagttggtatctcgtgaggcccgcttgccagatcaatccaagccatccaatcttggtcaactctatgtcaagattaatcttagccatccaaaatcaatataaatcatttcctctcttttcagtggcatattatttctttttaatatatgtcatctaccaaatataatctaatcttttccggaggttgttttaatcttttatctcagttataaatcatttgtaaattatttaattaatttggaatagtcttttctttaatagatttaattggaatttaatcttgtaaaatttgtaattaattcatatgaaatcggaatgaggtcgttcaagtctctaaattcatctaaaatcatgatctacatgtttgtttactttatatgtactatttatttggagtttcttagtcttttttctcgttttgcgtgttagcttgtcgtttccgtcgtttcgaaggttcgtgagtgcgttggaagtattcaagaagattaattgaagaccctttattgcaaggcaagtcacacagatcccaaacacagttcctttgagcatgttgatcctatatttaaattctctatttatttcaactgtgtatttattttcgaatgtcaccgggtggtgtgaacttattcctttgttatggcctgtttgcattgattactctatattccttgataccttgggttattataatttgattagttgagctttatatattggttcagctagatgttagacatcattgcttagccatgcttagaaacattagcacataattgggataactaatgtttcactattacttaatgatggatatttaatgatagctcacgatggtcaatcgtgattggttaattaattaatgtgcttactaaaacttgataatggtgggttgtgagcacatggttttgatggtcgtgctcatgacaattaaggaccggttcacgagtttcggttgtgaaacattaaccgtgccaaccacaagccagcatgggcaacgactttaccttttgtataagaaggctcattgcggaacaccagactgagaagtggtggagataagcccacgggggtcgctggggagtccatgccttgtttataagggggtgattatgatccaggaacggtgcactgctttaggttgagttatgcgaggggtcttgtcacaatcactcatcatggtgacgtgtctgcgcggacacggtgccatga

SEQ ID NO: 24728 - DNA, 8471 bp, Oryza sativa
ctttgagctctctccctctctatctcaactcctccttgttctttgtgactgttgctatttaatacagtcacagataaaatccgcaagcgcatggatataccgatgtagcacttccactatggagtattccaagggtatcaaatccaagggaacgtgtgtggtcagatcttcctccggttcatccaaggacaccaagcaaatgataggccaggatagagaggatttactagtgaaaaacagtgtcttaggaaatcttaactttaatcctaatgcaatactacaggctctggcaacccgttgttcccagatgtcgctctactacgtacccggacagggaggacttaagtaatctcgagggctatcaccacctctacatccacctcaaacgtactgtgggatacgcagcaattactggataacaattacctaaacaccacgtctaagcaactactatctactccaatgtttataactcacaaaagcaatcactatattttagttgattatagtgaacaataatcccgtatgctattcaggaactaaccaagagataattatcacaagataaatctaaattactcaagaagaatattatattaaattcagagtaataaacagaataaaagaaataggagaagattaccgatagctccggaattcttctgactcattctactctactctcttcctattctagtatacaatatagtacaatagatcctcttataattcagctcaagcttagaagtgtatgtgagagtgcatgaagtgaggtcctttcataaggcagttatgacggttgtgagaaggggaaatgtccgaactgctccgcaaccgtcattgggagaacatctagagcgtccacgccaaaccctaggatcaaccgcgatcaggggggttcggccgaacctaggctgggccctcctggcctggccttcgttcagtggactccctagaccttcctctatccatttctcggagttttgggttgattcactgatgtttcgatgaagtacacaacccctccttgtatggatgcataattctcctcactttagtttgattttcctcccaacttcagcgtttatcatctgcatacaaatatacaccaatacttgtggaatatgagagattaagaacctatcactatgttggatgttttattatctaaactttatgcagatgttggcggtatgggattggcatttatcagccgccaacagtgacttggatctttgtgtgtggatttggagtttgggagcctggtgtgtgtttcttgatcttgagcactaggatttgtccaagagttgtgtggtgtttattactcttggaggttgaggactcctagatggctaggtgtcattcttggccaccgatctacgtgtggttggacaagagaagtttgtgaaggccggatcgcgcctccgcaaggaaagagatacccttagtggaaggaggagtgcatttgtccaacctcatgaggatagggttgaaaaagacccggctctttgcgagcccctcaacggagactagaatcccctcaaggatttgaactctgggaaatacatcggcgcgtaaacctcggtgatatcttcactctctttaccttcttgttccattgctttgtgctatgctcatattgttgttggtcgagctcacctctttgcctgtgtataatctagagctcttaggttgttctcttgtttgtattgttgttgtgcaggtcagatagtctgatctcagttcagacaatccgatcacataggactatccgatctgatatcggacaatccgaccctgttttgttttagcttccgtatttatttttaaaaaccgcctatttagccccctctaggcgacatcaaggtcctttcaattggtatcagagccaagtctctctattaagggctttaccgcctagagagtaatgatgtcgactagtggtttggtagatatggttctttactccttttggatggttcaaattatgattcttggagtactcgcatacttgacaaatttaggaccatgggtccttaaatagagcgagttgtagatgtgagcatttctcctcctaatgataaagagctatcatttgaagaggaagagaaatgcatgcatatcaatgctcaagctactattgttttatttggtgttttaagtgaagatgtatttaaaaccgtcatgccgtttgaagatgctcatctcatttggaccactgtcacaccctgaaaattcaaaatatataaattgttgtttaattggaatttttagaaatgattttaaaagcctagaagagaagatctaatttttaatcaataaattccaacataaaatggggccagataaaatttcaataaatactttgcttaattctataattcctagatttttctgggatttatttgagctaaggaagtatttttaataaatggaattgcatttcataaataatttaaattgaaaaaggttttaaaaagtcttcttttggctttgggccgaaagtcggcccaaaacccttctctctctcctcggcccagccggcccagtccgcagccgcccgcgcgcgcgcgtcctcgctcgctgacaggtggggcccgcctgtcaggtcgtcgtcttcctcgcgtcggccgccgcccgaaaccctagcgccgcgccgccgccgtttccttccaaatccggccgctcctttccttctccggctgaatcaaaagaggggaaatgatcctcgggatctcctctaccttttcccctttggaaacatcggctaaatcggcttggaaagtgtttgattcgaggtcgaatcggatcggcttttctctctccgagcccgatctttccttctcgtcgccggtcgccgtgggccttcgccgtcgcctcctagcccctttaaaaggacccccgagctctcctctacccgccgccaccctcgccttcgcctctcgtcgtccgtagcgccctagcgccgagtagcctcgagccgccatcgccgccgtcgctccagccgtgcgccgccgccgttccggtcatcgccgtcgctcgggaagaccaccgtcgtggtcgccaagtcaccgccgtcctcgtccgcctcttcgtcgccgccggagatcgtcggagcaccgccgtcaccgtcgacccgatctccgccgccgctttgacctcgtcgccgtcgccgtccgttcctcttccgccgtcgctttggtcgccggtgagtttgccgtgccgtccgctacccgttggtgtcctccgttcgtgccgaagcgccgccgttcgccggcgagcgtgcgccgtccgagccgccgagccgccgccgccggtggtgacgtcatcgctgacgtcatcgtccccgtctcccgtgagccggtcgtggaccgatcgatctcggccgtccgttttggatggatcgatctcggccgtccgttcgcatgaaccgccgccgtgcgcccggtccaccgcaaaccctagccgctgatgcaataattccctttttcttttcaaaaataattcaaccctttgagcatgttgatcccgtttaaagctattgtttctattcaactattgcatttattttcgaatgtcattgggtggaattaacctattgtttgctatagcccttttgttcttgattactttattccttgataccttgggttattataatttgactagttgagctttatttatattggttcaactagatattagatataattgcttagccctgcttagaaacattagcacactattgggataacttaagattcactattatttaatgatagcttaatgatagttcacgatggtcaatcgtgattgattaattaattacttgccaactaaaacttgataatggtgggttatgagcacatggttttgagagtcgtgctcatgacaattaaggaccggttcacgagttttggttgtgaaacattaaccgtaccagccacaagccagcgtgggcaacggctttatcatttgtatagcatggttcattgcggagcaccagactgagaagtggcggagataagcccacgggggtcgctggggagtccatgccttgtttataagggggtgattatgatccaggaatggtgcgctgtagtggattgtgttgtacaagggatattgtcacaactcctttccgaggtaccgtggtggtattgaggcacatggtgacaataacaaattgataatagagtacaattattactctaattaataagcgaataaaatatcattatagaggtagatagttcctctcaatcaataaagatctaagcagcggaaaaaaataaaataaacggcgcagacggctccactccacaggcagcttgaccagggctacacctaatcctccacaccatcagcttcactgtagaactcttcctctgatgaatgattgcaaggtgagtatatgacatactcagcaagccacgcagcaaatatgcaagtgcacaggataacaaaggatggcatagtagggtctcatttgcataaaccgcatttaacaaatatttgagaatttaataaaacagttaagtaataattaatcaatattaatccaacgctatacaacataccctgttgtataggcccaaccattctgaacaaccatcccggctgcacagttctatctccaaaccaggaatgtaccattccaaaccaggagctaatcaaattatttccaattatagcatcatttactatggtgagaagggtgagactaatcacgaaagacattgttagacccgcccataaccgcgggcacggctattcgaatagttttactctgatcagaggtgtaccactgtaataccaccacgtgcctcaataccaccacggtacctcggaaaggagttgtgacaataccccttgcataacacaatccactgcagcgcacctttcctggatcataatcacccccttataaacaaggcatggactccccagcgacccccgtgggcttatctccgccacttctcagtctggtgccccgcaatgaaccatgctatacaaaagataaagccgttgcccatgctggcttgtggttggcacggttaatgtttcacaaccgaaactcgtgaaccggtccttaattgtcatgagcacgaccatcaaaaccatgtgctcacaacccaccattaccaggttttagttggcacattaattaattaaccaatcacgattgaccatcgtgaactatcattaagccatcattaagtaatagtgagtcataagttatcccaaaagtgagctaatgtttctaagcagggctaagcaattatatctaatatctagttgaaccaatataaataaagctcagctagtctaattataataacccaaggtatcaaggaataaagtaatcaagaacaaaagggctataacaaagaataggttaattccacccaatgacattcgaaaataaatgcaatagttgaatagaaacagtagctttaaacaggatcaacatgctcaaagggttgtttgggatctgtgtgacttgccttgctggccttggaactcttcaaattcttctccggcgaaaacagactctccggaaacaacagaatctaaacaaaaagaagcaaaatcaccaaaacagcacataaacaagcatgaacagtacatatggatatttttaacatgtagatctcaattttagaaaaatttagagacttgaaccaactaaatccgagctaagatgaattagttatgaatttttgaagattaaatcggattaaaacacttaaattgattttaattgaattatgacgtaataatgaattatttttgaaaaggaaaagagggtttattgcgtcagcggctagggtttcggtggaccgggcgcacggcggcggttcacgcgaacggacggccgagatcgatccatccaaaacggacggccgagatcgatcgggtccacggcggctcacggaagaggacgactatgacgtcggcggtgacgtcaccaccggcggcggcggctcggcggctcgggcgcgcatgctcgccggcgaacggcggcacttcggcacgaacggagagcaccaacgggtagagcgcgacgcggcgaactcaccggtaaccaaaggagcggcggaagaccaacggacggcgacggcgacgacgaagaaacggcggcggtcttcgggtcgacggcggcgatggcgctccggtgatcttcggcgacggcgaaagggcgaacgaggacggcgacgcgacggcgaccacgacggcggtcttcccgagcgacggcgacgtctagaacggcggcggcgcacgactggagcgacggcggcgacggcggcgctagggcacacggcgctatggcgctacggacgacgagaggcgaaggcgaaggtggcggcgggtagagaagagcttgggggtccttttaaaggggctaggaggcgacgaagaaggcccacggcggccggcgacgagaaggaaagatcggggtttgaaggaaagagaccgatccgattcgaactcgaatcaaacacattccaaaccgatttagccgatatttccaaaggagaaaaggtagaggagatcccaaagattgtttcccctcaatcaatttcaccggaaacaaaaaggaacggccggatttggaaaggaacggcggcggcgcgaaactagggtttcgggcggcggcggccggaggttgacgatgaccctgacaggtgggccccacctgtcagcgggcggacgcgcgcgcgcgcggcggcggactgggccggactgggccgaggagagagagaaaggttttgggccgactttcggtccaaagccaaaagaaactttttaaaacctttttcaatttaaattatttcttaaatgcaattccatttattaaaaatacttccttagctcaaataaatcccagaaaaatctaggaattatagaattaagcaaagtatttaatgaaattttatctggccccattttatattggaatttattaattaaaattagatcttctcttctaggcttttaaaataaattctaaaaaattccaattaaacaacaatttatatattttgaattttcagggtgtgacagttattgtgtgcctcggctgattcctggacgagggttcacacacatgtaagcgtttggaattttggatagaaattccgggcgtgacaaccacactcaaggagagatacgacaagtccaaatgtgatgattccaaatgtgatgatgtactctttttggaagaagcacttgaggagtgttcaacttcatcaccaaattgcgactaccttcgatgatcaagataatcatcccacaaccaccttatcatcaacacatgactacattgaaggtaatgaattggtgtgtaaggttgatgatcgtccaattctcccattggattccaacaacaccgataatgaatttgtcatattctattgtgttgttgactcatgcatctcacctagccccaagtatatgtgtgaggatgatatggataaatgctctacttcatatagtacttgtggaactaacctttagaagggagaagtaaatgagcgccagcggacaagtgaagaatccacctcaccaagatgctcatcttctatttccaaagatcatgcttgctttatgggagaagatggtgacttcgagtttgatcacttgagcaagaaggatattacaattgtgataaagctcatggagaccattaagaagcaacaagcatgcctcattaagaagaatgaagatatcatgagtctaaccgaagaacacaagaaacttaaggattttcattcttcattgattatgaggtatgaaaaattggaaaatgaatttgcttgtgccactaattctattgcttgtgtagcatctttggagaagcaaaatcaagagcttaaatctcaacttgacgagatcactaacaagtatgtggatttacaagaaaaacatgatgaacttttgtgttctcatgagaatcttgtggattctcatgccatgctagaggtatctcatgaggtgatagttccaatggtaaaatcctatgagcctcatgttcaagttgatctcacttgtactaaccctagttgctcccaagcaaatatttccccgagcactatatgtgacttggattgtgtaggcaaaagggagaagcaaatagattatggacttgtgtgcattgctcaaccttctcaagataaccatgagggcatggtgaagaagcttgtggaggaatcaaccgtggcttgcaccaagatccatcaaagggatagcaagtccatcaatgcttatatcaagggacgaaatcaaaagatgatcaagagttccattacttgcttcaagtgcaagaaagtgagacatcatgttagagattgcccttggaagaaaggaaataagttaaacaagaagaaggacattcctcacatcaagtgcttcaagtgcaccgaagtgggacactttgcctcaaggtattcttgcacattggatgaaca

SEQ ID NO: 24729 - DNA, 8418 bp, Oryza sativa
ccccacaccaatattacaacttcatcattcatcaatattcataatcacaatattcacaatctcaattcataaatgcccattttaaccggattcctaagtttgtaaagatgtttgaataataaaccacataaaatgatctcaaatatgtctttcaataatattatgtaatcatgcttaaaagcatttaacatctacccacgagatgttaaaagagtaagacatcatgcatcaaaatttaatatgaagattatatcaagttttctatatgatcaaaattttagttatgtcttgccttgcgccttaagattttccgcggcttcagcgtagccatctgggtccacgtcagctccttagattcgatagtcgaactagttgtacgatctaacttacggatatgaaaagatagcaaataaagcctataagcaaattgctacaaagaaacgatagaaccaaggaacaaataaaattggagctaggcgagaggagaaatgaatggttcaaaataaattttgatttaaaaataaaataaaagagaggtgatggtttctataggttggaaattgaataaaatcgaagaaaggataattttggataggtggggtttatttggtggattcggtttctagtcggtgctagagtaaagtagcacaatggctagatatttggattggttagccgatgctaaggatggacagcataacggctaaatatcggctcgtatagtcgatgctacaattaagcagcacaacgactagggagttgagagattggtgcaggtttacggaatagtgatactctacaatcgtgagtgatagcagagcggttaggattgcacagagccaaaagctagggtgcggcgtgctgtggaggtcgagggagtagtgaggctccgaccattgtatgcgtcgaagcgtagggtgcgaagagcaacacttcgaccttgggattaggttatgccgaggtttatgaccaacggtttgacgctggggattatgaccacgcgaacgtctccacagaaggtgtaaagtttccacgacggctgtttagtggctatgggatgaaatagttgaaggttttagaaataaaaggggataaataaatcaaagaaatttaaattcaaaagggggttttaaaatagattaaagaaataaaatttaaaatgatattttaaaagaaataaagaaaaggtaattaaataaataaagagaagatatttaaagaaatcaaatggataatttaatatttaaaggaatcaaaaggataaactaattcgaaaaggctttttaagtaaaacaagaaatttaaaattaaagggatttaagataaatcaaataggtttaaattaaaaaggtatttaaataaagaaatttaaataaaattttaaaataggaaatttggtatcaaaataaagggtttgaaattggatgaatttagatcaaagaatttctggaattggatttgtggtttggaatatatgggctcctagagattgaaaaacaattaaatgaaaaaggaagttactattcagtggggcccacttgtcagggtcttcttcttcctctatttcttcttcttcttctctcctcccgtcttcttcacaggcacagagaggagagggaccggggcgcggcaagggggcgcgtggaggagggagatggcttcggtggccgggctcgacggcgacggcggccgaaggcggcactaggagtggaaaggcgaccggtggtgtagggcaaagggattggcagctgggtgaggaggatgttgggaagagagagagagtttggggctcgggtttggatggggaaaatggaggagttcgccggtttatataggcagaggaggtgggttgtgggagagagattgaggggttgtttggttcttaactaacattgccataactcactttaggcactgttaggcaagtttgccacactttttgtggcctacaaattgtaagccacacttgtggcaaagttaggcaaagaattaagtctatgacatgtgaggtaagatggtaagaaagtgtggcttgccataactatggcaatgaaccaaacacaaggctaaggaggtgtggcaagttgaagtaatgaaccaaacagccctgaatacggcacggctcggcgtcgaatggaataaaaatggcggcgccgggtgtcgagctccgattggcgacaaaggggcggctcggtagtcggcgtcggcttgcggtggcgcgtggctagtgatgcggcgcggcgttgtgcggcggcggtgaagacggtgggcgacggcggctgagcagcggcggccgcggaatggcgctggcagcggtggctgtgggggagacatgaggtgcccccggtttcggtaaggtggcgacgtggcggcagcgggtggctgggcgggcgcaaaacggcagcggcatcgggaattggcgagacggcgacggcgccgtggttgtagacggcggcggcggcacgtccacagctaggaaaggaaggaaggaagggaaacagactttcctgattgggctaaaagagggaacttcggcccaaattaaacagtagcctttaggaattttacaaggagggttttaaaagattttattggagataaaatttaaaagagaaaagtttggggtcctttgaactttataaaaataatttaaatataaagtttttaaagcaaaaaggagtttgaaaaattttaaaataaaatcaaagatatttatttttgatatatagattttaaaaaggacaaaaataaagatgctccaattttaaaagaattcaataagaaccaaaagtaaaaccttcgcaaaagattttctctaatattttaaaatagtaaaatgagaaggaaaggaaatacaaataatttaatttctaactttggataaatttttgggatagtggcaatatagatgaaagggataaataggactttagcccccaatatatgtggtacgggtttctggtgatttattggtgtgctaaaggaaattcggaatttttaaatggaagggattgtaaataggtttcttagcacaagagcaatcattctaggaatatattattctttgtgccaaggatatgatcaagtcataagaatcaaattggtggatggatcaaaataggaacttgatcacaggataatttggatcgattaaaaggaaataaagttttttggggataggtttagatagaggtctgatccaaaataaattacaacaaaaggagagttatattggtttaaccccaaggataaaaatggttaatgggatataacaaagagtcgggtcaatcgggaaaatattggcccaagtagactgtggaatcttgaatggataatttggaggaacgagatttcaagggaatatatttgtgggagtatagatttggactcggaagtatatgtggatgggaatttctacaggaataggattggtggtagattgataaattctaaaggttgggtatgttgactcaaagggggattgaaaaggatattttatggactctgggaatatttaggtggggatccaaaggaaaggtatcgacatttcatgtactctagagatatttgggtagagttcaaagagagagtattaactttgaggaaaatggaaattgtactctagggaggttagaggatgacatttcatgtattctggaggtagttgagtggagatcaaaaggaaagtattggttttggggaaaaataagaattggtatttcatgtgtttgggtagagatcaaaggggaagtatttgatgcaagataaaactggatttggaggtagtgttgtaagctctagatgaaaaggtattaactctagagagattgatatttcatgtgctctagagatggttgaacgggaattgaaagggtatttgttggagatgttcgggaatagattcaaaggataatttagagccaaagttagagattaaagaaaataaacagagaggttttgtaaaatttaaaaagagcgattaactttgcaattaaagtttaagtccagaataaaagaaaatattaaaagcaagatcactctaatgcaagaatcgagaagagcatgacttaaaataattcgcaaaaatttttcctgaaattttgagtccgttacactttccgagacatcagactatctgatgttaaatcggagtatccaatattttagaagaaaaacttcgtcctcaaacagagactcaagttccatgaaatttcggagtctctgtgtcatcggactatctaatccggcatctcatactccgatacttagaaaaactcactcgataggattttttcaaatcaagatagagagtgaagttctgtgaaaaatcagatagtccgatacatcggatagcctgatttcaaatcggatagtctgatgttgctcaagtaaaaatgctataactttttactccaaactccgatttcaaagatcttggactctatagaaagctagttttgtgggctatcaaacccaacataaaacatggtccaaaatcttcaagagattttaaaaaaattgcaaagaaacccggtgtaagtgttgtgacaagtgaaacaactcaggatttaaattttggcttaggtttttcaactcacacaaagatgaagcattttgagcactagtattcaaccaattatatgcatgtggtatccccttaatagtacggcatcctaaactcaaatgtaaaaggaaagttataccaataggaataccttcacaccaatttatttcttcacttggaggattaccaatgtcaaggtcatttgatcatcgggaagatctcatcttcttgatctttggcatttcatctttcatttctcaaatgattgatgcagataattcatatcttcaaatggcctcgcacggttcatcacgacacagtcttcactcgcccttcaccaccggtttcggttcgtcggcgccaagccccttgcttgcccttcaccaccgcatggtccatcgcagctgagcagcgcttgcgcttcaccgtgttgccataggtagtcacttcatacccacatcttcaatatcttctctttaattctcatccatcgataagtccatttcctagcttcttcatcggactaatcacttgcttatacacttaataagtgcattagtcccttaatcgtttgtcatcaataaacaaaaacccactaggagcatagatgctctttcagttacatatatattttataaaaactaagaattgctaatctaattgtataattcaaatatgtttcataaaacaataattgcaaaaaagaagtacatgtaattcttgtgatgctcgtgactttcattgagttcgggtagaatcatcgagagtttccacagtattcggtgcatcgtactaccgtactctcagggttatttgctcagtgaattatagtcgaaaatacccattgttgctcatagttcttgttctatgagtgatagcgtgcaccataataatcaaaaactgcttccttgtgccaccaaaagagtgttaattcgtgcatccacttagcatactctttcattagagtagcttggaggtaccaacgagagatagaaatgcttgctcaatcacatcgagttagtgattagaacactgatttgacggtgtcatggagcttctaggtccattataatttctacattgaatgtatatgtcagatatactctagatttagcaaacttctagttcacgatgtcagtcatctttaattaaaattcccgcaaataattccaatatattttatgcaattctatatattttaccgcaaagatattaattaaaaataataaaagcattacaaataataaataatcataaatgtgataaataaatttcataatcataaataacagaaatataatttcagtggattttgcaaatttacaatgccattcaaacaaatattccaaatacatagggtgatttgtgtattttctagaaatttcagggtttaaaatgcaaagtttccaatgcagaggaatatgcgattaattttcggaaaccacaggggcctttttgcaaatcctctagagattctttctttaccttcttttctttccttctcgcttgtctttccttttctttccccttcctcccctgatggcgccggcgggtgtactggccgatcaggcggccggtggcggcgcggcgggtgcagagactagtgaggcactgcggccagccgtgggcgtcgcggccgggcgacggcgaggacaaggtcgtgcggcggctcggtgcgatgcggaggttggcatggcatggtggggctatgcggcagcgcggggctcggtcgtgcggcggccaggggtcacctcccccctcctctccacctgtctcttgtcactgcctccacaggttcaaagattaggctatttttagggaatttttggatttgctttttatcttgagttcttgtttttcccttgttttgttatgcatccgatttgattgtattgaagctgtgaaacactgattttaaaaggtgcttgtgtaaggttggattcttatgctgattcttttgttatgacttggtttccattgtccgattctgaggatgcaaagtaacgattaggtggagcgactggtgcaacccctaacgggtgaacgcgaaagtgacaaacaaaaaatggacggtgacggttggaaaattacgaatcttttaattagttaagattaggatatttaaattacatttaataacgaaacaagttataataaatggtacgtacataatttttcagattaagacaaatcgttaagaattatgatattctttaaacctaatttatactaatttaaataattccgtatatttaaactatagaattagtaattcattataaggatcattaagatacttaccaaggcctccttcaggatgtgagtgtaggatcgaatataagaaccaaccctaccagagagatgaatggtaggaacaccaaagcacagtattagatctttttatggagaaataattccaatcttttttggaattaaaatattaccctaaacttgacgaagttgcgccgatcacactattagatcgctgttggtttgaccgcagtactctcgccggtctgactccctgcacatcgccgatctgaccgccaattggaccacctccatgtcaccagttagaccgcataaaaactccggtaaaaccaactctcttccggagtttgctaggtcagaccgatcacacccctacagtctgactggcctcccagtccgatcacgcatcgtagtctgaaatcactactcatcgtattttcaaataaacacccacctttaacaattgtatattaaatcaacatcttgattctacagtgggattagaggaattttaagaaaattgaactaattcaaatgaaaatccttgctataaaattcatgcgttcaaggaggcataaactaaagataccctcgtcaacgtggtctggccattgtactcatgttcaaaggaggaaatttaactatttgccactcttatgacatggcaattaacgatttgccacaccctatcaatgacacgtaggtcctcatgtgtctatgacatatgggtctagtggaaaatcattaagcaccattcgtaagagtggcaaatagttaaaagccccgttaaaaggagcttgtgtactagctaatggttacacttaaaaaaaaaattggctcgcaggattggtaagcccatgcggtacattatctttacgaaacggatagctctacaaacaacaaaactatcagctatgatctattgtttccacaacgtccaagttacaaaccaaacacccctaaacagggtaaatcgatgaaaccataaaaatgaaaccataaaaacaggtaaatcgtgactgtgcgcgggcatcacatacaagataaaacattctccactgctagacaacaaaattacatggctctagccagtatctcaggagaaatattacattttgtcttctcttgttcacacgaatcacaaaattacacccaatcttaagatgtgcacaaaggaaggtatgatgaagtcagtaagtaaagaggtgcctctaagaacaaagagaaagaaaaaggagcagctacaaggcgtatttcccagggtattgcgtgcttgcactctttaatgttcaaaccgcttgatcgaacaagcaggcataaaatctgcagctcatgtttttatgcgcacaacaaaagaacctgcaatatttcacataatagtcatagctgcaaaaggcagagggaatttatggtacaaaactacaaatggagaaatgtgttataattctcaaaactgcaatcatcaacgaatagtttaacctagagtcatgtactccctccattccatactactataagacattttagttttgttataagtcaaacttctcaaaccttgaccaagtttatagaaaaatatgggc

SEQ ID NO: 24730 - DNA, 861 bp, Oryza sativa
ataattctagaatcttcctttcacaaaaacttagtaaatattgatttaagcatcaaagtgaacaacccccatagcttaacacttgtcaactttaccaaatgttttccctaagtagtattacttttccctccaacaactctcattcaaatttctccacactttaccccaacctacctcccacttttcaaatactcctcatttaattatggacataatagtcttttcctttttttttctttctctaaaacaacctaatccattatgcgatggaggtagtagccaaggactccaaaattctggttggactacctgcatatggcctgtggcccattttcaagcggcccaagtcatattagactcagttcacaatagtaaccagggataaaaacagagcagatatggacgaacaattatcataccatattcgctttcatattttttgccgggtgtaaaaacgaatacgaatggcttggatacagaaacaaatacaaattatctcaaatacgaataaggatcgaatataatcagatatgaatatggcaatatttttttatcaaaacacgaaaaccacctcaacttctaatagaaacgaatatcatcatatataattagctcgttttatataaaatatagtataatttataaacatatttaaaagtttaaataatattaatagtgttgactagtgttaagagatatgttactactaaattctaaaaatgtacattgaaagacatagagttataaagaaatgtggtatatcttatggctttagcggatatctaaatagcactgttcaccggatatccgtacccgtcggaaaccctgatatcatattcgtattcgtatttgggagaaaat

SEQ ID NO: 24731 - DNA, 747 bp, Oryza sativa
cctgcagccctgcaaagtacattatttcatatcgtaatttagttcacaatgacatgatcttgttcggtacacaatactacaatttaacaagccaagtatgtacattatttaagtagtgcaacaaatataagcagagcttgaaaaagagcaaagcacggtgatctgaccataggataggagagctgaggtgcttaagtcacaaaaggcaaaggtaagcctgaaaacataatgcatcatccagaacttcgtctgacgatctaaccatagtgccacaccatgatgagggagggaaagctcacagcgcagcaacaccatgctaccagacatcaagcatcagaatcccacaaacaatacctcttttgaggcctgcagaaagaagcaaaagctggctgcctgccttaccttccacacccacacaaagtcaatcaagtaacaatgatgataagggccttaccaaagaccatatatacacacattgatgccttcagattttatttatgtgtgagctttagtatcgccactgtaccagttgccagttctagttatccgaaacctccacgccaagtttcttcgcctccatcttgagaaacttcaggtatctaacagcttcttcaatgacagaggctgtatccaattggtctccaccagggattattccctaagaactgtgaccatatttctcatcctctcatgagtaacagtgtccatggatccatggaagactgaactctggctagaagaatgatg

SEQ ID NO: 24732 - DNA, 2230 bp, Oryza sativa
cagagctcgaggcccatcgtagggacctggcggagatcgccagggaggtggaggaggagcgggagactgccctcatcgccaccgccgtgttcaacgcggcgcgggacgacctccgcctccaatacgggagccgggcggcggagctagagaagaagctcgacgccgcccggggaatccttgatgctgccgctgcccgggaacggcgggcggcggagatcgaggcggcgtcccggcagcgtgaagaggcccttgaggctcgcgccacggtgctggaggagcgcgcccgcgcgaaggagagggacctggcggaccgcgaggccgccgtcgccgtccaggaggcaacactggcggcgcacgaggccgcctgcgctgaagaggagtccgcactccgcctccgcgaggacgcgctcaccgagcgggaacgagctctcgaggaggccgaggccgcggcgcagcggctggcggacagcctgttcctccgcgaggcagcgcgggaggagcaggcgtgccgcaatctggaaggcgcccgcgccgagagggccgcactggatcagcgggccgctgagcttgaggcgcgggtgaaggagctggacgcgagagcgcatagcggcggggcggccgcgggcaacggcgacctagccgcccgtctcgcagccgccgaacacaccatcgccgagctgcagggcgcgctggactcgtccgccggggaggtcgaggccctccgcttggcgggcgaggtagggcccggcatgcttcgggacgccgtctcccgtctagaccgcgccgggcggtaggcgggcctctggggtgggcggaccgcgaagtacgccgccaaccaggggggcctcgcccagcgcctctcagagatggccgggaccctccagcggctccccgaggagctcgaggagacgatcaagtcatcctcgagggacctcgcccggggggcggtggagctcgtactggccagctacaaggccagggaccctgacttctctccgtgggcagcgctggacgagttccctcccggaaccgaggacggcgcgcgcgcgcaggttcgggacgccgccaaccacatcgtccacaacttcgagggtacagcccctcggctcgcgttcgccctcgactccgacgaggagggcggtgacggtggtgcggacgacagcgaggacgaggccggcgacccgggcgcgtcggagtgagcccccaggcccccgccaatcttaaatagcttttccttcttcttccgaggccttcgggcccccttcttgtatagactgatttaatctgtaatcaaataaaaaggaaatttctatgttaattctatttgttgtgtgtatgagacggggatggtctgtgccgcggtccttctgtgtcttggcttgaacaagggctcgtgcccaggtcccagcctcaaacggcgcgggtcggggctagtgcctggggagatccacgtgtcgagactggccaggccgggagcgtggtgaccgagggttatggatgacccgattgtggcctttgccgattcccccccggagttcaccacgccccggggcacggctcggttctgggcccttttgtcgattttagccggcccgggccaccgagggcaggatcgagcacgagcgtgctaattcaagccaagattcttcaaaaggaaacaatggcacagacacagtccttaggaaatcgacaatgcttttattgaaatacgtaagataaagaagataagtatatgcatgtggtagcccccggccaaccctgcacgcccggggggggggtgcggggttggcccgagcccgagacctgacacccgacccccattaggggtagaagcgacgaaggtgttcgatgttccacgggttaggcagctctgtgccgtcgcccgtggccagccgaacggagcccggccgggggacaccgatcactcgatacagaccctcccacattagtgagagcttgctcagtccagcacgtgtttggacacggcgtaggacgaggtcgtcgacgcagagtgatcgggcccggacgtggcgctgatggtagcgccacaggctctgctggtagcgtgcggctcggagggccgcgcgcctccttcgctcttccaagtagtcgaggtcatctctgcgaagctgatcttgatcagcctcgcagtacatggtggcccgaggggacctcagggtgagctcagatgggaggaccgcctccgcgccgtagacgaggaagaaaggcg

SEQ ID NO: 24733 - DNA, 1228 bp, Oryza sativa
ccgccaggtagagtagcaacggctcatctggctccggggcgactaggaccgggggagaactgaggtacgccttcaactgagtgagggcccgctcagcctcctccgtccaggtaaacggcccgaagcgtttgaggagcttaaataggggtagcgccttctctcccagcctcgatatgaaccgacttagggcggccatgcagccggtgacgcattgcacatccctaagcttgctggggggcgcatccgctctatagctcgtatcttctcggggttggcctcgatgcctcgggcagagaccaagaacccgagaagcttgcccgcaggcacgccgaacacgcacttgtcggggttcagctttatgcgagcggagcggagactttcgaaagtttccgctagatccgagagtaaggtctcttggttgcgcgtcttcacaaccaagtcatcaacataggcctcaacattacgtcctatttggctacccaaagaaattcgagtagtacgttgaaaagtaggacctgcattctttaacccgaaaggcattgtcgtataacaataagttcctatgggggtaataaatgcagttttttcctcatcctccctagccatgcgaatctgatgataaccagagtatgcatctagaaaacacaaaaggtcgcaccccgcggtggagtcgacaatctgatctatgcgaggcagggggtaagggtccttaggacatgccttgttaaggtcggtgtagtcgatgcacatccgaagcttgccgttcgccttgggaacgacgaccgggttcgccagccactccggatggatgacctctcggatgaatccggcctccagaagtcgcgccacctcctcgcggatgaaggcttgacgttccagggcctgccgccgcactttctgccggactggccttgcgcccggccgcacggcgagacggtgctcaatcacctccctggggaccccgggcatgtccgccggtctccaggcgaagacgtcggcgtttgcccgcaggaaggagacgagcgcgtcttcctatttgtcgtccagaagaccaccgattcgtgtggtcttggacgggccgacgcccagggcaacctccttgaccgggacctcgtcgcacgtgatcatccgctgcctcggggcggctgggacggaggtgctgagcctctcgtcgccacccgcgggcttggacgccgcggcgaggtggtccgcgcgctgctccatacaa

SEQ ID NO: 24734 - DNA, 2048 bp, Oryza sativa
tatgtgccctggaagttcatggtgaactgctggcacaaatcctcccaagagtggaccgacgcgggtggcaagttcattagccaaccccgcgcctgacctttcagggccatggggaagaaattcgccatgaccctgtcgtcacccccggcggcctcgatcccggtcgtgtagatctggagaaactcggcggggttgacgcttccgtcgtatttttcggtgatggtgggccggaaccttgggggccaacggacgttccgaaggctcgccacaaatgctcgacagccggcaccgccaaccggggacacggggggctggcccccgtgcccggaccaaagtggcgctccggacgaggaagcgccctctgttgcgtgggcagcacgacgaccattgcgccggcgctcgacattgaggcgggcatccggccccccacgcacgtcttcttgggttggaggcgttgacgagggaatggcggacgaacggcgggtaacggccgctgctcgccgcgctctccgcctcgacgatgcggagccggtggtagcagcgccagaggccttggtgacggaggaccgcctgccggcgcctaggcgctgctgtgctgtcatgaccaagtcggccacatcatccagccaacgtcgggctggagtctctggatcggggacgacgggcgggtgacgcaggaacgcgcccgcagcctggagcgcgccctggggcgtgctgccatcgccatagacgaggaggcgacgctccccgtctcgcagtccttctccatcgcccgcaagcggcgaagtcgcggatctttcgaccctctcgagcgcctcctcccgctcaagacttcggcgagagggggacggtggagtacgagcccgacggcgcgggttctgctccccgtcgtcaccgctagcactcggagagaggttatgcgccatcgcccgttcggccattgggctgagcgggtgaagcttggcgcacacgaaagaggacgagggcttagaaagacacacgcgccccctacctggcgcgccagatgatggagcgtggggctcctcaccgggaggccgcgcaggcccccctttgccggttcggccgggggcgctagtgaggttctttgccctcgatctgtggaatattcgcgagagagcaaatgcacaagacacgggcgatgtagacaggttcgggccgctgagaagcgtaataccctactcctgtgttctagtggatctgtgtgtgaaggaactacagaaagttggagagctaaagagttcaggtattctcagtgtcgcctgagagttcccctccttcggtgggcaaggtcctccttttatatctcaaggggataccacatgcaccacttctacctactcttcttttgggtggggacccaccctatcttgaccaaaacttggctcgcgccttcgcctggaagctaaatcacagcttgtccttgagtgaggcccagcgtcatcactcgcctgacacaggggatctccctgtcattccttcattaatgggtgaagatttgcaatggctgctgtccgaatgaccctccgatgggatgggtcatatctacctccactccgccggaagcagatgcaacgtgggagctcggttgtctgccgatgacgtgaccggcgtcagaccagtcacagaccggtcattcttgtccaccacgtgtcagtttagcacgccgcacgtctgcccttcttcatacaatgacttccttgcaatggttgcgatgaagcctggaatgtatctggccgggactgacgtgccaactccaggagttaacacgccggctccggctagggacgagagcatggaggctctcatcatttcgatgggacggggcgaggcgtgtgacaggccgcctgttgccacctaacccgcgatctgaccggtcacacactgcgaccggtcacggaccggataagcgtgcgctgcgctgcatcaaatgcgtcgtggcgcgctcgtctaaaccgcaataaatgcggttaggtgagccccgctgtgctcacctaacctacacacgtggcgccaaaatcacagggggt

SEQ ID NO: 24735 - DNA, 642 bp, Oryza sativa
cggggaaagaggaagcaggagggtaccccttccccatctcctccccaaggggcgggggcggtgcgtgccagcagcaggcgcccggagggtgccgtgccgacatcgcagcccgagggggagcggaagaagaaacggctccgcaagatgggggggaccgagccatgtcgggggaacctcatctcgcccccgaggtggtcgtttagccgacctcctcgcaggttcgtctccgcgcccatcgcggccgtattcattcccccatctcccaaggcgagttttcactcacccgtttctttttgtcttctggtttttcttctgcctcagcgagatcccgtcgcgccccctccgccattccaagtccggccggtccgaggccgaggagacagcgaccgcgaaggcccggagacgggaagctgaccggcgagaagccgcggaccgcctccgggaagccgaggaagccgcccaggaggccgtccgggttcgccaggctgaggaagccgctcgggaggaggccagactccgccgggcggagaagtcggtccgggagcgggaggcagggcacgcacgccaggcggcctgccaagcccccgacctgactccgcccgaggcgacgacgacttccgaggccacccacgacgaggccgg

SEQ ID NO: 24736 - DNA, 634 bp, Oryza sativa
atcggtctctgcatttatgctttcaggtcaccatggttttatacgaggttcttcggttgtacccgccggcgatcgtcttcagccggaagacgtacaaggagatggagatcgggggcgtcgtgtaccccagaggcgtgatcctcgaactgcctgtgctgtttatccaccacgaccgcgaaatctggggcagagacgtgcacgagttcaggccggagaggttcgccgaggggatctccagggcgtccaacgaccgcggcgcgttcctcccgtttggctgggggccgcgggtctgcatcggccagaacttcgcgctgctcgaggctaagatggccttgtgcatgatcctccagcgcttcgagttcgagctcgctgcgtcctacacccacgcaccgcacaccgtcatgacgttgcatcccatgcacggcgcgcagatgaagcttaggatgatctaatctggtcgtgatattcggtcacgtaacatacttattgtttcttgtgacttgcgtacggtgtacctatgaaatgccctatgaaatgatgctttcttcacttgtatggatgttggaaataaaaattcaaggagatatgggcttttgattggcccaagtatttactcattgaacaatgaaatcta

SEQ ID NO: 24737 - DNA, 620 bp, Oryza sativa
atttgccttttcctaatttacaatcaccttatctagaagccacctcagcatcatataccttttaaatttatggattaatacaaaccaactaactagcaaaaataggccaaatttctagttagggtgtaacaagtacctcctgcatcctctaaagtggaagcaccagacctgatcattgacattggcgcctttcagcctctgcgtgtatatataccttccaggcatcacaatgtactgtctcgacccaatctgcgacagaagaaaaataatcaaaatagctccctcgttattattcacagcgctcatacaaaacaaaacacagagaaaccctcctcagatgcactcctgcatatttcagaaatgcacgcgaacaattctctgtaagactagtattgtatcattcgaaaacactgtaattctctgcgccgttttcttaatggtgtgtcctgtacatactaataatcggcgtgcgcgcattcctattggcgcgtgaatcctaagcttcttatgcagcatagagtaagcaacacaagcctgaaatcaaatgctcacttcaccgcaagaagcaacgcaactagcgccaaatgcctgtgtaatgatattatttagggctgcaggaa

SEQ ID NO: 24738 - DNA, 1017 bp, Oryza sativa
  unsure (1)..(1017): unsure at all n locations
cgcgaagatggccaacgtcattaccgcgttgggcgtgaggtgcgccatctggagatcataaaactccagaatatccatgaagaaattagagaatggcgggaccagccctgccattgcgaaagaaaggaagaagaccggaccgcccgggtagtgtggcgccgggcgtccctcgccccgcgcaaccacctcccgccggtggcagattccggcatgaatcgcgcggcagcccggcctgcctctcgctcacgatgcgggaaggcggcagcacgctaccgtcgagcggagcggagccccgtgccatgacgccggcggaggaggagcttgagagcgagtgagtgcggcaagggtagggcgcangaaacgaagagttagagctcaagtggcgaaggcaaggggaagaatggcgagaggaaggaaacgaatctcttcctcggcgtctttatacccttgccaacgctattcccggctcctcgtttcccgcgcccactacctcgccccctcgtttcttgcgcccgcgcctccactaaccccacttgcccgtttgcggcgcgcgcggcagatgtgcggccgtggcggttgagatgggacagatcgagcgcgcgttaaatacgctcgccgaccgagaaaagcgccatcatcatgtctacaggcgaaatgaaccggctcgtcccgattcgcgcgctgctcgagtaatgtagcggtctcgaagaggccactcattattgtcagtcggttttcccttgccgatgcgcgcgatttgcgaccgctgggtttctgcccgcctgtagggaccggccccacctgtcaccgggcctaaggagtggcgtcacgcccgagcgcttccctcgaagggggcaatcgccctggcgtaacgccgggggctactgtcggtgacatggggccgagggtatcgtgactagaggcttgggtagccgcggtcacccacatggcctgaccccctcgggggggtcgggcccgagggtgacgtggccacccctccctctgtctccccgaggg

SEQ ID NO: 24739 - DNA, 1134 bp, Oryza sativa
atgcacgttggtaatctgacgcgtggtggacaagaatgaccggtctgacactggtcgcgtcagcaacgagcaccacgatcccacgttgcgcccgtctccgccgggagtggaggtaggtgtgggctgtcccatcgaagtgtgattcgacggcaaccatatcaatctccgttcgtaaagagaaggaaagtccagtttggaaagggaagggtgcgtgtggtatccccttgaagtataaaaggaggaccttgcccacagagtagagggttgattctggcgagattgagagcctagaacaagggagagtttggctcacactttgtagctcattcatacacaaatccacaaaaacacaggagtagggtattacgcttggcagcggcccgaacctgtatacatcgccgtgtctcgcgttcccttgctagcagacaatctttccacatacagagagagcttgagatctcaccctaagcccccggccgaaccggcaaaggggggcctgtgcggtctcccggtgaggagccccgcgctccgtcatctggcgcgccaggtagggggctcagcgtgtgtcttctgagctcttgcgctctttcgtgtgcaccaagcctttcctgttcagcctcatggctgagcaagcaaaggtgcccgacctctctcccagtgtgagtggcgacgacggggagccgaacccacgccgtcgagctcgtactccaccgcctcctccacgccaaagtcctgggcgggagaaggcacccaagagggctgaagggtccgcgacttcggcatccacaggagctgggaaagggcggcgagatggggagcgtcgcctcctcgtctatggtgacggcagcacgccccagggcgcgctccaagctgcgggcgcgctcctacgtcacccgcctgtcgcccatgacccggagtctccagcccaacgatggctggacgacgtggccaaattggtcatgacggcgcggcagcgcctagacgctggtgggcgatcctccgccaccaagacctctggtgctgctaccaccggctccgcgtcgtcaagacggagggcacgacgagcggcagccgctgttcgccgttcggctgccactccttcatcgactccttcgacccgggaagatctgcgtg

SEQ ID NO: 24740 - DNA, 5225 bp, Oryza sativa
caggaaggcacagattcctgaagggattatggcacaatagaagagagagttccgtgcgctccagcaaggaaccatgtcagttacagagtacttgcatgagttcaaccgccttgcgcgctacgctcctgaggacgtgcgcaccgatgctgagaagcaggagaagtttttgtttgggctcgacgatgaattgaccaaccagctaatctccggagtctatgaggactttgagaagcttgtggacaaggctatccgccaggaagagcaacgcaacaaaatggaccgaaaaagaaaggcagctcagatcagctttcctcaggggaacaatcagaagcctcgcttcatgacgggacagctaggtgggccttccaccctgatcgtctgtcagcaccgtccctatcacccgagtaacttcgacaacgactacaacggtggcagtcacaacaacagtaagcagcacaaccacaactcgactccacccccactaatggcaccagctcagtcagatccgccagctgtgtcagctcagtcagaacaacccaagaagagggctgtaggaaagccaggaccctgcttcaactgtggcaagcacggccactttgctagcaagtgtccgaagctgaatcgcactggacccaggttcatccaggcccacgccaatcatgtgtctgcagtggaagcacaggcagcaccagaggtcgtgttgggcacgtttccagtgaactcatatccagcaacagttctctttgattcaggtgcctcgcattctttcatttccaaaagatttgctgggacacatggattatcggtagtggaacttaaaataccgatgcaggttcatacccctggaaatgatatgaggacagcacactactgcccctcggtgactatagagatcagaagatcaccgtttctatccaacctcatccttctcgaatctaaagacctggatgtcattcttggaatggattggttgaccagaaacaagggagtgattgactgcgcaagccgcaccatcaccctaaccaacgacaaaggggagaagatcaccttccgttccccagcgtcgcagaagtccgtagcgagtctgaatcaggctgctattgagggtcagacagaaacagtggagaaaagtcccaggaagttggaggatattcctatagtacaagagtatcctgaggtgttcccagaagacctcactacaatgccaccgaagagagaaatcgagttccggatcgatttggcacccgggactactccaatttacaagaggccgtacagaatggcagctaatgagctagcagaggtcaagaagcaggttgacgaacagctgcagaaagggtacatccgaccgagtacttcaccttggggtgctccggttatctttgtggagaagaaagacaagaccaagaggatgtgcgtggattatcgcgcccttaatgaggtcacaatcaagaacaaatatccgttgccaagaattgatgacctgtttgatcagctaaaaggagctaaggtgttttccaagatagacctacgatcaggctatcatcagttgagaattcgggaagaggatattcccaagacagccttcaccactcggtatgggttgtttgagtgcacggttatgtcctttggactcaccaatgcaccggctttcttcatgaacttgatgaacaaagtgtttatggagtttcttgacaagtttgtcgtggtattcattgacgacatacttatttattcaaaatcagaagaggaacatgagcaacatcttcgtctggtacttgagaaattgaaggagcaccagttatatgccaagtttagcaagtgtgacttctggttatcggaggtcaaatttctgggtcacgtcatttctgctcaaggcgtggcagtggatccatcaaatgtggaatcagttacaaagtggaccccaccaaagacagtttctcagatccggagttttcttggacttgcgggctattaccgtcggttcatcgaaaatttctctaagattgccaggcccatgacacagttgctaaagaaagataaaaaattcaaatggtcagctgagtgcaaccaaagttttgaagaactcaagaagaagttagtctccgcaccagttctaattctgccagatcagacgaaagacttccaggtctactgtgatgcatctcgccaaggattgggatgtgtgttgatgcaagaaggcagagtggtcgcatatgcttcgcgacagttgcgcccacacgagaccaattatcccactcatgaccttgagttggcagcagtggttcatgctctgaaaatctggcggcactatcttattggcaaccgctgtgaagtttacactgatcataagagcctgaagtacatcttcacccagcccgacttaaatctccggcaacgaagatggctggagttgattaaagattatgacatggggatacactatcatccaggcaaagcaaatgtggtagcagatgctctgagcagaaagagctattgcaatgcagtatgtaccgaaggcatgtgtgacaaattgcagcaagatcttgagcacctaaatttgggcatcgtagaacacgggtacgtagctgccctagaggcccggcctacgctcgtggatcaagtcagagcagctcaagtaaatgatcctgaaatagctgagctgaaaaagaatatgagggttggaaaagctcgagatttccatgaggatgagaatggcacaatctggttgggagaaagattgtgtgtgcctgacgacaaagaactgaaggatctcatactcacagaagctcatcaaactcagtattcaattcatcccggcagtactaaaatgtaccaggacctcaaagagaaattctggtgggtcagcatgagaagagagatagccgaattcgtcgcactctgcgatgtttgtcagcgagtcaaagcagaacatcagaggcccgcaggactgctacaaccccttcagatcccggaatggaaatgggaagaaatcggaatggatttcataacaggtttgcccagaacatcgtcggggcacgattcaatctgggtggtcgtggatcgactcaccaaagttgctcattttattccagtacacactacctatactgggaaaaggttggcagagctttatctttcaagaatcatgtgtttgcatggggtacctaagaagattgtatctgatcgaggaagtcaattcacttcaaagttttggcagaaactgcaagaagaattggggactcgtttgaatttcagcacggcttatcatccacaaacagatggtcagaccgagcgagtaaatcaaatcttgtaagatatgttgagagcttgtgcacttgactttggtggagcctgggataaaagtctaccgtatgcggaattctcttacaacaacagctatcagtccagtttgcaaatggtaccgtttgaagcattgtacggacgaaagtgccgcacaccacttttctgggatcaaacaggtgagcgccaactgtttgggacagaagtgttaaccgaagcagaggagaaagtcaggaccgtcagggaaagactgcgaatcgcccagtctcggcaaaagagttatgctgataaccgccgaagagagcttactttcgaagcaggggattatgtgtacccttcgtgtcactccgcttcggggagtacaccgcttccaaaccaaaggcaagttggcaccacgctttgtgagaccatacaggatcttggaacgcagaggtgaagtcgcttaccagctagagcttccacctaatatggttggtatccacgatgtgtttcatgtgtctcaactgaagaagtgtttgagggtacctgaggaacaagctagctcagagcacattgacatccaagaagatttgacctacgtggagaagccagttcgtatccttgagaccagtgagagaaggaccagaagcaaggtgatcaggttttgcaaagttcaatggagccaccactcagaggaagaggccacctgggaaagagaagatgaattgaaggccgcccatccgcacctcttcgccagctcttccgaatctcggggccgagattccgtttaagggggtaggtttgtcacgccctgaagttcccctcccttgctctaaattcataaaataaatcgtccgaagaaattgtttaatttaacctagagatgaatccctaattaataaatgcaaataataatcggaattggcatgtggaatttttcttgagttctacatgtcaaaattcactaacaggatttttagtggaattttcagagccttggaaataattttaaccaattaaaatgagcaaagtgcaatattaaatccctggaaaatcttttcttctttttctttttcctccttttttctctcttcttgggccgtcggcccagtccgttcgcctcccgcgcgctcgccctcctctcagctgggccggcccactccctccctcctctctccgggtcaccgacaggtggggcccacctgtcggccccttcttcctcctccagccgacggcaccgccgccgccgaaaccgccaccgacgccgccggtttccccgtttcccgcgcccactccgcccgtaccccacgcccacgtcgccgcccaccttccccgcacctcccgccagctcgcgcgcccgcaaacggcgggggatttgaaatttcccccactctctctctcctcctccatttcccccacgtcgccggccaaatcggccacctttccggcctcgtccgcccctcccgagcccatataaaccatccccgcactcccctccacctttttcctctttccgccgctctctcccgtgccctccatcactcccgcaccgatacacccgccggcgccgcctttttcactactccggtcgccgctcgccgccgctggagccgccgccgagccaatttgccaccgccattagcttcgccgccgccaaagctaccccgggcgccgcatccccatccaatcccgccatcggggcccgcttctctccgcgcgccggtgagtaccaccatagccgccgccgtcggccatggctctcgctcgtcgtgggcaccctctctccctctaacccctcacacttcctctcttagggtgtcccggagctcggccgccgttcgccgtcgcccttcggtcgctgaccgtcgccgtttgccgtcgtttcctcccgcgccggccgaaccccggtgagaactccctctctcttcttcccgcgcgcgccg

SEQ ID NO: 24741 - DNA, 20787 bp, Oryza sativa
cccccccccccccccccccccccgcatgcgcgtcgccgcgatgcaccgtcgcccgcgtcgccggccgccgtcgtcttctcgccggccgccgccgtcggaggccgcttgccgccgccgccctcgccctaaccggccggccggcttgaagccgagccgagccaggccgccttcctcctttccccgtgagccgccgcccggtgggccccgcctgccagtacccctccctctccccttgtgccgctgaccagtggggcccgcatgtcggcgccgccccaccccttgctgacgtcagccctggggcaatattgcgcaataaatcgattaagggtttttcttttatagtaaaaacacagagaatcttctaaaaatcataactaattcatccgagctccgattaagtccattcaagtctcagtaaatcaagaaaaatgcaaagaatccattaaaaatggttttgtttcctgtttcagtagtcttatagcatgttttgcttgtgtgctttgtttgtcgcgtaggtttcggccgttccgtcgatccgcagtttctcgaagacgttgctgaggtctcatcagttcgagagcaaggcaagtcatgcaatacaattgatcatattgtacccaatttacaaatatcccgcatttctattaaatattgcattgttttacaatatcatgtgggatgggtcctattactcagctatatgttgtttcccttatgccattgataacttgggtattaaaatgactagatgttggtttaggagatgcttagccatgcttagttcaactagtgcacaaaaggggaccacattaaagcatagacttgattattggcatagctttggtttagtgccaccgtaatggtgttggttaattaaaatacattacatggtgggctgtgggtgcatggttttgctagacgtgcccatggcgattaaggaccggttcgcgggatgccctggaagaacttatcgtacttaccacaagccagcgtgggcaacggctgggcttgtagtgtagcttttctctagccgacgtacccaggcgagggtgggcgtgatggagttgggtcggccggggtgtccggttgatcggcttccggattcaccgcggcacgaaaggggggctgcccgttgcctgctggggacgggggcgaaccctaaggtgtggtgcgatcggttagagggggttatacgaagggtcctgtcacggcctctttccggtatgtcgtggtggcatgtcggtgcacgggaacgtgtcgtggggctgtgtcttgtgggtacagttgtacacctctgatcagagtaaaactattcgaatagccgtgcccgcggttatgggcggtcgaccagattcaccgtgattagtctcacccctagtttagcttaatgaactgattagttcaggtggtggtttgggcctgttgcaacgtggtgtaacgttggacagtgattggttaatatggattaattactacaactgttttactgctttcaactactgctttgaaatgccggctttatgcaaaagaacctttagcctcccttggatatatcttgcatcatacctcctcttccggtatgacttgctgagtacagtgggtagtactcagtcttgctctcttttcccccacaccagagttgaagtccttctcagttgaagatgtctcgaagaggttggtttcgtcgctgccgtcaaggatgcctgtggaatggagtcgcccgctgcaggagtcaagtcttcaggcttagctcgcttttctctttttccgctgcatttgtaatcttttatatttttgtaagacgtggatctgtatgtcaacaattgtcgtttgtgtaccctggctggtcctggacaggggtttaatgcacattcagcttagaaattctggtccgtgaatttctgggcgtgacagttgacttgttaaaataaagatgttaacagaaaaaaataaaagaaaaatatttttagaagtgggccaacatgagaaggcccataaacccagcccattagttctcccctaaaacctagagagaggggaaccgaatcccacctcccctcatagtgccgccacccctctccctggccggtgcctccttcctcctctcctcctgtgttcgcatctctcccatctacagcaaattgctctccctagatctccaccttcatagcttggatcaagaagcgaagtagaaaaacggaacgatgaggagaggagtagaaggaggggttagaccggagtctcccctattgtctcctcacaagttctctaaagaaaccctaggtgaggcttatccccttgttgtatcagtttttctagcatggctttagtgcattaattcgtggttagggaaggctagagaaggagtttgggtatttgtggttcggtttgttgaagttctgcatgtgggcagatttgcagtgcttcagtgtttcgatgttttggggctctaaatgttgttttcttcaaaagtgtataactaggaagttgtatatatgttcggatatatcttctgaccaaagggcgcgatttttatctcaagtggtttaggagatataatttttttagtatgactgttgtttttgtgtcataatctggatagtagtagattgaactatttttggaggggctaaacagtagaatcagcccggctgcctatagacaaagttgtagaggtttttcttagctttccatattggtaaagtacaacctgattgggcgcgtagaactccagttatggttgttttagtgtggacagtctgaaattctggacagattctaaagcttgctttcaagcgcaaattagaccatttaaatagcacaataaaaatatgctttctacatgaaagttgtaggtattgctctgtagattttcaaaatttatacattttccgtcatagccttttcatatttcgagatataaaggtttgaagcagcagtcttgtgtataatccaagtggtgttccttgttattgagttttgatgggatggggcagtaggttcacctttttattgttttatacgcatgtttgaatgtgtttgctaaggttttgtttgtgattaggtggtggtccatcagctcgtgcatgataccaatccttcgttgaaggcaagtgtatgacgaactaattgtgtgattcatggattgtttactctatctatttatttctgatatatttcaacgtgataagtaactgcttgtattcatattattgttcatgccatttagatttcaagttgatcttatgtgtacgatcttattcttgttttaatattctggattctgattctgcttaaataattcaaattccctgcttgccatggatgtgtttcaatttggttctttgattccggtttcaattattcaagtaccatgtgtagtcatggtactgcaatttggttctttattcaagttcccgtggataagcgctgatcacgcttactcggctttgccggcaaatgttaggatgtattcactattgtccggaatggaaactactatttcaattcatgtctgcagggatgggaactactatctcctttgacttggtgtttggaaatgtgtttcctatcaaagaaagaaaatcttctgttcatgctttattgtcaatgatgtgtatatgtgttttctagttccatattgtacttgctgattatttttatactcttgtgttttatttggttttaggtacgcattgagaccgacatgcatgggcgggaagtagcacccttatattcacatctacttgcacactatcaaactatattgcttaggtccataatgacacttaaattatatcctggtttggtcttataataatcttttagatttctaatagttttttctccatggattataaggatggatcgtattatgggaatgatattgttattagtttaacttataattgcctgttgtggatgtccgtatttgcaggggtgactctgccgaaatttctaataattttggaagttagtggtttgagtgtttttttggtgtggcactctaggtacgtggttacctggggtgttacacttactctctcccttatcattcccataacaataaagtacactaggtcctcttgtaattcatcttatgctttggtgtgtgtgaatgagggagaggagaggggtatttataggtggagagttgccttgggagagtggagatgctccaagcatcctatgagcatattccttctagcttcatctcctcttgacaagtgtcctctctatgacggtttccaccggtagaaaaggacacaaccgtcattgggatgaggagtacaatcgtcataccgaatatgggctggattgggccagctgcgggttccgccgatccaggggttcggccgaaccctgattggctcccctggcccacatctttcttcaggatgctgacatgtgggccccacttcatgatgctccatgttttggtccaaataattgcacattttatatgttgtagcttaaaaccatgtgagttcatgagagcaaaatatgtttccattctttatgctcattctctcccaactttggtggttgatcacctgcatacaaatatacaccaccactcgtggaaattgttagaaataaatcctaccactatgttggaagtttcacatttgtggttttatacaggtattgacgacgttattttggcacttaacagccgtcaacaggcgccgtggagctccaggcggcgtgtctcccctctttgcgttgtctgccgcgttcatcggcatcagcacttgatgccttgagctgaccaactcagtggctgctggcaggggaagagaggtgaggaagatgatgaatcagtctgacatgtcactggtggagaaatgatttgtgctcccgattggtaaccctctgtaaccccggtttttcaactaggactatgaatccgggactaaagaccactatctttagtcccgattcaaatacccgggactaaagatcgatttttagtcctggtcaaccaggactaaagataaaatcgtctttagcccggattaatgttaccaaccgggagtaagggattttttttcttttttgttttttttgcttccactgctgtttttctatttccatctcgagcacaatcgcacaaaaatcacatgcataaatcatttacaaatcacgcacaacacacctaaatcatccacaaaaatcatttacaaatcatacacaacacatgcccatccacaatccacaaatcatccccaaatcaacaaaaaaatctacacatcaattcacaaaataaaaaaaagctccacaggaccacaaccaccacccgaccacctcccctcccggatccggtggaggagagtccgccgccaccctcgcaccgccctagtgccaccgccgccaccccgccggctagctcgccctgccgcctccccctcccagatctggcggaggggaggccgtcgccccgccgcttccccggccgcctcccctcccagatttggcagaggggaggccgccacccctcgccactttcccggccgctcggctcgccccgccgcctcccctccaggaccggcggaggggaggccgcccccgccgccccgccgcttcccttcccctcccactgccggctgttgctaagagggagggagagggagagggagcggcttgatatcgagagagggagaaaaatctctccgcagagagttgagagaggacaatgcggagagatttttctaagtgttgattatataatctggttggtaacagggcggggagaatgacgcagagagggctgatccggatttttcttttgtcccggttggtattaccaacggggactaaaaatagtataagcatgacaccagcctgacaatttgtcccggttggtaaaaaagtaccccgggctttttgaaccaggactaaagatttagtcccagttcttactcaatccaggagtatagtggattttggctgaccgggcaaagatggtttctccagtagtgagtgggacattaattattttcaaatatattttattgacttagatatgattgacacatcagcgccacattggcgaaaccacaatgtttcaaacttcgaacggttttaaaaattgaggggtgtattatacccggttttgaagtaaggggtgtatttcagacaaatgctatatagttgagggtaaaatggaccgaataaaatatgtttgtccgtcgctaatgacgtgcttaatgaatttacgttgcacaattaacaaaaataatccatataaatcgagggtacatttgcaacatttttttttggttttatttgccttttcagtttttttttttggtgttgccatatttctttgacggttgcactgttctccactttttttttcggtcaaatacgatgcagcgctgcacgcttctctcctgctgggcagacgacgcctgcaggctgacggcttttgtcagcggcccaacggcgtcgtcaccatcaccttgcgtccgtccatccggaacagtgcactagagcagttgaacagtgcggggttcctaaccacacagcctagcgctgcgaaccacaactagcgaactagccttatcatttccgttagatgtttggatcaataatgaccgcaaattcatagctgttactgcagctgaccctggaggcctggacgccccatgtcttggaaaaccgtgcacgctttgtatataatcacatgaagcccccgcgtcctgctagacccttctcacagcgccagattttgaagcttgcagcagatcgagatattcgagttgggtcgccagctaggtgcacttcaccacttccccttttctcatccacagatcgagttcgattaatttatctttattagttttattttgtttcaaagctaggaggaggcgctctccagttaaaatggttagtcttttgttttagttagtttctaacggcaaaacacccaacttatttgtcaaataattttcatttccgctggttatcaaaagagagaaaatacgactatacgagcatttgcgaatttaccacttttttttcaattttgcaagcatgccgctcgaacaacagttcaagttgaattttcgcaatgttctagtgacagtcttgcaataacgattcaaaacagtggcaaatttataattaccccaaaataagatgttgaagattcagcaggtttagtgttggccgaacgacagcgattcctcatagtaagaggaacataggtcatttacatataggccttggtagaatctctattgttagatttttttttctaaaaggtatatggaatttttatattgatagtattgatgtctaattcggaatttttgttgggatgatgattatatcattgttcacgtgaaaaatcatgtacgttgctttcttatggtctagcgagaattgttaagcaattaggagtccgactttcaccccaagttagcatgtgagggttttaaaaggatttcttatatgactccttatgtatttacaaaagtgaacgaacataaaaatagacttaaatacgaacggcatatcaaagtatcacagaaaccatctttaatttttgagcactgctcccgtccagcaaacggtaccccaggtaccggtaaccccaggtacaaaacttaatctgaccattgaattagagcggggcacgatcgggattgaacttaatgtagacccccgtttttataacggaatcactcatattaatagtaccatttccctggatcaagtagtctggtactcacggttacattgttgaattatcaagtgcgcatacaaagattgtttagcgcgaattattacatcataggcccgcgggcagtcttagatcataggactaaacggtccacaatacaaacaataacagaaataggtaaggcagcagattataggcagcggctatgccattgccacaggcaacgaccataactaagacctacagagcgccgtcatcctccgcatcctcctgaagataagcatagggatcctcctcgacttcattgccatccactgattaaattttgtaatagcaagagtgagtaccaaccgtactcagcaagccatcataacaacagtgcatatgatagtgtcggtgatatgggaccgggagtatcatggccagaggcttgaggcagacacaatcgcccacgtggcctggcaccttcggggacgtcgggcccgagggtgaggtgtccgccctcctcctgattccccccgagggggggtcgggttgcgcttgccccgaccccgagggccgaggcaccccgaccccttaaggaagtctgcgccacatatatgggataagtgagcacagctgtgctcacctaacagcatttattgcggtctggtcaagcgtgtcacgctgcatgcagcgcaatacagcgcgctcttttatccggtctgtgaccagtcacagaccggtcagatcaacggttaggtggcgactggcggtctgacgcacgcctcgccccgtcccgtcaagacgagtgcctctaggcacacgtctccagccggagctagcgtgttacctcttagagatggcacgttagccctggttagatgaataccaggcttcatcctaaccattacaggcaaggtgttacacgaagaagggcaaacatgcacgttgttaatctgacgcgtggtggacaagaatgaccggtctgacactggtcgcgtcagcaacgagcagccacgatcccacgttgcgcccgtctccgccgggagtggaggtaggtgtgggctgtcccatcgaagtgtgattcggacggcaaccatatcaatctccgttcgtaaagagaaggaaagtccagtttggaaagggaagggtgcgtgtggtatccccttgaagtataaaaggaggaccttgcccacagagtagagggttgattctggcgagattgagagcctagaacaagggagagtttggctcacactttgtagctcattcatacacaaatccacaaaaacacaggagtagggtattacgcttggcagcggcccgaacctgtatacatcgccgtgtctcgcgttcccttgctagcagacaatctttccacatacagagagagcttgagatctcaccctaagcccccggccgaaccggcaaaggggggcctgcgcggtctcccggtgaggagccacgagctccgtcatctggcgcgccaggtagggggctcagcgtgtgttttctgagctctcagactcttccgtgggcgccaagtttcccttgttcagcctaatggccgagcgagcaaaggcgcacgacctctctccgagtgtgagcggcgacgacggggagctgaatccacgccgtcgagctcgtactcccccatctcctccgcgcccaagccctaagcagggggaggcgcttgagaaggtcgacaagtccatggcatcaccagtcgcaggtggtgcaggaggacggcaagatggggagcgccgcctcctcgtctacggcgacggcagcacgcctcagggtgcgcttcaggctgctggcgcgctcctacgacatccgcctgtcgtccatgacccggagtctccagcccaacgatggctggaagatgtggccaacttggtcatgacggcacagcagcgcctgggtgctggtggacggtccgccaccaccaagacctccggtgccgctaccaccggctccgtgtcgtcaaggcggagggcgcggcgagcggcggcggctgcacgtcattcggctgctactccctcgtcgacaccttcgactcgggaggatcagcatggggagccggatgcccgcctcaacatcgagcgccggcgtaatagccggcgtaccccccgtgcaacggagggtgcctcctcgtccagagtgtcacctcgacatggacgtgaggaccagccctccgtgcctccggctggtggtgttggctgtagagcctttgtggcgagtcttcggaatgtccgttggcccccaaggttccggcccaccatcaccgagaagtacgatgggagcgtcaaccccaccgagtttctccaggtctatacgaccgggatcgaggccgctgggggtgacgacagggtcatggcgaacttctttcccatggccctaaaaggacaggcgcggggttggctgatgaacctgccacccgcgtcggtccactcctgggaagatttgtgccaacagttcaccatgaacttccaaggcacatatccgcgcccaggcgaagaagcggacttgcatgcagtacagcgaggcgatgatgagtcgcttcgctcgtacattcagcggttttgccaagtccgcaatactataccttgcatccctgcacacgcggtgatctacgcgttcagggggggcgtgcggcacaaccgcatgctcgaaaagatcgcttccaaagagccccagactaccgcggagctttttcagctcgcggaccgagtggctcgtaaagaggaagcgtggacatggaactcctccagttccggagtggcagcttcggccgcccccggatccgccgctcagacagggcggcgtgacaggaggaggaagaagaggtcggaccgttccggcgatgagggtcatgtcctcgccgtcgagggcgctccgcgggccacccgaaaggggaggcctgcgagcgacaaaaagaaagaggctggtactcccagcaaggagcgccccgccggcaggtggtgctccgtccacaacacctccctccacgatctcgcggactgtcgcgcagtcaaaaatttggctgagcgaacgaggaagtgggaggaggacaggaggcaggaacgccgtgagggcaagtccccggcggttccttccggcaaacggcgaagtgaggccaagcagaaggcccccgctgttgacatcgatgatggtgatgatgacctaggtttccaagaacctggggccaccattgccaccgtcgatggaggagcgtgtgctcacgtctctcgccggagcttcaaggctatgaagcgagagcttctggccatggcccctactcatgaggcgacgcgtcgggcgcggtggtcggaggttgctctcactttcgaccagaccgaccacccaccgtgcattgcccggggagggcaggttgcgatggtggtttcccccaccatctgcaacgtgaagttgggacgtgtcctcatcgatggaggagcggccctcaacatcctttcccccgcggcttttgatgccatcaaggccccggggatggtgctccgaccgtcccagccgattatcggtgtgacgccggggcacacgtggccattaggtcacatcgacctaccggtcaccttcggtggacccgccaacttccgcacggagcgggtgagcttcgatgtggcggacctcagtctgccctacaacgcggtcctagggaggcccgcgttggtgaagttcatggcggcggtccactacgcctacctccagatgaagatgccgggccccggtggccccatctctgtccatggcgatcttaaggtcgcgctcgcttgcatggagcagcgtgccgaccgcctcgctgctgcatccaagcccgagggtggtgacgagaggcctggcccctctgcccccaccgccccgaggcagcggatcgctacatgcgacgaggtcccggtcaaggaggttgccttgggcgacggcccatccaagaccacacggatcggtggtctcctggatggcaaataggaagacgcgctcgtctccttcctgcgggcaaacgctgacgtcttcgcatggagaccagcggacatgcccggggttcccagggaggtgattgagcaccgtctcgccgtgcggccgggcgcgaggccggtccggcagaaagtgcggcggcaggccccggaacgtcaagtcttcatccgcgaggaggtggcgagacttctggaggccggattcatccgtgaggtcatccatccggagtggctggcgaacccggtggtcgttcccaaggcgaacggcaagcttcggatgtgcatcgactacaccgaccttaacaaggcatgtcctaaggatccttaccccctgcctcgcatagatcagatcgtcgactccactgcggggtgcgaccttttgtgttttctagatgcatactctggttaccatcagattcgcatggctagggaggatgaggaaaaaactgcgttcattacccccgtaggaacctattgttatacatcaatgcccttcgggttaaagaatgcaggtcctacttttcagcgtactactcgaatttctttgggtagccaaataggacgtaatgttgaggcgtatgtcgatgacttggttgtaaaaacgcgcaaccaagaaactttactttcagatctagcggaaacttttgagaacctccgctctgcccgcataaagctgaaccccgataagtgtgtgtttggtgtacctgcgggcaagcttctcgggttcttggtctctgcccgaggcattgaggccaaccccgagaagattcgagctatcgagcggatgcgcccccccagcaaacttagggatgtgcaatgcgtcaccggttgcatggccgccctaagtcgtttcatatcaaggctgggagagaaggcgctacccttgtttaagctcctcaagcgctcggggccgtttacttggacggaggaagcagaacatgccctcactcggttaaaggcatatctcagctctcccccggttctagtcgctccagagccaaatgagtccctgctactttacttagcagcgaccccccaagtagttagtgcagcgttggttgtggagcgcgatgaggacaatcctcatttcgtgcacccccattctgtgctaacttggcccgggagcaagcagggaggagaggcccccgagtcaaacggtggcctaaggcccctgacgaccggagacggccctctgcccgctcgtcagacggtgctgggtgcccccgaccctcaggaaggccccgaggccactgcgggaaggccgcacttaacgccctctgaccccgaggctaaccctgtgctgactcgacccgggaaagagcagggagaagaggcccccgagccgaacggaggccagaggcccctgacgaccggagttggccctttgcccgcttgtccgacgatgccaggagcccccgacccccaggacggccccgaggccactgagggaaggccgcccctttcatcctccgaccccaaggtcatcggtacagaagacaagtgcgccccgaaaggccacttgaacgaagaacgccccggggatacggcccctagcagagaggatcggccccaccgaagggtgcagcggcctgtctactttgttagtgaggccctccgggacgccaggacccgatacccacaggcccagaagatgctttacgctattctgatggcctcgaggaaactgcgccattatttccaggcgcatcgggtcactgtggttacgtcttaccccctcggtcaaatcttgcataatcgagagggtacaggacgagtggtaaaatgggcaatagagctttctgagttcgatctgcactttgaaccacgccacgctatcaagagccaggccctcgccgattttgtggcagagtggaccccggctccagagaccgtctcaatgcccgaggccagcacgaacccctcacagctgcctcacgccgcccactgggtgatgcaattcgacggttctctgtctcttcagggcgccggtgcaggggtcacgttgacctctccaaacggagacgtcctcagatacttggtccgtctcgactttcgagcgactaacaatatggcagagtacgagggactccttgccggactcagagtggcagctggactggggatccgccgcctcttggtgttaggcgactcccagctagtcgttaaccaggtctgtaaggagtaccggtgctctgacccgcagatggatgcctacgtgcgccaagtacggcgtatggagcgccattttgacgggatagagcttcggcatgtgcccagacgggataatgtgattgccgacgaactctcacggctcgcgtcctcgcgagcccagaccccaccgggcgcctttgaagaaaggcttacccagccgtcggcgcgacccgatcccttaggggagacggatgtgcctgaccggcccccgaggcccgtcggagtccaggcctcgggacccgaagggagcgcttcaagctcccttagattgattgcttggatctctgagatccaaacatacctcacagataagactctacctgaggaccgcgaagggagtgaacgcgtacaacgcatttccaaacgctacgtgctggtagaagggaccctctatcggcgcgcggctaacggaatcctcctgaagtgcattcctcaggaacaaggcgttgagcttcttgcagacatccatgagggcgagtgcggagcccattccgcctcacgtaccctggttggcaaggcctttcgtcaaggattttattggccgacagctctcaatgacgcagtcgatctggtccggcgatgcagagcgtgtcagttccacgccaagcaaatccatcagccggcccaggccctgcagatcataccactgtcatggccatttgctgtctgggggcttgatatcctgggaccgttcaaacgggccccgggcgggtttgagtatctgtatgttgcgatcgacaagttcactaagaggcccgaggcttatccggttgtcaagatcgataagcactctgctcttaaattcattaagggcatcacggcccgttttggagtgcctaaccgtattattacggataatggcacccaattcactagtgaactcttcggcgactactgcgaagacatgggcatcaagctctgcttcgcctcacctgcccaccccagaagcaatggccaagtggagcgcgccaatgcagaaatcctcaaaggccttaaaaccaagaccttcaatattctcaagaagcacggcgattcatggatcgaggagttgccagcggtgctctgggcgaaccgaaccacaccaagccgagcgaccggggaaacgcctttcttcctcgtctacggcgcagaagcggttctcccatctgagctcaccctgaggtctcctcgggccaccatgtactgcgaggctgatcaagatcagcttcgtagagatgacctcgactacttggaagagcgaaggcggcgcgcggccctccgagccgcgcgctaccagcagagcctgcggcgctaccatcagcgccacgtccgggcccgatcactctgcgtcgacgacctcgtcctacgccgcgtccaaacgcgtgctggattgagcaagctctcaccaatgtgggagggtccgtatcgagtgatcggtgtcccccggccgggctcggtacggctggccacgggcgacggcacggagctgccaaacccgtggaacatcgaacaccttcgtcgcttctacccctaaaggggggggggtcgggtgtcagattttggctcgggccaaccccacacccccctcgggtgtgcaggattggccgggggctaccacacatgcacatatattccctttttccttatttcagcatttcaatagaagcagtttcaattttctaaaggttgtgtctgtgccgtttttccttctgaagaatcttaacttgaaataaggtcactcgtgctcaaccttgccctagggggctcagttcggtcagctaaaatcgccaaacggggcccagaaccgagccgtgccccggggcgtggtgaactccgggggggaaccggcaaaaacccacaatcgggtcacccatacccctcggtcaccacgttcccggcctggccagtctcgacatgtggatctccccgggcactggccccgacccgagccattcgaggactgggacttgggcacgagcccttatttcaagctaaggcgcaaaaggaccatggcacagatcatcctcatcgcatatgtatagcaaaataaaactaacacaaaaatttttcatcatttcatttctgattgcagattaagttaatttgtacaaaaaagaggtatgaaggccttagaagaaagaaaaagaaaaaaagattggcgggggcctgggggctcattccaatgcgcccgggtcgccggcctcgtcgccgccgtcatcctcatcgctggcgtcgctctcctcgtcggagctgggggcgaacgcgagcagaggggccgacccctcgaagccgtcgacgatatggtcggcagcatcccggacgcgcgcgcgcgcgtcgtcctcggttccgggagggaactcctccagcgccatccagggagagaagtcggggtcccgggcctggtagctcgccagcacgagttcgaccgccccctgggcgaggtccctcgaggatgacttgatggtcttctcgagctcctcggggagtcgttcgaggacccaggccatcctgttgaggtgcggagcgaggccttccaggttgctagggcgcgtcctcgtctggcctttccagaggcccgcttgccgaccggcgcgatccatgcgggagaccgagtcccaaagcatgtcgggccccatctcgcccgccaagcggagggcctcggcctccccgatggaagaatccagcgcgcgctgcatgtcagcgacggtgtgttcggcagccgcgaggcgagcggctaagtcgctttcgcccgcagccgccccaccgatgcgcgccctcgcggccagctctttctcccgtgcctcgaggttggcagcccgctgctccagcgcggctctctcggcacggacgcattcaaggttgcggcgcgcctgctcctcttgcgccgcctcgtgatgaaccctgagttcctctcgacactcaaggttgttgttggcccgatctttcggtgagttgatgaaaactacgatttggaagaaacgttgacgacccgactacaaccgtacaagacgttgcgttgcgccttagcgatcgatacacctctccgtgggttgttgatcttgccggtgcaaatcaaccttattcctgcaagcaaatcgaagaaacaagcaagaacaagataaaagcaatctgaattgcaaataggagttaaatacgaatgataagttggggttccgaagaacaagcagacggacggtctagccgacacgcgcgctgcaagcaagtagcaatggctaaactttaatctaacaaaacccaagaaaccctgaaggggtacctaactatttatagaggtgggaggacgaccaagagggtccaagggtcgtgctccaccagattggggcgcaccccacatgggcctcacatgggccagggtcccaaacaaagttacaagcccattggcccaatacaggagacgcagcaccttggttttgtgattgcggccaaacgagatagatttccgagatgaggctggatccgttggaaggaggacttcgagagctttccatcaagtactcacgggcccaaaacggagcacgtatgtagatttggcggccgtttgaagtcagcaatgtaacacgtggccgaatcagattgcagcacatggaggacttgatcttgatgtcttcttgttgtttcatgatgtgagcaatggtcgtatccatagtagccatggtcacatcatcctccccttcttcacagaaaaccgtcctcggtttttccatatggtgctcttcgcgcagtccactgaaaacaacctgtttcttgcaatcaaaacaagacaaactcgagacaatatgattagcagtaacatgtctctctagcttgcatattttatccggaactacaagatgttctaaatctgaacaaatgtaaactctatgcaccaaaaatattcctctatcattatattcgccaaagatatgaaaaatagcattagttggacatggcaaatcagatttagcaaataatttctccttcaaattatcgagctcacaaaaatcatcaaactgaacatagcccaaagtatttaaagaagatagcaattcgcgttcctctacttcattagcaatgtgaacaacatgcttagaatcagcacacaaagaaatagtagaactaacatgttcattcactagttgtggcatggatataagtgaaacattatcacacaactcttctttatcacaagaaacagcaagtaaatcaacttgtgacaaaggcaactcagtaattgattccactaatggttgctctactatagcatgaaaagtggacaagtgtagctcaccttgagaatactcaccttcatttctctcagcaccatttaatttaccttgcgaactttcttcagataatgtagctgcatcagccttctcctcattcgcgagtgatggaagtgacatctcaaacatatcgttcttctcattttggagacttttctgaacttcctgcaaaacatcagtgataggaggcacaagcatatcttgttgctccgttggattctccaaaattttgcgctcaacaatgcaagcaagcatgaacaattggcctatatgattatatgtcacattaacaagcccagcctgaatattgaaattaagccctttgaaaaatctagtcattgtgttctcattagattcttgtaaaccactataagtgatacaaattttaaaatcatgaaagtactccctaacagttttgtcaccttgttttagatgttcccatttctcaaggagagcacgtctatagtatgaaaacacaaatctttttctcatcagtattttgcattcatcccaagtttcaagcttattccccacagtatgccaccaaaaagatgcagaaccggtacacttattactagcagccttaatcatttgagcattagaaaaatcatactcatcaaattgtttttctactgctagctcccaattaatgtatgcagcggaatcatactttccatcatagactggtaacttacatgcaacttgtgcaaaattatagtcatgtacctcatatgcatcacgtgaagaagttgtcatatctcgtcgaaggtgtagatgttgacgttgagcatgaccatcttgtttccccttgcgcaatcctgccatggttagcagcaaacaagaaacatacacaagaatatacacgctcctatcaactattaggtactggcagctcaaatgtcacacacactcaagcttttaaccaagctcttacaagatcttaccaatgcaagtggaatggtgatgtacaccgactcaaccaagcagcccaatagaggttggatatatcgatgcctcggcaaacacttgctgtacggctgcaatcaaatctgtggagctctgggtaggcttaaatatgtagcaaaggaatagcaaatgctcaaatcagagaacgcaaagttgaataattgttcaaagtcaagtaccgtgctggtcctaggctagaacgtactagagacgcgagcctagacacaaacgataccacaagatagcactaggaacaactcatgcacaactctgatatatgaagttcagctcaaacataacagtattttctcttttctttctttcttctttcttcttttctttttttttttctttccttttcttttctgttttttttttggtgcggctttttttttctttttttttgcacctttctgcctttttttcacttttttcttgattttttttaacaaaaactgactcaaggaccttaatgtaagattacagggactcaaacataaatataaaatttatagggactcaaatgtaaaagtctaaacccaaaattaaaattatacaaaaaatggaatgctgaatttatgccggttccgtttttccaaacagatctcgaaaccgacaccaaacaaaaattcgccaaggtgtttgacacaactcggaacggtggaagagagggagggagtcggactcggccaaaggggcgagtgggactcggccaggaggtggagtggatggcagccgaatttggtgtatgggataaaaaggaaactgatttttaaccaatccaatctactatatctttccaaaacaaacttgactacttccaaaatcagatatggtaattcaccttcctcctctcgtgcacgacacaggcacggccaaaacaaacacacacaaggatcggcaaactctagatgcaactcaagaactccaaaactaaccgatagaaacgtctgaaaactacaaaaatagaaccgtggcagcgagccgattccgttttcgtaggtcccgacaacaacagagacacggtggcagcgacgactgtggtacaaaacgtgaccagaactcgaaactctaaacgaactagacgctaagaccagcaacacgacgtgacgatgcaacacaaaattcaacaaagcaaaaactgaaaagaacaatgcaatggcacaatatggctaggtaaatgatacgaatttttttgtatggctattttctggttataggaagataaaaactcaccgagcaacgaaagctctgataccacctgatgaaccctgagttcctctcgacactcaaggttgttgttggcccgatctttcggtgagttgatgaaaactacgatttggaagaaacgttgacgacccgactacaaccgtacaagacgttgcgttgcgccttagcgatcgatacacctctccgtgggttgttgatcttgccggtgcaaatcaaccttattcctgcaagcaaatcgaagaaacaagcaagaacaagataaaagcaatctgaattgcaaataggagttaaatacgaatgataagttggggttccgaagaacaagcagacggacggtctagccgacacgcgcgctgcaagcaagtagcaatggctaaactttaatctaacaaaacccaagaaaccctgaaggggtacctaactatgtatagaggtgggaggacgaccaaga

SEQ ID NO: 24742 - DNA, 26427 bp, Oryza sativa
tcgccagccgttgcgtcgtggcctcggcctcctcgagagctcgctcccgctcagcgagtgcatcctcgcgaaagcggagcgcggactcctcctcggcgcaggcggcctcgtgcgccgccagcgtcgtctcccggagagcagtggcggcctcgcggtccgtgaagcccttctccacggtgccggcgtgttcttccagcgccatggcacgggcctcaagggcctcctcgcgccgccgggacgccgcttcggcttccgttgcccgccgctctcgggcagcagcggagtcaagaaccccttgggcggcgtcgagcttgttcttcagctccgcctcccagctcccgtgttgaaggcggagggagtcctgcgcctcaatcatcgcggtggtggcgacaagggcggcctctcgctcctcctccacctctcgggcgatctccgccagcgccgccttgcgggcttcaagctccgagatgtggcggcggtgggccttacggcccacctccaccatggcgtccaccgagcgccgcccctcctcaacacgcgcccatgcggcctcgagctccgctcgttctgcacgcagggcctccacttgggtgttgaacccatccagcactgcggtgtttgcggcggccagggcctgcagaaggggctcggcgctcagcggggcgacagaagatgaggagaagagccgccttggagaaaaggcgacgcggcttggccccccggaagatgcgctgggctcggggatgtcccccgggcccgtttgatcatgggcgtcgcccggtgaggtaggcccaggcgatgcgcccgcggcctcgtcgcgagccgcctcggaggatgtcgcctgagggccgcccgagggagtaggcccaagtgacgcgccagcagcagctgtcgcctcagcctggcgagcccgggtggcctcctcccgggcagcttcttcggcttggcgagcccgggcggcctcctcccgagcagcttcctccgcttggcgaacccgggcggcctcccgggcggcctcttcagcttcccgaaggcgggctgcggcttcacgccggtcagactctcgcctccgctcctctgcggctgctggatcttcggcctcggactggccggacttggggtggcgggaggaatgcgacgggacatcgctgaagcagaagaaaaagccagaagacgaacaaagtgagcaagaaaaaacttctttttggagaaagatggttgcaatgagagtgagacgaacctgcgagggggtcggttgaatgaccaccttggaggggaaatcaggtttccccggcatggttccgtctcccccgtcttacggagccgcttcttcttgcgcaccccctcgggctgcgatgtcggcgcggccccctccgggcgccgactgctggcacgcaccgccccgccccctcggggaggagatggcggaggtgttcctcccagcttcctcttcccctgggcgacggcagggcggctgctccccgagcccccgacgcggggcccagaagcacgaccccctcctggggcaggttgttccccccggcggcgctcgcccgcgccgtcgtggcccttaggggctctctcctctgaggccccgacccccatcataatggttagaatggagacgcggtcgggatcgctgcagagggggaggatctcttgaggaaggcgagacgcctccgcggagctaagattcagcaccctttggactacgatcttgaagtcctcgggagcccaatcccatctggctccctggtgggtccgcatgtagtcttcaggcccagtgtactcccaggcgctccgggcgcgccgttggagcggcgcaatccggcgacggagataatcgccgtacaccatggccccggtgagcccctgggatcgcaggcccgccaggcggtcgaggacggcgtcgtagtcctcccccagatctaccggcgcccgccagctggagacctgcgccgggggctggcttggaagtcggaggcgcgcttcgtcggcaaggggggtgtagaaccggtcgctcttccagtcgtcccacttcttgcggaggacgcaggggatgtagcggttcaacactggcccccgcggctggaagtagcagccgccaaccgctgacggcggtgacaccgactgcacggtgaagaaccaccggaacagctgaagagaggggcgcaccccaatgaacatctcgcacaggtgtgcgaagatggccaatgtcatcaccgcattgggggtgaggtgcgccatctggagatcgtagaactccaggacatccatgaagaaatgagaaaatggcgggaccagcccagccatcgcgaaggggaggaagaagatggaccgccccgggtagtctggtgccgggcgcccctcgcccagcatcactatctcccgaccggtggcggactccggcatgaagcggcgcggcagtccggcgtgcctctcgttcacgatgcgggaaggcggtagtacactgccatcgagcagagcagagccccgtgccatggcggtggaggaagagatgattgggaacgagcgcgtgtggcgaaagtagggcgtagcagagaaagagttagagctcaggcggcaaaggcaagaggaacaatggcgaaaggaagggagcaaatccttttctcgatgcttttatacccttgccatcgctgggcctggctcctcgtttctcgcgcccactacctcgctccctcgtatctcgctatcccgctccctcgtttcctgtgcccacgcttccactaatcccattcgcccgcttacggcgcatgaagtggatatgcggttgtggcaatcgaaacggattgtatcgtgcgcgcgttaattacgctcgccaaccgaagcggcgttaccgtatctccgagcgagacaaatctgctcacccagattcgcgcgctgctcaagtgatgtggcagtcttgaatagaccgcccattatggacaaccaaagttaccaataccaatgtgcatggattgagaccgttgggtattttgcccaactacggagaccggtcccacctgtcaccaggctttaggggtggcgtcacacctgaccgcttcccttgggaagggaaattgctctggcataacgccgggggctactgtcggtgatatgggaccgggagtatcatggccagaggcttgaggcagacacaatcgcccacgtggcctggcaccttcggggacgtcgggcccgagggtgaggtgtccgccctcctcctgattccccccgagggggggtcgggttgcgcttgccccgaccccgagggccgaggcaccccgaccccttaaggaagtctgcgccacatatatgggataagtgagcacagctgtgctcacctaacagcatttattgcggtctggtcaagcgtgtcacgctgcatgcagcgcaatacagcgcgctcttttatccggtctgtgaccagtcacagaccggtcagatcaacggttaggtggcgactggcggtttgacgcacgcctcgccccgtcccgtcaagacgagtgcctctaggcacacgtctccagccggagctagcgtgttacctcttagagatggcacgttagccctggttagatgaataccaggcttcatcctaaccattacaggcaaggtgttacacgaagaagggcaaacatgcacgttgttaatctgacgcgtggtggacaagaatgaccggtctgacactggtcgcgtcagcaacgagcagccacgatcccacgttgcgcccgtctccgccgggagtggaggtaggtgtgggctgtcccatcgaagtgtgattcggacggcaaccatatcaatctccgttcgtaaagagaaggaaagtccagtttggaaagggaagggtgcgtgtggtatccccttgaagtataaaaggaggaccttgcccacagagtagagggttgattctggcgagattgagagcctagaacaagggagagtttggctcacactttgtagctcattcatacacaaatccacaaaaacacaggagtagggtattacgcttggcagcggcccgaacctgtatacatcgccgtgtctcgcgttcccttgctagcagacaatctttccacatacagagagagcttgagatctcaccctaagcccccggccgaaccggcaaaggggggcctgcgcggtctcccggtgaggagccacgagctccgtcagatagtgatattcaaagtatggccgttggtttatttgcataaagctagtttcacaattcttttcacaagcttattatctagcatagactagtccagttttaattccagtatttattacacagcaacggttcttttcaccatccattgtcttcccaaagatggcttcccgttactggctgtaatggttttctggggtttactccttctcgtctctcgagaagatgatccaccagtataaaatcatcatgcatatcccatctcattcaatttaagaatttagagtctagccaagtgtaatacatgtcctgatgctcaatatccgcgagcacggctattcgaatagattggttttactcacactgcagtggatgtacactttacccgtactccgcgacttgcccaacacatgagcctacgtcccaacgaatgagacttgccaaggcaaaacctttcaataacctcacgttggcagtacccgctccatgaacttgcatcctcatgcactccatgaacttgcatcctcatgcactctaggtgtcatgagtttctagcagtgagaggagttctggcgctcccgggaagggaagactcacacatgcattaagttttagttaaattaaatttacacatggcagtcctaccgatggcggcaccactataggcactcgcccctcgcggccccaccaatggctgtcccatcgtaggccctgactcccacacaccaagaataaccactatgcagggatactgccttcgctcggctacgtactccgctaggtctatacccatacgagaagtacggttgtacgagggtcgtttcatgcttaactttacggctcggtccttaactgaccagggacggcactagccttttctggacaccacccaagtaccccagccgccccggtcgaaaacagtgtttagttttgtttctcttttcacaattcatgttatccttgtcatggcaatgtggtgcccatgcctccacatgccgcatctcaactaccttccttaaggtagttgcccaagcatatagcacttgataaatatgagaatgcatgattctaattagcatgactaagcatttgttcaatatcgactaagtacacacgttagcagggtttacaatggtcatacagataatcaatatcaaggcatggcatatttaacaagtagggcattcatattcacatatgtatagcatgtaattttattaaatcaacataattttcgcaataggttcaacatgctcaaagattagtgatgacttgccttgatcgcagtcttgctatccctgctcctcaatcgactcaacaattccctcggaatctaaatttacgtgcgaaagatcggatttgaactcaattagaattcaaataaattcaccaaaattcaaacagtacaaagcatattgagaaaatgttatcaccagatagatcttgattttagatgaatttaggttcaagtttcattcaattccgagttaagatgagtgagttatgcttgtttaaagattcaattttgaattaattcaaacaattgtgaaatggcactgtgcagccgagaggggcattattacagtggctgacatgtgggccatccccctattttatttctggtttttatttttttaaaggaaatcctattgtgtcattgacaggtgggtccggccccctgttgaatctcctgtgggacccgcatgtcattgagacattcacttaaaacctaatttaattagatttctaagcatccgggcctacatgtcataggttcataataatatcattagttttagggattactgtacactaatgaagtggggtccacatgtcataatctctccctctctcgtgccttctctctctcccgtcgtcttcttcctcgtgctcgcgacgaagcagaggagcggcgcgcgacggtacgacggcccgagccggaacggctcggcgcacggtggggctagcggcggcgcatcaccggatgcccgccggcggcggcggcgaagcgcggcgaccgtccggcgcacggcgcgacggcgcgcgacggcgccgagatcccaaaatcggcggcggcacgatgaggaccaatgtgagcgcaaccaacaacgattcaaccatctagggtccacatggagtatatagaagcaaaaatctagcctaggttgtattggaacgaagtccccccacggtgagctcggccatggcgcggcggcggccggagtcggcacggttacggcggcgcacaccccaaatcgagggggccgttggtttctaggtgaccaggcgggactacaggcgcgagggcttaccacgaagtggcggaacggcgaagttcgacggcgagtggcgcggtgcggtcgaaacaggggcagacggcggtcggcgacggtcgcaagtgttcgatgctcgtactccctcgcgtagcggctcccggctccctccaacagcagcaacggcaacgggcacacctcctcaacacaccccgccacccacaccggccgagaggccctgcggcggcggcgcaacccccgcccaccaggtgttcgacacccggcggcggcgcgattttgttttctctgggatggagcaagaactccgggaaaggggagacgaatgagggttcgattttggataaggtcgagctaaaggcgagcttataacagcgagagggagggcgattcctattggataagatcactcgatgactcagccatgtttcgatctctcctaggttcgattcaatgccttgggccggcatgattgcctagacgatagggtcccaggagagggatcattagctgtgggaggaaccccccctattatccagcggtctcggtggggtgcgacaggatggcgacgcgacggtgacaagagcgacggcgacggacagagataacgacttggatagggggcgccgggctatgccctagggtgacgcggggttgtcgtggcggccgttatcactccatcccgagggcgacgtgtgaggggacgggatgacgcgggcacccgtggcggcgcagcctttggcgcgggcttttggcggcttggtcggcggcgggcccacgcggcgtggcatgacgcggtgcggcgcacgggcacgactagtgcggcgcacgagtcggaaagcaggcgcgcggcacggcagcggttggagagggcggcgtcgggtgttcggtcgggttaggcacagatcgaacacctggcgcgcaatgaacagtagcgccaggaaaagaaaaaggaagagaagagaaaggataaggaaaaaggaagggctaatctgcaaaatggcttggaattgagttgtaactctatctattttggattcaagaattcaaacatttgatttgaatatttatttggttattcattagtccccaaatgaatttgcttcccatcatcccaaatacaaatattttaatttgcatttttatttatttattcatatctctaccaaatgatattactctatattggattattccaaaattaacttaaataattggggggttttgatagtcctaaaattaattaaaatattcaatgggtccattattaatacaatagcacattggttgaacttatttgcataacaaggtattcatgtaaattgtaattattatttagatgcgcgtctttactttgatttttccattgagatgatttatagtttggcaagcaatatcaaccataacatccatcatgatgcaaagttttaaaaagttaaaaattgtagtgatttttattatcgaggatttttaggatgttacacttaatctcgcgaggactcagtctcctgccacgcgttgcatccgcatctgaagtctacgccgcgtcaccgccgcaatcctttcgccctactccgacgcggtgtccaagtgccgtcctcttccggcctccgatgcggtgtggcggctcctcctttggccgcagcttttcccctcccctcggtcccctcctcccctacgcctctcggctgcccctgtgcggtgcggcagctcgtcctttgtccatggccacaacttgtcccctcccctccgtcccctatgcatctcggctgctggcacctacgcagtctccggcacaggatcacgataccctgagtttctttatggaagatgtatgagagagatgaagtatttctttcctgctggacattgctttgctgctatattcattggaagaatctgctatgttgatgggagaggctgagtttgatttatgttgtgtgccaagttctggacctagttccttgtcttttgatatatgtaatgaacctacttgattttgctgaaagtatgaatgtaataatagtaaaaaagaagtagatgttctgaaagtttgtagtttcttgctctgatgtgtaaactgttctttcgttgtagaccttaaacttactgtttcatcttaaacaaaattaacatcagcggtcattgaacaaattgtcaactatcttgaataaaatggacactattacaactagtgatcccacaaacaaacttctgaaattcttcgatctcttttctttgcttgcccaatttcttcttgcttgtgcgatccatggccaaaagcctttcagccatctcaatatctagcttcgttttttcttctttctgtcccctccttctagggttgctagtgctcgcgatccaatgcataccacagcgatggcgattccacgaacaaaggcttgcgatggcgtcggcggacgagctgccgaggccatattcgccacgctgagctcgtcgccatggtcacctcttcttgttggcgcattgaggttgtcgtcatccagggatagaacgactcccagaagtcggcggcggccagacctggaccggctataggaagggcaagttgggaatgggcaggttggcgacggctggttgcagtgagggaggaagcgaagtccggcgagattggctgcgccgctgctagggatgacggaaggggatcgggaagagacagattaccgggttggggacttgtaccgtctctacaaaaattgactaaccacgcgaaaatccaattctgcccttccaccagttccatacacgtgaacaaagggggaggtaccccgcaccggattcccgtaactcgcggtaccgacaattgtgggtcgtttgatctggctgaatggacggttacgattgcagtaccacgcggtaccaaaaattctgctggacagtaaaaattctcttaatttttataattgtagataagtagagatagagatagagattgaccggtctaacaaaaggtgtagacgtggtacacttgagcgcgtgaaactccatgatgataaggttcgattgttaaaatcctaaggcaaccaagattactatttaatatctattaaaagaaaattacatataaaaattttttgaaaattttatatagatgtagctgtgcaatttctcaattggttagtttctttacagctaatccaggccacccatgttcaagtcctaaacttattagcatttacggctaattattttttcagtcgtagtcctaaacttattagcatttacgggtaattattttttcagtcgtagtggtaggtgatctaccgtcgatagcaagatatccgtggtgacgtcatcaattttaaaatatgttggtccggtatttcggaggtgctcataggggtagggtatatacctgtgtatgtttatagggatgagtatatgtgcctgcatttgtattttgtttcttaaaaacatcatcaatttcgagatatgctggcccgatattttgtagatgctcatgtattcatgcgggtagggtgtatctgtgtatgttcgtatggacgagtatacatatctacgtttttactataccaatcaggttttgccttcaaacctataccaataccaatcagcattggattcgtcagcagatgtgttgatttgcataggtgaccgtctacacggaggagttagcactagtccaataacgaatttcccgtgcggtcgaaagtgattttcgcgtgcggatcttccacccgtctgtaacgaagtgcctgcaaaaattgctatttttgcgtgcgggtggcgcacccgcacacggtggttatgttgcccgcacgtaaaaatgaaaaaccgaaaaaaaatccaaaaaaaaaccctaaccctaaagttgctgccgccaccctcctcgtggtcgtcctcgtcgttgtcgtcatcgctgttgccggatccgccgcctccccaccgtccgagcccgcccacccgccgttaccgccgtgccggccaccactgccgccgcatcctggcaggggacggctaccgccgccagatccgggttgggggcaggtgcctccgccggatccgggcaggggccggtcgctcgccaccgtgcgcacgccatcgagcccgccgctcccggttgcctaccgccaagcccgccgctgccggagccgaaggaggcaaagaggtcggagccagaggagaaggagaaagtggcgctggcgccggtggtgtggcctgcaggatgcgaggtccacgcagccgcgtggtgctagcttagcggaagtgaggagaatattgagcggaggagaggaaagtgtggagaagatggagggggggggagaggagaaaggaaatttgattttttttttgaacaggttcatagggaatgagtatttttccgtgcgggtctattaggaggcccacctgcgaaaattgatttttgcatgtggttttcacacagaaccgcacacaaaaatggaggatgattttcgcagacgcgactagttatctgcaatctaaatgggtccctgtacaagaacattgttttttaagtagtgtagcgaacgtccttctatcaagaagaagtgggaagactataagttacccatctatgctctaaaaatactataagtactccttaatttattacccatcagctaaagatttacgatgttaatagagtcaccaaccatctcgatctagagaactctaaatcaatatggggtttgggataggacaaaggctgtgttcagatgacccttttcccaacccctctccctcattttccacgcgcacgcttttcaaactgctaaccggtgttttttttttacaaaaagtttctatacgaaagttgcttaaaaaatcaaattaatccatttttgtaaaaaaagcaaatacttaattaatcatgcgctaatggattgctctattttccatgatcactgttccggatgggaacttgttctagcgaacacacccaaaatccactaacggagccaatttagagatcagaccaacctctaggtcaatttggattgatttgaagttaaccatctgtctcgtgggcgaatcagaagctttttgagacaaacctatagagcgtatatcacttgtcgacgagctatatctatctatggtatttgtagagtatgaggattgttagtgctagggtatgcacaagattgaggaataagagacagaatatatcgatttttatataggttcggaccccttaactgacaggtaatagctcttctcctgttgaccggagtcattgttgcctttatatattagtctcacacgagtacaacatttgagttgacctaatctagtccctatcgatctagcagcatggagctctcacatgtgatcgacgacttgtgcagtcttattcctcaaacatgaactcgacgaaattgaatatatctctagatccctcatgtccacattgggtttgtctaaatttgtcctcgtgtctctttccttctagggagtcttgtatttatatcattgagtatcctcttatccaagtagaactaggtaactgatacaaacacacccgcaaggggaggctcgatcttcacggtagtaggttttgaaccaaagagcaccggtgtaaaccgtgcacaagaggataactagctttatacctgcaagggttggatgcgaccaagtggtgagggtgagaacgatccgaatcctcttggattccgacccatcaaaccaagcaatcacagaaccataatccaggactaatccacacaagagggggtaagacacttatgcaatcttcaacaatcgtctctcatctatgctttttataaagttaaagcccactaagtataaagctcaacatgcaaacatgctaccttatcattcactagcaacaactaattatcaaatagttcatacaaacatgcaatatcatccatactttatttaattctacaaatcagaatgcaaatagatccaatcatcacctctctcatcatttccataatatttcaacaaatatatccatcattttttataatacttaacatacatacatccatatattctgtatcaaagcgaagatattatttagtttgtttcatgtttactactaataaatcctaacttttcatttctttttcccctgtcttccgcttcttgcgatacaaattttggccaacaacataaatttcatctataatcctctacaaagtctattaaatttatttctcttcaaatatggcttgaaaaaaaatcagttttatttgttgttaataattaacatcatacttacttcttgctcgattgttgaaagatatatatgttagaaattacttagtaattcttgcagtaaagcgcagggaatcacctagtatatctataaagttcatccccactaagtgtagttaatgttatttctctcttctctcttgaagccgcatcatctcaattatttttagccattgtgtcggtgacatgggaccgggagtatcatgactagaggcttgaggcagacacaatcgcccacgtggcctggcaccctcgggggacgtcgggcccgagggtgatgtgtgcgcccacctcttggtctccccgaggggggggggtcggaccactcctgcctcgcccccgagggccgaggcgccccgacccctcgcgggttctactccgcgtgcatgggttaggtgagcacagcagggctcacctaaccgcatttattgcggctcggctaaacgtgtcacgccgcacgaaatacagtgcactccactcgtttatccggtctgtgaccagtcacagaccggtcaaatcgcgggttaggtggcgacaggcggtctgacgcacgcttcgccccatcccgtcaagacgagagcttctaggcactcgtccccagctggagttagcgtgttacatcccagagatggcacgttagccccggtcgatatatgccaggcttcatcctaaccattacaggcaagatgttgtgtgaagaagggcaaacatgcacgttgctaagctgacgcgtggtggacaagaatgaccgatttgtgatcggtctgacactgctcatgtcgtcagcacacagccacgttcccacgacgcgcctgcctccggcagaagtggaggtaggtgtgtgccgtcccgtcagaaggatgttcggaggacaaccgtgcaaatctccgtccatttatgaagagaagaaaagtccagtttagaaagagaggggtgcatgtggtatccccttgaagtataaaaggaggaccttgcccatagggaagggggatgactttttccagattcagtagctagaagaaaagggagaggttggctcacactttgtagctccttgatacacagatccaccaaaacataggagtagggtgttacgcttctcagcggcccgaacctgtatacatcgcttgtgcttcatgctctttcgataggtcgcgatctttccacatacacagagagcttgggatctcaccctgagcccccggccgaaccggcaaaggggggcccgtgcggtctcccggtgaggagccccgcgctccgtcatctggcgcgccaggtagggggctcagcgtgtgtcttctgagctcttgcgctctttcgtgtgcaccaagcctttcctgttcagcctcatggctgagcaagcaaaggtgcccgacctctctcccagtgtgagtggcgacgacggggagccgaacccacgccgtcgagctcgtactccaccgcctcctccacgccaaagtcctgggcgggagaaggcacccaagagggctgaagggtccgcgacttcggcatccacaggagctgggaaagggcggcgagatggggagcgtcgcctcctcgtctatggtgacggcagcacgccccagggcgcgctccaagctgcgggcgcgctcctacgtcacccgcctgtcgcccatgacccggagtctccagcccaacgatggctggacgacgtggccaaattggtcatgacggcgcggcagcgcctagacgctggtgggcgatcctccgccaccaagacctctggtgctgctaccaccggctccgcgtcgtcaagacggagggcacgacgagcggcagccgctgttcgccgttcggctgccactccttcatcgactccttcgacccgggaagatctgcgtggggagcaggacgcccgcgccagcatcgagcgccggcgtaatgaccgaagtgctgcccacgcaacggaaggcgcttcctcgtccagagtgtcacctcgacacggacgtgggaatcagccctccgtgcccccggttggtggtgtcggctgtagagcctttgtggcgagtcttcggaatgtccgttggcccccaaggttccggcccaccatcgccgaaaaatatgatggcagcgtcaaccccgccgagtttctccaggtctacacgaccgggattgaggccgccgggggtgacgacagggtcatggcgaatttctttcccatggccctgaagggacaggcgcggggttggctaatgaacctgccccccgcgtcggtccactcctgggaggatttgtgccaacagttcaccatgaacttccagggcacatatccgcgccccggtgaggaagcggacttgcacgctgtacagcgaagggacgacgagtcacttcgatcgtacattcagcggttctgtcaagtccgtaataccataccatgcatccctgcacacgcggtaatctacgcgttcagggggggcgtgcggcacaaccgcatgctcgaaaagatcgcctccaaagagccccagactaccgcagagctttttcagctcgcggaccgagtggctcgcaaggaggaggcctggacttggaacccctccggttccggtgtggctgcttcggccgcccccggatccgccgctcagacagggcggcgtgacaggaggaggaagaagaggacagtccgttccgacgacgagggtcatgtcctcgctgtcgagggcgcttcgcgggccacccgaaaggggaggcctgtgagcgacaaaaagaaggaggccagtgctcccagcagggagcgccccaccggcaagtggtgcaccgtccacaatacctccctccatgaccttgcggactgtcgcgcagtcaaaaatttggctgagcggacaagaaagtgggaggaggagaggaggcaggagcgccgggaaggcaagtccccggcggttccttccggccatcggcgaagtgaggctaagcagaaggcccccgccgaggacatcgatgatggcgatgatgacctaggtttccaagagcctggggccaccattgccactgtcaatggaggagcgtgtgctcatgtttctcgccggagcctcaaggctatgaagcgagagcttctggccgcggcccctactcataaggcgacgcgccgggcgcggtggtcggaggttgctctcactttcgaccagaccgaccacccaccgtgcgttgcccgaggagggcagattgcgatggtggtttctcccaccgtttgcaacgtgaagttggggcgtgtcctcattgatggaggagcagccctcaacatcctttcccccgcagcctttgatgccatcaaggccccggggatgatgctccggccgtcccagccaatcatcggtgtgacgccggggcacacttggccgctaggtcatatcgacctcccggtcaccttcggtggacctgccaatttccgcacggagcgggtaaacttcgatgtggcggacctcagtctgccctacaacgtggtcctggggaggcccgcgttggtgaagtttatggcggcggtccactacgcctacctccagatgaagatgccgggccccgatggccccatctctgtccatggcgacctcaaagtcgcgctcgcttgtatggagcagcgcgcggaccgcctcgccgtcgtgtccaagcccgagggtggcgacgagaggcttggctcatctgcccccgccgccccgaggcagcggatagtcacgtgcgatgaggtcccggtcaaggaggttgccctgggcgacggcccgtccaagaccacacggatcggtggtcttctggacggcaaataggaagacgcgctcgtctccttcctgcgggcaaacgctgacgtcttcgcatatagaccggcggatatgctcggggtccccagggaggtgattgagcaccgtctcgccgtgcggccgggcgcaaggccggtccggcagaaagtgcggcggcaggccccggaacgtcaagccttcatccgcgaggaggtggcgcgacttctggaggccggattcatccgtgaggtcatccacccggagtggctggcgaacccggtggtcgttcccaaggcgaacggcaagcttcggatgtgcatcgactacaccgaccttaacaaggcatgtcctaaggatccttaccccctgcctcgcatagatcagattgtcgactccacagcggggtgcgaccttttgtgttttctagatgcatactctggttaccatcagattcgcatggctagggaggatgaggaaaaaactgcgttcattacccccgtaggaacttattgttatacgacaatgcctttcgggttaaagaatgcaggtcctacttttcaacgtactactcgaatttctttgggtagccaattaggacgtaatgttgaggcttatgtcgatgacttggttgtaaagacgcgcaaccaggaaacgttactttcagatttagcggaaacttttgagagcctccgctccgcccgcataaaattgaaccccgataagtgcgtgtttggtgtacctgcgggcaagcttctcgggttcttggtctctgcccgaggcatcgaggccaaccccaagaagatacgagctatagagcggatgcgcccccccagcaagcttagggatgtgcaatgcgttaccggttgcatggccgccctaagtcgtttcatatcgaggctgggagagaaggcgctacccttatttaaactcctcaaacgctccgggccgtttacttggacggaggaggctgaacgtgctctcactcagttgaaagtgtatctcagctctcccccagttctggtcgccccggagccaaacgagcccctgctgctctacttagcggcgaccccccaagtagttagtgcatcgttggttgtggagcgcgatgaggacaatcctcattccgcgcactctcaccctgtgctgactaggcccgggagtgagcagggaggagaggcccccgagccgaatagtggcctaaggcccctaacgaccggagtcggcgctctgcccgctcgtcagacggtgctgggtgcccccgaccctcaggaaggccccgaggccactgcgggaaggccgcacctatcgccctttgaccccgaggctaaccctgtgctgactcgacccgggaaagagcagggagaagaggcccccgagccgaacggtggcctaaggcccctgacgaccggagtcggcccttcgcccgcttgtccgacgacgccaggagcccccgacccacaggacggccccgaggccactgtgggaaggccgcccctgtcatcctccgaccccgaggtcatcggcacagaagacgagtgcgccccgagaggccacttggacgaagagcgccccggggatacggcccctagcaaagaggatcggccccaccgaaaggtgcagcggcctgtctactttgttagtgaggccctccgggacgccaagacccgataccctcaggcccagaaaatgctttacgctgttctgatggcctcgaggaaactgcgccattattttcaagcgcatcgagttacggtggttacgtcataccccctcggccaaatcttgcataatcgagagggtacaggacgggtggtaaaatgggcgatcgaactttctgagttcgatttgcattttgaaccacgccacgctatcaagagccaggccctcgccgattttgtggcagagtggaccccggctccagagcctgtctcaatccccgaggtcaactcggacccctcgcagccgccacacaccggccactgggtgatgcagtttgacggctccctgtctcttcagggcgccggtgcgggggtcacgttgacctccccgactggagacgtcctgaaatacctggtccgcctcgactttcgagcgaccaataatatggcagagtacgagggactccttgccggactcagagtggcagctggactggggatccgccgcctcctggtgttaggcgactcccagctagttgttaaccaagtctgtaaggagtaccggtgctctgacccgcagatggacgcttacgtacgccaagtgcggcgtatggagcgccattttgacgggatagagcttcggcatgtgcccagacgggataacatgattgccgacgaactctcacggctcgcgtcctcgcgagcccagaccccaccgggcgcctttgaagaaaggcttacccagccgtcggcgcgacctgaccccctaggggagacgggtgtgcctgaccggcccccgaggcccgtcggagtccaggcctcgggacccgaagggagcgctccaagctcccttagattgattgcttggatcgctgagatccaagcatacctcacagataagactctacccgaggaccgcgaagggagtgaacgcgtccatcgcatatccaaacgctacgtgctggtagaagggaccctctatcggcgcgcggctaatggaatcctcctgaagtgcattccacgggaacaaggcgttgagcttcttgctgatatccatgaaggcgagtgcggagcccattccgcctcgcgcaccttggttggcaaggcctttcgtcaaggattctattggccgacagctctcaatgacgcggtcgacctggtccggcgatgcagagcgtgtcagttccacgccaagcaaatccatcagccggcccaggccctgcagatcataccactttcatggccatttgctgtctgggggctcgatatcctgggaccgtttaggcgggccccgggcgggtttgagtacctgtatgtcgcgatcgacaagttcactaagtggcccgaggcttatccggtcatcaagatcgataagcactccgcacttaaattcattaagggcatcacggcccggtttggagtgcctaaccgtattattacggataacggcacccaattcactagtgaactcttcggcgactactgcgaagacatgggcatcaagctctgcttcgcctcacctgcccaccccagaagcaatggtcaagtggagcgcgccaatgcagaaatcctcaaaggccttaaaaccaagaccttcaatattctcaagaagcacggcgattcatggatcgaggagttgccagcggtgctctgggcgaaccgaaccacaccaagccgagcaaccggagagacgccttttttcctcgtctacggcgcagaagcggttctcccatccgagctcaccctgaggtctcctcgggccaccatgtactgcgaggctgatcaagatcagcttcgcagagatgacctcggctacttggaagaacgaaggcggcgtgcggccctccgagccgcacgctaccagcagagcctgcggcgctaccatcagcgccacgttcgggcccgatcactctgcgtcgacgacctcgtcttacgccgcgtccaaaggcgtgctggattgagcaagctctcaccaatgtgggagggtccgtatcgagtgatcggcgtcccccggccgggctccatacggctggccacgggcgacggcactgagttgcctaacccatggaacatcgaacaccttcgtcgcttctacccctgaggggggggtcgggcgtcaggtttcgggctcgggccaaccccgcacccccccctcgggagtgcagggttggccgggggctgccacacatgcacattctcttttctcttatttcagtatttcaataaaagcagtttcaatttcctaagggctgtatctgtgccgttttttcctttttgaagaattttgacttgaaataaaatcactcgtgctcaaccttgccctcgggggctcggttcggtcagctaaaatcgccaaacggggcccagaaccgagccgtgccctggggcgtggtgaactccgggggggaatcggcaaaaacccacaatcgggtcacccataaccctcggtcaccacgttcccggcctggccagcctcgacatgtggatctccccaggcactagccccgacccgcgcctttcgagggctgggacttgggcacgagtccttaaatcaagctaagacacaaaagaggaccacggcacagatcatcctcatctcatttgcatagcaaaataaaattaacacaaagaaaattttcatcatttttgattgcagattaagttgatctatacaaaaaagaggcctgaaggccttagaagaaagaaaaggaaaaaaactggagattagcgggggcctgggggctcaatccgatgcgcccgggtcgccggcctcgtcgtcacggtcgtcagcaccgctggcgtcgccctcctcgtcggagttgggggcgaacgcgagctgaggggccgacccctcgaaactgtggacgatgtggtcggcggcatccctgacccgcacgcgcgcgtcgtcctcggtcccgggagggaactcatccagcgccatccacggagagaagttggggtccctggcctggtagctggccaggacaagctccaccgctccttgagcgaggtccctcgaggatgacttgatgatcttctcgagctcctcggggagctgctggagagctccggccatctttgagaggtgctgagcgaggcctcccaagttggtggagtacttcatcgtttggcccttccagaggcccgcctgccgaccggcgcgatccagacgggagactgcatcccaaagcatgccgggccctatctcgcccgccaagcggagggcctcggcttccccggcggatgaatctagcgcgcgctgcatgtcggtgacgatgtgttcggcatctgcgaggcgggcggctaagtcgctttcgcccgcagccgccccgccgatgcgtgccctcgcgtccagctccttttcccgcgcctcgaggtcggcagcccgctgctccagcgtggctctctcggcgcggacggattccaagttgcggcgcgcctgctccgtcagcgctgcctcacggagggacaggctgtccgccaaccgttgcgcctcggcctcggcctcttcgagagctcgctctcgctcggtaagcgcgtcctcgcggaggcggagtgcggactcctcttcggcgcaggcagactcgtgcgccgccagcgttgcctcccgggaggtgacggcggcctcgcggtccgccaggtccttctccgcgacgcaggcgcgctcctccagcgccatggcgcgtgcctcgagggcctcttcacgccgccggagcgccgcttcggtctccgttgctcgctgctctcgggcagcggcggcatcaaggacctcctgggcggcgtcgagctttttctttagctccgcctcccagctcccgtgttgaaggcggagggagtcctgcgcctcgttcatcacagtggtggcgatgagggcagccccccgctcctcctccacctctcgggcgatctccgccagcgccgtcttacgggcttcaagatctgagacgtgccggcggtgtgctttgcggcctgcttccaccatggcctccaccgagcgccgcccctcctcgacacgcgcccatgcggcgtcgagctccgcacgctccgcctgcagggcctccacctgggcgcttaatccatccaacaccgcggtgttggcggcggctaaggcctgcagaaggggctctgcgctcagcggggcgacggaaggcgtggggaagagctgccttggagaagatgccgcgcggctcggcccgccaatggacgtgccggcctcggggatgtcccccggacctgtttggtcctgggcgtcgcccgaaggagtgggcccaagcgatgcgcccgcggcctcgtcgcgagccatcctagaagctgtcgcctgggcatcgcccgaggaggtgggcccaagcgacgcgcccgcggcctcatcgcgagctgcctcggaagtcgccatcgcctcagcctggcgagcccgggcggcctcctcccgagcggcttcttcggcttggcgagcccgggcggcctcctcccgagcggcttgcggttgtggcagccgagatagatcgtatcgtgcgcgcgttaattacgctcgccgaccgaagcgacgttaccatatctccaggcgaagcaaatcggctcgcccagatttgggcgctgctcaggtgaggtgacagtcttgaagagaccgcccattattgacagccaagttaccattaccgatgcgcatggtttgagaccgttgggtttctgcccaaccatggagaccggtcccacctgtcaccaggctttaggagtggcgtcacgcccgaccgcttcccttgagaagggcgatcgccctggcataacgccgggggctactgtcggtgacatgggaccgggagtatcatgactagaggcttgaggcagacacaatcgcccacgtggcctggcaccctcgggggacgtcgggcccgagggtgatgtgtgcgcccacctcttggtctccccgaggggggggtcggaccactcctgcctcgcccccgagggccgaggcgccccgacccctcgcgggttctactccgcgtgcatgggttaggtgagcacagcagggctcacctaaccgcatttattgcggctcggctaaacgtgtcacgccgcacgaaatacagtgcactccactcgtttatccggtctgtgaccagtcacagaccggtcaaatcgcgggttaggtggcgacaggcggtctgacgcacgcttcgccccatcccgtcaagacgagagcttctaggcactcgtccccagctggagttagcgtgttacatcccagagatggcacgttagccccggtcgatatatgccaggcttcatcctaaccattacaggcaagatgttgtgtgaagaagggcaaacatgcacgttgctaagctgacgcgtggtggacaagaatgaccgatttgtgatcggtctgacactgctcatgtcgtcagcacacagccacgttcccacgacgcgcctgcctccggcagaagtggaggtaggtgtgtgccgtcccgtcagaaggatgttcggaggacaaccgtgcaaatctccgtccatttatgaagagaagaaaagtccagtttggaaagagaggggtgcatgtggtatccccttgaagtataaaaggaggaccttgcccatagggaagggggatgactttttccagattcagtagctagaagaaaagggagaggttggctcacactttgtagctccttgatacacagatccaccaaaacacaggagtagggtgttacgcttctcagcggcccgaacctgtatacatcgcttgtgcttcatgctctttcaataggtcgcgatctttccacatacacagagagcttgggatctcaccctgagcccccggccgaaccggcaaaggggggcccgtgcggtctcccggtgaggagccccacgctccgtcacattggatgattcatcaagggtgtaaattgcacctcttcgcattatctaaattgtttttaggctttggatgatttatcaagggtataaattacatctctccccccccaaaaggcataccatacaacccaattatttataacctatggataactgataaaggtaaaaaaataaacacatgaaaaaatcatatagtagggaaaaaagaaaattttagaactcatatatactatattatcacacaattctcctgcagcaacacgtggggtacccatctagtacatgaggttttaattgaacaaaagttgtctaatggataaagtagagtggtatttatactaggaacatccctcctagcttagtgtgaacataagaaaccacatccaagtaatcaaggctaacataaatgagaatgcaaaaagttttctcgggttcgcgcacagcccttcagctcctgcacagccttaagtaaaattactctaacttcttattggaaaatgatattgtaacccttgagaacgttctcaaggtaacctatccttcttggcgtagtgatgatgccttcagatataaaccatagcaatataaaggtagagcatttaggtagtataaaactctcactaaaatttgggttaagttgagcaaagagtgagttcacctcttgttgtattttcctagcattgaggtagtataatttaaaaacataaaaagataaaaaacataaattacatttatcattaaaaaatacatccgcttcggtctccttccctcttttctccctgaatagatgagatcacaattattattagtgaaaataattttaagttgactttataaacatagattgtatatattatcatatatacgtaactaaattagctccacaatgtttaaaaaagaaaatttataaaatcatattattttacccattatattaacaattataattcttagttaggtgcaccttttattttgtaccattaaattagcaatttatgatctatataaactaatttataacccactattttgaactatttttaataaaaaatattttgctatgataatagaccatcaggtctatcttttgttctaaaaaagcctctaaagatctctttccagtctttgcacgttgcacattgtgtccttgcctagtgggcatatgacctagtgctctacctgaagtagctaagttgatcacaatcgcccataaactttattaaaaacatttcaaaatttataggcacactacacatactaatatatttttactcttatttcaaataaatattgttttgaacaaaaacaaacaaacatacaaaaaagaaagaaattagctgcaaactattgttgatattttggactacaagccaactaattgtgtaggtgaattgtttcctaacataaaacgccttaaaaattcattagaattatggagaaaaaatatgaaaattttaaacttgtacgaacggaaaaaaaatccaaccataattttcatattatattaatctggcttatagattatactaatctattatattatactaatttggcttatagattagtatattagattatactaatctggcttatagattataataatctatcataataatctacttatttgttttagcttatatactcctaataatttagattataataatcctaagctaaatcaaacatggcctaaatcataccttgagttccttaccgtcctaatttttccttttgacaatattgaatggtatgcatgataattgcattctcgatccaaaggttggttcaaaagtcatatgagcttgatctatcttgtaagtcgatgaattgtttttagattcacccgacctatagtttgccctatgagatatgatttttgaacaaactataatatcttgttttaataatatgaatgcccacgtgttgcgtgagtcattcctagtttttctaacaaacgctgtatataagagaattagtattaaaataagagggataccaatcacacagtgaaaaaagtgaatgggatcaagtaaaactatttaattatatgtgatgcgactgcataataaacagttcatttgaatgttttgatcttcttgttggcttatcctagaaattctcatattaataggagagaaagaaaaacagagcccatatagaaatacaatttagaaagagttgaaattcggaattaaaaaataagaaatattggaagaggataatagagtccatatagaaatacaattaagaaataatagaaattcgaaattaaaaataaggaatattataagtagagtacagagttcatatagaaatacaattaaggaataatagaaattcggaattaaaaataaggaataacagaagcagagcatagagtccatataggaatttaaaagtaactaaaattcggaataaacataatacac

SEQ ID NO: 24743 - DNA, 10000 bp, Oryza sativa
tgggaagaagagtataaagtaatatagcaatacaatttagaagtaaaattcgaaattaaaaattaatgaatattgaaagatgagtttaagtccacatagaaatataattagaaataataaaaattcagaattaaaaaaatattattggaagaagagcctagagtcaactccctacgtcccaaaataaatcaacttctacaattcaaactttgtccgaaaataaatctacctctaccttcttatctactctcggttcacaaatcaaaaaattttattcctttaataccccttacctacctacccaccaatactaatttactaatattaaggggtagtttggacatttatcctctcctttagtgatgcattgggatgctagaatttgtctctttgtggaaaagagggagtatatagaaatacaatttacagataacaaaaattcagaattaaaacaaagaaatattgaaagacgaatctagagtccatataggaatataatttacaaataactaaaatttaatattaaaaataattaataactaacatgtatgtaaaatacaatataaatattacacattagtagtttcgtaaagttagtacaaaatttaaaattatgttgtcattttaatatatttgaataatacattgagaaaacatgtatgttattctatgagagaaaataccatgcgttagtattaaaataagagggataccaatcacatagtgaaaaaaagtgaatgggatcaactaaaactatttctgtagggtatctaatgaacagagaaggcagtagtcttctttgtaccgccggacgtaacggccatgttgctgttgctcgagagcttcttaagcattgtccagatactccatactgcagcgaaacaggctggacgtgtcttcacgcagctgcatactctgatcgcatagagtttgttcggtttgttctggggtcagaacaactacggcatctcgttaacatccaagataaatacggacgaactgctctgcatctcgcagcagagaagcttaattcgaggataatttctgctttattgcttcaccaaggcatagacgtcacactgcttaacaatgacggtcagacggccacctcggttttaactgaagctttagctagcagaaaggacgatgacatcgaccacatctgggtatgtacttccaccatcctataattgttagtatctttatagtatttaaaagttatagtaaaatagttatcactatgatagtgctacttgtcatatcaaccacttcgaattcaaatttctccacattctgcctataaccaccatcctacatctaactatacattatttattataagcggtattatatactccctctgtctcaaaatataacaacttttggactctgacacgatcttcgatatgctactttgaccaactatatcaataaaaataaaatattttaaataaaaagatttgcatattatgatagcttgtctaatgataaatctagaaacatcaattttatatgattgaccttttttattttttttctattaatagtctgttgatgcgaaaaacatacactggcctggaagatctgtttaactcctgtgcaggttcaaaatctcgcctttagattcgtaagcgtgccagttgatttgatcttgcaatcaataagaaagaaagataagaaaaacacggttaaatctatagacgatagctgatcggctagttgccgatgatatatcatttatctctgagccgatgtcatatctgaatcgatcggcagtcattaatgaatgaaataagactaaatctactcgatcggctatagatattaataacatataatctctacttcgatacatatttaaactaagtgattgggatagatcggtcgctgtgccgagacagtataaatcacttaagtcgaaatatatactaaagtattaattatatagatgtttatagcatagccgatcaaaaagatctagcatgtaccagctaatactccgataccactctatactaagatattagaacaagcagaatatatcaaacaagaagcctaatataccttaatgcaataagatcttaatataaatggcagatttagcatatcaatcgaacatataggatataaagtagctaaatcaggtaagatcggctgaaaccccgatactatctctattaattattataaaacaggctagatatcacaattatagatagaacttaatagatcgaactcaaacttaaccgatgcagcattaagcataaagataactgtaggatctaaacaagatgatgaaaacttctaagagatggtagatacccgatacaatccaagttaacaacaaaacatagccctatcggttacttcttaacagcaagaactagccgatgacaagttatatagcacaactaacaaagattgtaaagtatatatgataactcgacgaattacataaacaagattagagtgtcataaagatggaagcactaatcccgagaacgcaaaccgccttgacaagtttacctctagttgaagatcgaatcaatgcagctcaacccgaaagcaagaactcgtcgaaatagaataaaagggtggcgatgcgccgaaagtgttattgaatgtgtgttatttgattacataggctcgggtcatatttatatccgagattacaagatatgtccttgccggacacgattcttatctctaacaaactctaagataccataagtctttgcggcagacttttgcccaaacatatctctaaagaatttacatgagatatccttattaatagctacaattgactttctaaaagctttttctccatcgtggcaatccttatgaagcacgttaattgattctaggaatagcctcgaagccatctttatcagaatcggctataccaactctatcggctgtatcggttatcctctgtccgatccatctcagccgattcagactccagccgatgccttcacagccgacgcatacgctgttcttcaaatctaactctttgccgaatccgccgaatccgcttcgattccaacgtcgaacctaattcatatcttaccaaatttggtcgttaacatagtcaaagttaaaaatgtttgacttgttactatgctaaaaatgcttatacttacacacacatatatatacatatatatatatatatatatatatatatatatatatatatatatatatatatatatatatataggacactcatatggggcaccatggtgcccgggcaccatggtatctaatgcacaaaatcactcaaatttttcaaaattttcaaattgtgagtatatacctagttataataatttgattcatacctatacttatcaacaaaacaactcaaatttaactttatttcacaatccatgattacatacctaactaattatatgtatggatgctatatacctagaatcaaaatctaacaaaaacaagttcaaattcagttcaaacttgctttaaactagttagtaaagtagttaatgttaatacctaagtaattgaaaaagtttcatactcatttgaattgggtatatactcaatttcaacaatggtgcccgggcaccatggagcaccaaacaaatttaatatatatatatatatatatatacatatatatatatacatacacacacatagacacacatatatatacatatacatatgtgtatatatgtgtatagacactaaaaaaatgttcgtgtgttacaacgggtaaatgtgtttttttccagtgatacaatagttactaagaattagtatcgctatatattataattgaaaccgcgctgcctcctacccctcttcgctctgtctgcctgtcttaacttccggaagaaagtttcgtgcctgtacagtgccgaagccgatcttcctttctcggtctcccaaattgattgagggcttttgatcaacttgatctcttctttcaatttttcctaaaaacgcagcgaatccacaaaactcagaggataaaaacaaccggggaaaaatcaccggccgagcatcattcactaccattaaactgagttgaaatctagtgaattaaagccaaattgaaagggggaaatcatgggggaaaggatgattgaggagtggagaatccatttttttaattaattagaggagaaaatgcatgtggaggtagatcgatgtggcggctgtgttagggttcggctcgggcggcacggcggcggctggaggcacacgacaatggtttagacacgtagagacgacatatgaaatcaaatgcatggaatccttgcttatttttttattaggtattaggtattaagatagattagagataaagataaatattagaaaatcaactaaaatgcggatgacgtactaaaattttagcagaaacatcttcaatttttataatatttttataatagtttatatataccccctctcctcctggtgtgcgcctccctctgctctcccatgcccttcctcctccctctcccttttttctttttttctcttttatagaaaattaaaaaaataaattagtgaattcaagatttgaactatgatctcacagtatataccaagttattcttaccaatacatccaatgatgatatttgttttaaggattattgtttgtttttttatcttactttgtgagaaaggaatatagtgatcgattctaatctctttcactaccaccataaaacaaaacatatatattattaggaaactcataacattttactatattcgtgaagtataattatcgtaaaagtacagtaacacgtcacgctactgtaaaacatataggacattactgcacttctgactgtaacactacggtgaaattatagtaaactaggaatcaaagcaaaaaaaaatattgtttaaaacatcttacttgtaaatattgttagtccaagtagcatctcaaagactgtatcaaaaatataaaaatgcttatatttttagtcggggagagtggtaaccaattaatgacacccaaacaaaagtttagagttttcccagctgacatgtaccgctaatccacatccaacctcctgcacgttcgcatccatcgttcgtgcaatcgtgctcattcattgcgcttgacccgactggctagacaacgaccaaacctctcctgacaaaaaaaaactgctcgcgttgccacttctgatcagctatctcatcatttgtcaccttgccttatactaactccatattttaacgttttgtctaacgtttgaccattcgttttattaaaaaatttacattattataatttattttattgtgacttgatttatcatcaaatattcactaagcatgacataaatattttcagattttcataaaaattttgaataaaacgaatggtcaaacgttggtcaaaaagtcaacggcgtcatatattaaaatatggagggatatattaaaatatggagggagtatcatttatcaccttgccttatacccctccgtccaaaaaaacccaacgtaggtagcgatgggacataatacagtataatgaatctagacatgagaatacccagattcatggtactgtataatgtcccatcactatgttaaaacgttggtttttttaacggaggaagtagctcttaaaaccttctcctacctaccgctccatcccatgaaactgaagtaaaaaaaaaaatacccctccataaaaaaaaaactaatcctaacttcagctggtaaaaaaaaatacccgtccatccttaagattagattttttaactttacaagtgtttaacttgtaattattacaagtgattgagtagtactactttgctaaaaaaatctaatgtgttcagagtttgtctttttagcaaaatagtacgtgtaaaaaagttcaggatacccagactgatacgaattggattggaacggaaaaacgagccatcccagatggtactgttgacacgaaaaaatataggtatggaagatctgcttagctctagtgcaggtctaaatcttggtgagatacgggcgtgatagtcagtttgaccctgcaactgacaaaacatacaaattgaagatcaatgagctgatcggttgacaagccgatggagtgattccagccgatgccgatactagccgatagcgatagagttttgagatgtcggctatatgtccaatgtagataatgatacttgagtaaataatgatataatgcaatcggctgatgataatacagtataacagtcatataatccaatagaaaccaatcggctaataatgatatgataggataagtactgatccaaaggataaagcatacatcggctagaggtccgatgtcataaaatccataagattagattgaacagtgaaatctttattgcaatcggctaaatccaaattgtatgtaatccttgtaagccgatacaacgtccagatacctcatcggctaaagccccgatgaaacccttattggcagtcaacaagcatgctagatattacgattctaagcatgacttaatagatcaaatttagttgatgcaacactaaatatgaaaagaaacataatatctggacaatcaagcctatggctgattttaagggtggtagatgtctaagttaatctaatctagcaacacaatttagccgatgccggcagaaaccctaaaacgagaagcagccaatagagctaaattgatatgctaagactagattaacagagacatctgataaataggtaggcaaatatatcatccaaactagagcaattcaagaggtcgaatgtactgatgcagccttgaacgatgccgacgtagacgagacaattgcctaggccggtggaacgttggacttatcccttcgctagagatcgaactgaactaatgcagccccgtgtcaggtgccaaattccactggaggataagtaaaaacctcggtaaagagggtggcgatgcgcttagagtagtattattgatcgtggagataatttacaatgacctgggtgtacatatttatacccatggggagtgttcgcggtatgtcatgagtcccttcgaccagacctaccgaaaccatgcaaccagcgaggattcaggcccaggacgctaagatcatttgggcgaagtcccatggcgaagactatgaagtagaaatcgcgaaggccgaagaatcgcgctggtatccggcaagaccaaatgcatcattgggcgaagggtgtatgccgaaggatggggtcttcgccataacaagcccaactttgaagaggccaaaggggccatcccagccgctcaggcctgttcgccaattggcccattagaggcccatgtatccaaattacaatgtatacccaatcaaacgtccctttcataagggcagccatgtaaattcccctgtaaagcctaaatcctaatgggggaacctttaataggattataaatagcccctagggacatgtgaagtggggaacccaaagaaagatctcaaaataatacatgtactttttccaacactgttgagtaaccacgtccttcgatgtacgcggttgtcgcttcgacaacagctggcgccgaccatggggacctctgagtgaaaccactaagagcgaatgccaccgaagaatgtcgcaaaggagaaggttgctaggcgaatggagtgtgaagcaagaggcgagatggccgccgaagaggtagtagagccttcggcgcccgacgttgaagctggcgtggcaccatcggcttcggcacctgcgctgcaaccaccaccttcggctcctgccgcttcgacggggcaggcgccgaacacggctgcaacagcaagggtgctccagaccagggcggagatcctttcaacgagccaacaggtggcgccccaagctgcttcgccacagcaggctccgacttcgaccgcgctcgccgctgcacaagtcaaccccaacctcgacgcgcaggccgaagctgacatggaggccatgcgtcagaacatggcacgacttcaggacatgcttcgtcagatggaagggcagcagcaggcgtacgaagcggcccgacaagctaaggctgcatcagcacccattctctagtactcggcaggctataacccacctcaagtctatccgcaagcgccgatccaggtctttccgctgcaagtcatgcaagcgccagcgtgcttcgcctgacagccttcagccgtaaccatacacccatcccctcacgtacaagcacaagttcggccggttgctgcccaagtgcatcctccgctactggcacagacatcacaggcgatggtggaaggggtttcagcctggcaagcgcagtttcaagctttccttcaccagctcaactaaccccacaatatttcaagtacaaccccttcgatctgaccggaagggaatgcaagtcagggtgcacccagttggctaccgtcgaaccagcctggtccaggggcttcgccttggagccaaggaccgcagttcgaccccaacactgccattcaagcaccgaccgtccaaccacaggcgacggcaccaagcttcggaaccaatcaagcgccgaaccaggtcgccatggcttggacacagcgtacgttcgacctatccatggcggttccccaagcgtcgccgttcgggaccgggcaaccgaacacgatggcccaacctcatgcgcaagtcatgacttcacccttcaccacaccatatccgcagctggtgccgaacaagccagggggtgagaaggggctaccgctgagcaggggaatcaagattcatccaatcccaccccagtttaagttcccacctgttccgcggtactcgggcaaaacggacccgaaggaatttctgtccatctatgagtccgcaatcgaagccgctcacggcgacgaaaacaccaaggcaaaggtaatccatctcgctctagatggcatcgcccgttcttggtactttaatttaccagccaatagcatttactcatgggagcaattgcgcgatgtttttgttattaactttcaaggcacctatgaggagccgaagacgcagcaacatctactcggcattcgccagaggccgggggaatcgataagggagtacatgcgttgtttctcgtaagcccgatgctaagttcaggacataaccgaagcgtctgtcatcaacgctgcttcggccgggctgctcgaaggcgaactcaaaagaaaaatcgccaacaaggagccgcagacacttgagcacctgcttcgtatcattgatgggtacgcaaggggcgaagaggattctaagcgatggcaagcaatccaagccgagtacgataaggcctccatcgctgctgctcaagcccaagtacaagcacaggtcgccgaaccggctcctctcaccgttcgccaacctcagctgatgaaccaaggacagccgccgaggccaagtcaagcccccatgacttggaggaaattcagaactgaccgcgcaggcaagaccgtgatggctgtcgaagaagtctaagccctccgcaaggagttcgacgcccaacaagcgggcagccatcaacagcctgttcgcaagaaggtcggaaaagacctctactgcgcttaccatggacgttcttcgtacaccatcgagcaatgctgaaacattcgacagcgtggcaacgctcaagatccaaggcctcaacaaggagcagctgtcgaagcacctcgcgaggctgctcaagaacaagtacccccggccgaatagcgccaagacatgaagcgcagagtaatccaagtgattacaagggctgactcgccagcttagccgtcaaaactgcagaagaagatgtagctgcgaatggtgcacaacattgcttcggccgacgaaggggctccacggtacttgaatcagcaaatctctttcgggccggaagatgccgaaggagtgttgttcccgcatcaagaccccttggtgatcttggccgaagtagcgggcttcgaagtccggcaaattctggttgacggaggaagctcggccgatgttattttcgccg

SEQ ID NO: 24744 - DNA, 559 bp, Oryza sativa
gcgcaacgttgttgccattgctacacttggtttggctcatgaacgtcccatccttgagttgcttgatatgaagttcaaggaagaagctcaactttccaatcatggacatctcaaattccctagacatcatatcaccaccaaattccttacaaaatacctcattagtagaaccgaatatgatatcatcaacttttatttgacaaacaaagaagtcatcaccaatgatatttgtgaaaagtgtggtgtcaacttttccagttttgaaatcctttgacaaaagaaaatctctcaatctttcataccaagctctatgagcttgttttaaactatagagcttttgagagtttataaacatggttaggatttttaggatcttcaaaaccgggaggttgttcaacaaagacaagttcggcaatttcaccatttagaaaagcacttttcacatctatatgaaatagttctatatcaaagcatgatgcaaatgcaagaatgatgcgaatagcctcaacttgtgtgaaaccttgtgccaccaagcttatgttgtttctcaccaccaacc

SEQ ID NO: 24745 - DNA, 648 bp, Oryza sativa
attgggaatcattgtaagatctataccgatcataagagtttgaaatatacatttacccacacagatcttaatcttcagcaaagaagatggttagaattaattaaggattataatttggaaattctataccatcccagaaaagctaacgttgttgctgatgctttaagtcaaaaagcttattgcaatttacaacaagaaataatatcagaacaattacaagcggaaatgcttaaactaaatctgggtattattaagtatggagaattaaatactttggagttgaaacctacacttatggatcaaataagagagtatcaaaaagatgacccagaaatacagatttttaaggaacggaaggtgcaaggaaaggctgcagatattactgaagacctggaaggaatattatggtacggaaatataattatcgtaccacaatcaggaaacttaagggaggtaatactaaaagaagcacatgactcagcctactctttacacccaggtagtacaaaaatgtaccatgatttgaaggacttatactggtggccaaatatgaaacgatattgcaaaatatgttgcattatgtcatgtttgtcaacaagttaaagcagaacaacaaaaaagcctacaggattattacaggggctgcag

SEQ ID NO: 24746 - DNA, 606 bp, Oryza sativa
  unsure (1)..(606): unsure at all n locations
atttcgaggatcaagctcaagatctcgagcgaggcaagccacccttgaacaccttgagcctatatttgaacttaattatgttgcttgaaaagtattatgcattgataggatcgcacttaatctgcttgtcccgtctgcaaggcagattggcggacctacctaatttgttgcatttgacccttccattgtaattgttataccatgttcccttgtacccacctaattgcgcctcggtaatcgtgcactctgcatgggtatcgacggtcgccttcaaacttaaaatctgagaaacatcttgggtaaaacttgggttttacaaaagacttggaaaacccgacacctgngtcggtgcttgcaaactaaatgaatttccaaaaccgcggaccggggaacgtaccgggtgtacggtttcccgctcttgcacttaaggaccgtttccttgaaatttcatccaaacataagacaagtacgaccacatgggtggaatgggacacccctggctgagtaactagcttatcgggggagccatgatgctaagagacatgtggattcgccggggtggggcccggacgttcgaaagtgccttgaaattggcgatgaagtgct

SEQ ID NO: 24747 - DNA, 4043 bp, Oryza sativa
tgtactcccttgcaattattctgcatttgtgggtgtgtcttgttgagtacggtggttgtactcagtcttgctcaattttttccccaagcccagatgaggagttccttgaagatgaaggctttggtgtctagctcgtgcctgccgtcaagcgcctgtggtcgtcgccctagtcttccgctgtttctcgttgtctttgagtgtgctgggccttcgttgcccgtgtaataattttatttacgcttccgcttgttaaactctgaattgtatcaacttttggtgtaccttgcctcctgggacaaggaataatacacgcacgtcaggaatgcctgttgggtgatttccggtcgtgacaagttggtatcagagcctcccttgaccctaggacgagccgtagatcccaagccttagctatattttcaaaaataaaaatcctctgttatttgtgaaaacccgctattctctctttgtcttgctgcttcacttatcatcaaaatctgatcttttaaatgttgcttttcttttgtttttgtttgtagatggccggcagcgttacccgtcgtggtttgcacatgactggcttcgtcttggagctgcgaggcatgtgcgtggtcttggggtatccacatggagtggattaccaggccaggccgctcccggatcaggagggtgaggatgcagagcctcacgctggttgggaggtcactgcagtgatcctctccggctctcccgagcggacttcgctggcagtcaccgcgggtggagattccttccccgccgcttgccagaacgccgctctcctcgccatcggcacccttcaccagcgctacccggacgagttgcagcactcgccctaccgctaccacccccgtcgcggaggagccagcgaccacgccaccttccgagacgccagctcggaggatgacgctaccgtcgtgcatctggcacgcatggtggaggcgtacgacgcggctcgtatcgacttccaccagatggtgcgtcgtggcatggtggagaacaacctgaagatcctggagctgcgtcaggagaacctgcagctcaagaaggacctcgacgcgttggaggcgcagctgcatcagctcaagatcgcccagggagagatcagccgtcccaagcgtcgccgcgtctgccgcagccagaagatcaccgcccgcaagagcacctccaggcccgagcttgttcgtcagtccctggcgtggacctgcttcgtcgagacccctcgtgccgagcctgcgcccgtggttccccaggagggggaagcctccggcgttggtagctcggagggtgcgctgttgctcaccttccgtcctggcccgtcgcagcggtagacgagcagttagtaggcttgcgcgtgtgtttttcctcgtttgtctttttgagttgtgtggggcatggttacaccggtgtgtggtgtaactatgtcggagcctgtcttattttatttgcctaagcaacttgaacattaatgaaccaatttaatagcagtaataaattcaagaattatggtagtcgtgggtggttagttttaattgttagctccttctctgtttgctggttctgtgtggggtttttcagatggtgacgaccaggagaaatgctgctaccggtgatggcaaccaacccgaaggcagcaaccacaaccaccagggcaacccacctccacctccacctccgcctccaccaccaccgccagacaccaacgccattctcacccaaatcctcgcccagcaagccaacatgatgaccgctttcctccaccacctccaaaacccgccacaacagaatgctccaccaccacctccccaacactctaaactcgccgagttcctccgcatccgtccacccaccttctctagctccaacaaccccgtggatgctttggattggttgcatgccgtgggaaagaagctagacacggtgcagtgcagcgacgaagagaaagtcatcttcgccgcccaccagctgcagggacccgcatctctctggtgggaccacttccaggctacgcagccagaggggcagccgattacttgggctcgcttcaccgccgctttccggagaacccatgtgcccgccggagtcgtggctcttaagaagagggagttccgggagttgaagcaaggcaaccgctccgtgatggagtatttgcatgagttcaacaatctggcccggtacgctccggaggatgtgcgggcagacgaggagaagcaggagaagttcttggcaggaatggaccctgagctgtccgttcgtctagtctctggggactatcctgatttccaacgtctggtggataagagcatccgcttggaagccaagcacaaggagctggaatcgcacaagcgccgcttggcgaacttccgcaatcaacagggtgctaaccagagggtccgctacaccaatccctacccagggggatcctcctcgcagcagcagcagcagcagcagcaacctcgctccgcgcctcgaccacaattcgtggtgcgcgtcccacagccgcagcagcagcagaatcaacaagggactcgtgcgccccgtcctcctacgccagctgtgcagcccgctcaaggccgcagggacgctcaaggtcagcagcgtctgtgcttcaactgcttcgagcccgggcactttgcggataaatgcccaaagccaaggcgtcagcaaggccaagcgcctccccgctccaacaacggcgggaaggatgtcattcggggccgtgtgaatcacgtgacggccgaggacgtgctgacaactcccgacgtcatcgttggtacgttcctcgttcattccatccctgctacaattttgtttgactctggagcttcccactcatttatatctgtgtcattcgtggggagaaatcagttgggggtagaaaggcttagaaaccctctgctcatcaccacccctggaggggttatgacagcaaagtattatagccctgccgtccctatagaaattcaagggattccttttccctcggatctgattctgctagacaccagaatttggatgtgatttcttggtgatcgaattggtgtggcgtcaatctccaaggtagtagatggattggcgcgcagacgctactgtcacctctgtgaccgagcgacctagaacagaccggtctgtttttctttgcacctccaacctctgtcagaagttcagaactgcatcagataggtctgtcagaaatccccgtagtcagagagttcggagacgtgtttccggaagaactacctggtatgccgcccaagcgagagattgagttccggatagatcttgctccagaaccactcctctgtacaagcgaccctaccgtatggcagcaaacgaactggccgaagtaaagaaacagttggaagagttgaaagaaaaggggtatatacgtccgagtacttccccgtggggtgctcctgtgatttttgtagagaagaaagacaagacgaagaggatgtgcgtcgactacagagctctcaatgaagtcaccatcaaaaacaagtaccctcttccccggatcgatgatctgttcgatcagcttaaaggtgccactgtattctccaagattgatcttcgttccggatatcaccaattacgtattcgtgaagaagatattccgaagaccgcattcactacgcgatatggactgtatgaattcacggtgatgtcgttcggtttgaccaatgcgcctgccttcttcatgaacttgatgaacaaagtgttcatggaatacttggataagttcgttgtggttttcatcgatgacattctgatatactcacaatcagaggaagaccatcagcgccatctccgtctggtgttgggaaagttgcgggaacatcaattgtatgccaagctcagcaagtgtgagttctggttgtccgaagtcaaattcttggggcacgtgatatctgctaaaggagttgctgtggaccccgaaacagtgaccgccgtcaccgattggaagcaacccaagacagttactcaagtccgcagtttcttaggtttggcaggatattcccggagat

SEQ ID NO: 24748 - DNA, 2174 bp, Oryza sativa
tgctcatgcaggacggccatgtggtagcctatgcctcacgccagctacgacctcatgaaggcaactaccctacacatgacttggagttagcagcggtggttcatgctctaaaaatctggcggcactatctcattgggaaccgctgtgaaatatatactgatcataagagtttgaaatacatcttcactcagtcagatctgaaccttcggcaaaggagatggttagaactcatcaaggattatgatgtgggaatacactatcatcctggtaaggccaacgtggttgccgacgctctaagtcggaagagccactgcaacactctcaacgtccgtagcattccgcccgagcttagtcaacagatggaagccctgaacctaaacatagttggtcgcggattcttggctgcgttagaagcaaagcccaccttgctcgatcaaatccgcgaggctcagaagaatgatccggacatgcatggactcctcaagaatatgaaacagggtaaagccgctggtttcacagaggatgaacacggaaccttatggaacggaaagcgggtatgcgttccagatagcagagaacttaaacagctgatacttcaggaagctcacgaaagtccttattccattcacccgggcagtaccaagatgtacttagacttgaaggagaaatactggtgggttagcatgaagcgggaaattgcagagtttgtggctctatgtgatgtgtgccagcgtgtcaaggcagaacaccaacgaccggccggacttctccaacctctccaagtaccggaatggaaatgggatgaaattgggatggatttcatcaccggacttccaaaaacccaaggtggatatgattctatatgggtaatagtggatcgattaaccaaggtagctcgattcattcctgtgaagaccacctatggagggaacaaactagcggagctctacttcgctaggatcgtgagtctccatggtattcccaagaaaatcgtatctgataggggaagccaattcacctctcacttttggaagaagctccaagaagagctgggtactcgattgaatttcagcaccgcatatcacccgcagacagatggacagaccgagcgtctaaatcagatcctagaagatatgcttcgcgtatgtgtcctagatttcgggaagacttgggataagagtctcccctatgccgagttttcctacaataacagctaccaagccagcatacaaatggcaccctatgaagcgttgtacgggcgcaaatgccggacaccgctattgtgggaccaagttggagaaagccaagtgttcgggactgatatcctgagagaagccgaagctaaagtcagaatcattcgggataatctaaaggtggcacagtctcggcagaaaagttatgcagataaccgtcgtcgtgatctggaattcgcagtggatgattttgtgtaccttcgggtcacgccattgcgaggtgtacacaggtttcagacaaaagggaagctcgcacctcggtatgtgggtcccttccgtatcatcgctcgacgcggagaagttgcttaccagctggagttgcccgcctccttgggcaacgtgcatgatgtgttccatgtgtcgcaactcaagaaatgtcttcgagtgccatccgagcaggccgactcagagcaaattgaagttcgcgaagacttgacctatgtggagaggccagtgaaaatcctggacaccatggagcgcaggaccaggaaccgagtaatccgtttttgcaaggtccagtggagcaaccacgccgaagaagaagctacttgggagcgcgaagacgagctgaaggcagcccatcccgatctcttcgccagttcttccgaatctcggggtcgagattccgtttaaggggggtaggtttgtcgcgtcccaaatcgactctaaaatctatcctcgaaattgtgcaaagaataattaaaattccatgtgaaagcctccaacaattaaaatgtgcaaagataaaagtcaaatgaggcttggaggatttttgtatatttcctaaaagcctaaaatgcttaaacaaattttagtggaattttcagaggacaaataataattgaaaagaaataaacaaagttgaaaaggtttaaaaaaaaagaaaatcctaaaagaagttctttttcccccccccccctc

SEQ ID NO: 24749 - DNA, 741 bp, Oryza sativa
caaatatctcttttctcaatttttcattgtcatattattacttgataaaaccatgaggtacaaactccccctcaaaccatgccaaaaggatgaattattcccaattcatcacgaagaaaagcaaaacgatttaaatccaaaggtttagtgaaaatatcagcaagttgcaactttatgtccaaaaattgcaattcaacatctcccttctcaacatgatccctcaaaaagtgaaagcgaatatcaatgcgctatgtgcgtgagtgtcgaacaggattcttagcaatgttaatagcactagtattatcacaaaagagaggcactttctcaagagtaagaccataatctttcaaagtagataaaagccaaataatctgtgaacaacaactagcagcaacaatatattcagattcagcagttgattgagcaacactagattgtttcctagaagaccatgcaatcaatgatgtaccaagaaaatgacatgttctactagtacttttcctatcaattctacaaccaccaaaatcagcatcggaatatccacttaagcatatagaagatgaagtagaataccaaattccaaattccaaactcaagtgtatgattcaaatacctcattatacgcttgaccgcttgacgatgtgaagcacgaggagaagcttgaaagcgtgcacacaaacacacagcaaattgtatgtctggcctagaagcagatagcatacaacaaagatccaatcatac

SEQ ID NO: 24750 - DNA, 1249 bp, Oryza sativa
tccttctgatgctgtttgaagcgaatacggtcttctgcttggtatcgccctcctgaggttgattgccctttgctcggcctggagtaggtcggggagagacacaacttcttccatcgacgacaattctttgctaaggccgtcggtgcagagaatggttggtgctgaaggtattattgctatgtccatcgacccccgacttcatccatctccaatccgtgtacttttgtttatgactagactgagccacaaactaagccttacccactagacatgtggaagtacggtagtgctttgcaacagaggcccgaagaccggtccttaaacggccgaggtgctactatcaaaaccatgcaccccgagcccagcctaaaaccaatttaggggattttgaatagagggggcggtgtgaagccaattccacaataaaccaacaattccagagtatccaggtgatatgaatatttcccaaagtctatagttgtaaaaccacctaaggttacctaattagattgcgaagcatctacctaaaattgtactagggataccatgagtagagtgtccactagttgaggttttgtttgtctagggtgaacaaggtagtaataataacaataacaataataatatggtcataacaaaggtaaataggcatggctaagtaaaacagtgataacgcgggaatttaaataaagcgataatgcaataatttaaatcaacataattttataaaatgggattcaatatgatcaagatgatgtgtcttgccttgctcgttttcccaatcgacggcttcgacttccacgaagagcggatcttccgaagctgcagcgtctacacgaccaacggaaaagaaaaaggctttaacactaaataactccacataacagcagaaacaaagcacaaaaatgggttctttacatcttaaggaaaaattagagacttgaacggtccaattccgagttcaaatggccaagatatggccatttgaagtttatatgctctttaaatggatatttgcgaatttcttcatttaaattttaattaaaaatcccatttattgcgtcagccgagggaggggacgcgcggaccgggtccatgggggtgggggcccacgcgtcagccgctcggtccacggtggaccgggcgcacgcggctggcggcggtcggcgccgtgggtcccgcgcgtcagcctcacccgcgggcgcgggcggctggcggccgggcccacttggcagccgcgagggcgcgc

SEQ ID NO: 24751 - DNA, 8327 bp, Oryza sativa
caaagtatttaatgaaattttatctggcccaattttatattggaatttattaattaaacttagatcttctcttcaagacttttaaaattatttctagaaattccaattaaacaacaatttatatattttgaattttcagggtgtgacagtcgccttcaaacttaaaatctgagaaacttcttgtgtaaaacttgggttttacaaaagacttggaaaacccgacacctgggtcggtgcttgcgaactaaatgaatttccaaaatcgcggaccgaggaacgtaccgggtgtacggtttcccgctcttgcacttaaggaccgtttccttggaatttcatccgaacataagacaagtacgaccacatgggtggaatgggacacccctggctgagtaactagcttatcgggggagccatgatgccaagagacatgtggattcgccggggtggtgtcggggaggacctctgggcttcctggcacagtatggtctgggacctaatctggtgttggtctaggacccctctcgttggcatatggtgaacctgtgttggctttcgaaatgccttgtcatgaaagccttaaggtctctagtcgtggccgttctgcacgggctggatgatccgggttagtaatgtcgtgtgggtaaagtgtacccccctctgcagaggttattaaaactgttcgaatagccgtgcccacggtcatgggcggatgtgaggtgattcctagcgtagtttttgtttgactactgccttgtgaaatttgctgttgtggaatgggtttgatgtttggaaaatctgcggctgatgggatcagccaggcctgggtggccgtttgaaagctgttggccgggtgccaatcttgatcaattcaaaagattgaatcattgcacatactccgaccggacgagacgcactgtctcatccgtgtcgtttgagaagcactcccttagttgtttcagaaaagagtttaaataaaatcaatcgcaaaaacaacggtctttctttgaagcttgcattaaacacttatttcccatggcttgctgagtactcctgtactcacccttgctctatataaataatccccccccagttgctgaagaagatgaagcggatcccgctgacgaggagttcttccaggagcaaaccggctacgatgagttttagggtttcggcctagttcccaagtcgcgcctgtgatgtttggtccaagtcttggcttccgcttcccttttgtaatgcagttgtgagctcgagatctgtccgcagcccaacatgactgtactcctactctataataaagagacctctgttgctgtgatattccgtcttcctgtgataccagcactgtttcctgggactggtatcggttaacaggttaatttggagcgtcacgggctagttccgctcgggactagttcggggcgtgacaagagatggtatcagagcacaggcttggccctagggcgaaacccaacgtttaggacgaccctaaggatactaagttcaaaactacttgcgaaaagctaaggcttcttttggtttccttattttcaatagtttgttgctaaaatggttactgatcttctctccctctttcaaaattgtagatggcagtgaacgccagcttcagttcccacggttttggtgagggtcaccacgtcgctcagcttcgtgacctcgcccgcttccttggcttctcgtgtcccgagtacacggggtactccgtggaccgtgttccccctcgctgtgagctctctgtgtacctttatcctcgtggaggtatacacggagctggcctttgcccacaccacttcactgtggccaggcccaccctccagatcgtgtaccaggacctctcctggactgcgctacgtcgcttggcccacgactacagccaccgtctcgggggctctgccttccggcagtttccacgccttccttctggccacgcagatgctaggtacccttgtccgtacagcgagtctcagccagtgctgactcgcatggttgagctttcggaggctcaggccactcagcacgacctactccttgaggcttaccgctcccttgcccgccgctacaccgctctggaggcccgttaggccgaggagggtgtcacctcagttgacactgtctcttgggactcaggctgcctctgccacgccagccacttgtcctcccacagctctcgcggctcagctcgcactcctagtggcgcgcgctcccccagctcgcgtgcgccgtactcaccagtgtactccccctacagacacccagttagcccatcctacacccccggacacaccccagttgcttcctcccgccgtggcccacgctttatccgcactgcgcggaagcgtgttgttggttcttccaccatgttccgcttcgactacccaactcccccaccgccagcggcccgtgccgctgccggccctcgacaggttccgccggtcccttcgcgtcagccgatcgacgtttcttcgactaaggagccgactacaggaggcagccaggtagacgaggagtggaggaggcagtcttcagcagccgcccgtgtgctaggccctttttttccgccgccaactcttttggagtcgtggcgaggtagggcgtgcgtgtgtttgatgtgggtgttgtttggtagtctggttctcctaggtggtgtgcgtacagtcaagctcggcgtagctctgtgacttgtccacacccgttgtattaggtgtttttatgatttggagaatccagtttatgcctagtgtgtgctatctgagttgttatttactttgctgcttgccctcctaagtgcttatctgattcttacctcgccctcttcggggagtttagatggctaaccgcccccgccgtgctgctcatgcaccagcccgcttcggttttgaggaaggtagagttgggccagaagcaaatcatgagtcggctaatgagcagtctcaccatagcaaccgttcacaccatactgcttcccgcaatgcagaaattgagcaaccccaccgcagcgatcgctcgcatcacacagcttcccgtattgcagaagtggaatagtctcaccgctcttaccgcactgccagtcacaattctggagaagaacgcatcccttccccacctcgtgtggaaaacaacatgcagcacttaatagcagtacagacacaaatcttgcaaggattagccgcagccatagccggttttcatcataatgcgcatggaaatggccaccctcacatgagcaacaatagatccaagctgacagactttctgaggtctcgttcgccagagttctctcagactgtcgagcccattgaggctgacgattggctgaaggatgttgatagaaaactcaacttagtgtagtgtactcctgttgagaagacgctctacgcctctcaccagctaagaggacctgctgcagattggtgtgagaattactgcaatgcacaccctgaacccactaacattgcttgggatgagtttgctacggctttccgtgcaactcatgtgcctgaaagcaccattgatatgaagaaagaggaatttaacaggcttaagcaaggcaacaacagtgtcaatgagtacctaagtcagttcaacaagttggctcggtacgcccctgaggaagtggacacagacaagaagaagatcaggaagttcttgaaagggatcgcggttggaatgagactccagttgcttgctcctgacttccccacttttcaacatatgatcaaaaaggcacttctacttaaggatgccagaaaagaggctaccgaagaatacaagaaacgcaagtctaaccatcagggaaattcttcccgagacgcacctcgccctcgctatggtcaacccatgcaatatcaccaatcggtcactcaggctaaccgccagccaagctacgcccctcgtcctcagatgaaccgtccggcacctcagccacagcagcgtgcccctagtggcaatactgcgccaaacagtgttacctctttcaagtcactgctaggaccgtcagcaattcagtgtttccggtgcaaccagatgggtcactatgccagacagtaccctcaaaatcctaccaacaccaactcagggcatgctaatggcagcactgccagaactcctactccagcggcagctcagtctcctcctagctctcaggcaagcggacaaggttctcgtgcttccaacaattttggtcgaggccgggtgaaccacattcaagctgagaccgctcagaacgctccagacgtcgtgatgggtatgttctctgtcaactccgtacccgcaatagttctgtttgattcaggagcttcccattctttcatatcacaagcttttgtgaaaagaaatggttggaaaacccaaaatttacgtgtaccaatgatagtacattcccctgggaggaatataagggcaactcaaatatgcccggaagttaaccttagaattgaggaagttgacttcctagccaaaccgatagtcctagactcgcaaagcttggacatcatcctagggatggattggttggctaagaacaaaggacaaatagattgtgccgaaaagtccatcaccttgcaaggacctggaggaaagcaagtccgctttacctctaacacccctaccgcaagtcggtctaacctaacctgtttacaagtcacctccttggagtcggtgcccatagtctgtgaatatcccgacgtatttccagaagaattaacgagtatgccaccagaccgagagattgagttcgccatagaactggcaccaggcaccgcaccaattgcaaaaagaccctaccgaatggcagctaatgagttagcagaagtcaaaagacaaatcgaagaattggagagtaaaggttatgtgcgacctagctcatccccttggggagccccagtgcttctggttaagaaaaaggatggctctgagagaatggtaatcgactatagagccctgaatgaagtaactataaagaacaagtacccattgccacggatcgacgatctgttcgatcaacttaaagggtcaagagttttctctaaaattgacttgagatcaggttaccaccaattgaaaatcagatctgaagatatcccaaagaccgctttctcaacgcgttatggtctatatgagttcacggtgatgtccttcggactcaccaatgctccagcattcttcatgaacttaatgaacaaaatcttcatggaatacctggaccagtttgtcgtggtgttcatcgatgacatcctgatatactccaagaatgaggaagaacatgctgaacacctgaggctgataatggaaaagctcagggatcatcaactattcgctaaattctcgaaatgcgaattctggttagaccgagtagcatttcttggacacgtgatctcctccagcggtgtcgaagtagatcccagcaaggttgaggctgtacttgcttggaacccgcccaagaatgtgtcagagatccgcagcttccttggcttagctggatattatcgaagattcattgaaggattctctaagctagccagacctatgaccgagttgttaaagaaggaaaagaaatttcaatggtctacagcctgtgaagacagctttcaagaaataaagaaaaggttgaccactgccccagttctcaccttgccagatatccgaaaagatttcgagatcttctgtgatgcatcaagacaaggcttaggatgtgtcctaatgcaagaacaaaaggttgtggcttatgcatccaggcagctcaggcctcatgaagtcaactatcccacccatgatctcgagttggcagccgtggttcatgctcttaagatctggaggcactatttaatcgggaacagatgtgaagtatacaccgatcacaaaagtcttaagtatatcttcacacagaccgagttaaatatgaggcagagaagatagttggaactaatcaaggattacgatcttggaattcattaccatcccggtaaagctaatgtggtcgctgatgcgctaagtcgcaagacctattgcaatgtagctcaaatatggcctgaccaagatcgcttgtgcagagaattggagaagttaaggctgaccgtggtacagtcaggtgtccctgccagcttgacagtgcagcctaccctagaatcgcaaatccgggaagctcagaaagatgaaaaagggataaaagaattaataaaaagaatacagaagaagaagggcaccgatttctccatagatgatcaaggcacagtttggtgtggtccacgcatctgtgtaccggccaagaaggagttaagagatctcatcctaaaggaagctcatgagtccgcctactccattcatccaggaagtacgaagatgtaccaggatatcaaggcatacttctggtgggctggaatgaagcgagatgtcgcagaatacgtagccctgtgtgacatttgccaaagagtcaaggcagagcatcagaggccagcgggtctgctgcaacccctaccgattcccgagtggaaatgggaagagatcggaatggatttcatcactggtttgccaagaacccctagcgggtacgactttatctgggtaatcgtggatcgactcacgaaatcagctcatttcgtgccagtgaaaaccacctttgatggaaagaaactagcagaactctacatgacccatgtcatatgtagatttggctatcccaagaagattgtgtcagaccgaggcactcagttcacctcaaggttctggaagcagttgcatgaagctctcggaaccgatctaaattttagtacagcttaccatccgcagaccgatggtcagacagaaagggtaaaccaaatcctagaagacatgctacgtgcgtgtgccctggatttcgaaagcacttgggatcattgtttgccttatgctgagttctcatacaacaacagttatcaggccagcattcagatgtcgccgaatgaggcaatgttcggaagaaagtgccgcactaccttgtgctggaatgaggtgggcgaagcactggtattcggtcctgacatgctcaaggcagcagaagaacaagttaagctgatccgagaacgtttaaagacagcgcagaaccgtcaaaagaattacgctgacaatcggagatcatgtgtacctgcgggtatcgcctctccgtggtatgaggaggtttgggatgtctggcaagttagcaccccgctacatcggcccctacctcacaaccgccagacgtggcgaagtggcttatcagtttgagttacctgaaggtctcacagatgtgcacaacgtgttccacgtatcccagttaaagaaatgtctttgagttccagaagaacaagttcccctgggtaatatcgagctagaaaagaatctgacctacaaggaaagaccgatcaaggttcttgaagaggtagaacgtcagacccgaaggaagactatcaagttctacaaggtccaatggagcaatcattctgaagatgaggcaacctgggagcgagaagatcttctccacgctgagttcccggagctgctcccttaggtactgaatctcggggtcgagattcttgttaggggggttggtctgtagcgcctgttctgtcgtggcgcctagcgggaaaactatctcttaaaaaccttatttgcgaaatccgtttctttgcttgttgtctagtgtccgtgccatctcagatctcaaatccccgatctatcgtcgaattcaatcccgaatccaaatccttcccaaatcaaatccctctgcaaaagtctattttgcctccctcgggtttgatgggccgaactcctctcggcccatctccccctccctccccggctctctctctctctctctccctctcccccgctctgcccgtgcgctgcgcacgcgtgcgtgtgagccgcgccgagccgagcgccctccgccctcgctgccgcttctcgccgcgccgcccgttgcttcccgcgcgcgcgcgccatggtggccgaccgcctggtcgccgccaccgtcagcgcctgcccgcgctagccgcccgtgtcgtcgctccgctccaaaccgccccgccgtcatcgccgtcatcatcgactcggccccgtctctccccgcgctagcctccaagggacggaggcagagctcctcctccctctgccgcgtcgccccatcccctcctccttttcccaaagtggcaaggggcaagccccctttcttccttcctttttccttttcccctcgccgccggcgtcatccgcctctgtcgccgttttggccgcgagcgccgagcgccagctcgcgccttgaccgcccaaggtcggtttccaaccgacatcatcgt

SEQ ID NO: 24752 - DNA, 2834 bp, Oryza sativa
tagcatgtgtagccccccagtagctagccggcgccgccctgactgctgccgtcgctcgccgtgtgctcgccgccgtcaccgcccgagctcggaagcgcctctcgtcgccggcctccctcgatgcgattcctcctaatccggcgcaaggggtggattcccgtagccgcgtagatgctctcaccgccgagaatcggcccctcgtgacctcgtcgccgtttcccccttttctctccaccggttgccgccgccgcaatccgccgccgtcgagcatcccccggcgaatccgagccattggctcgtctccccttgtcctgcgcaacatcccggtgtgctcgccttcgcctgtatcgccatggtttgctccgccgcttgccgctgtcgaccgccgtccgttccagccggcgtcgtcgtctacctcccgccggcccgcgtggcagccacgtaggcgccacgtcggcgccacctcagccgcgaccgggtcaagtagaccccggtccgccgcttccctccgcaccgcgtcctccgcgaaccgcgcgcatgcgccgcgcctccctccccaaaccctagcacgccccgcgtgcacctcgctcacggtgagccgagtcgtcgacaagcgggtcccacccgggaccacgcgggatggacccgacccactggctctctctctcccctccccgcccgagccgccccattctctcgggccgcgccctcaaatctcgagatgtatctaatggcacgcttagaggtcaataataaggctttattttcgccatttgctgagttgtcccgtttcgcgtgtagtttcggagcccgaagacccgcagtgcgaggatttcgaggatcaagctcaagatctcgagcgaggcaagccacctttgaacatcttgagcctatatttgaacttaattatattgcttgaaaaatattatgcattgataggatcgcacttaatctgcttgtcccgtctgcaaggcagattggcggacctacctaatttgttgcatttgacccttccattgtaattattataccatgttcccttgtatccacctagttgcgcctcggtaatcgtgcactcggcacgggtatcgacggtcgccttcaaacttaaaatctgagaaacttcttgtgtaaaacttgggttttacaaaagacttggaaaacccgacacctgggtcggtgcttgcgaactaaatgaatttccaaaatcgcggaccgaggaacgtaccgggtgtacggtttcccgctcttgcacttaaggaccgtttccttggaatttcatccgaacataagacaagtacgaccacatgggtggaatgggacacccctggctgagtaactagcttatcgggggagccatgatgccaagagacatgtggattcgccggggtggtgtcggggaggacctctgggcttcctggcacagtatggtctgggacctaatctggtgttggtctaggacccctctcgttggcatatggtgaacctgtgttggctttcgaaatgccttgtcatgaaagccttaaggtctctagtcgtggccgttctgcacgggctggatgatccgggttagtaatgtcgtgtgggtaaagtgtacccccctctgcagaggttattaaaactgttcgaatagccgtgcccacggtcatgggcggatgtgaggtgattcctagcgtagtttttgtttgactactgccttgtgaaatttgctgttgtggaatgggtttgatgtttggaaaatctgcggctgatgggatcagccaggcctgggtggccgtttgaaagctgttggccgggtgccaatcttgatcaattcaaaagattgaatcattgcacatactccgaccggacgagacgcactgtctcatccgtgtcgtttgagaagcactcccttagttgtttcagaaaagagtttaaataaaatcaatcgcaaaaacaacagcctttctttgaagcctgcattaaacacttatttcccatggcttgctgagtactcctgtactcacccttgctctatataaataatccccccccccagttgctgaagaagatgaagcggatcccgctgatgaggagttcttccaggagcaagccggctacgataagttttagggtttcggcctagttcccaagtcgcgcctgtgatgtttggtccaagtcttggcttccgcttcccttttgtaatgcagttgtgagctcgggatctgtccgcagcccaacatgactgtactcctactctataataaagagacctctgttgctgtgatattccgtcttcctatgataccagcactgtttcctgggactggtatcggttaacaggttaatttggagcgtcacgggctagttccgcccgggactagttcggggcgtgacaagcactccttacaaaattttgactaaagtcgaaaccctaactcaaaactcaactcaattgctctctaaaaacgatactggaaagccttacgctccccctctatttatacccgaggtaagcagcttaaagccacgaaccaaactcatactaagagtcctaaacaccttaggaaaccctctagtacaagaaagaaactttacataaccaatcgtaccaaatttggactccttccaaattcgactccgcatcccacacgcacacaatacctccatcgtatgccatatagaatctccatcaaccacgtgcatcaactctagcctaagtatcccgcatgatctctgaccaccacggacgtcgtcttatccccaagccgactcccggtccatcaccgcaaatactcttccgaggcatcgagtcacctacacatgaaataaacaaagaaaccatattccgagac

SEQ ID NO: 24753 - DNA, 1937 bp, Oryza sativa
taccctcgaaatcgacggagatcggtctgaccgagattgatctggatcgaagcgtagccgccggtctgaccggtgttgaatctctggtctgaccgccgaaatcacctgccgcgcctgctgccgtcgctggtctgaccgcccgtatgccaccggtctgaccgccgcttgccgccggtctgaccgcctgtatatcgccggttagaccgtcgaaacccggtgaaacacaaatcgaagaactcttaaagtagatgacgactttattgattctctctgtgtttacaaagtgcaccaacagcactccttataaaatttcgactaaactcgaaaccctaactcaaaactcaactcaattgctctccaaaaacgataccggaaagcctcacgctctccctctatttatacccgaggtaggcagcctaaagccacgaaccaaactcatactaagagtcctaaacaccttaggaaaccctctagtacaagaaagaaactttacataaccaatcgtaccaaatttggactccttccaaattcgactccgcatcccatacacatacaatacctccatcgtatgccatatagaatctccatcaaccacgtgcatcaactctagcctaggtatctcgcatgatctctgaccaccacggacgtcgtcttgtccccaagccgactcccggtccatcaccgcaaatactctcccgaggcatcgagtcacctacacattaaataaacaaagaaaccatattccgagaccaagctttctccaacttgactcattagtagcaaacaacagtattatatacgtaaggtatccatctagaagtcataatcacgaaataatcacggatatccaaacaaacaacccgaaaccgaaactgacacagagtcagccggtcagaccgcgggctgcgccggtccgaccgctcgatcaccgccggtctgaccggcatacacagtccagtttgaccggtcacataaaatgatagaatcctgcgatcacctgtgaattcaatcatctccaaaaccacttcatgaataaattccaaataacaaaaccaataatctccgatgcccaattgttcatcacagaataataatcaaaaacacctttgattttacaatctcctccttgatgaacacattggcaaacccatcaaaaatgttttggtgttcggaaaaataaaaacaaaagtggtaaaaagcacacttcgtacaaacgtatacatcgtgctcgaaaaatccaaaagaaaacttctcccccttttcaaaagaaagaaattctcaattgaaccaaaaacatgctcttctcaacaactctcctaaaattcaccttgcttctccaacaatccaaaaattttcatattacttatcccccttttgacaatgatttcatcatgcatagaaattatgttcattaatgttcaagagcttagcatatatatagcatatcaagtcatgtgttgcaataaaaagaagatgaacccatctataatataacatgcatgcattaaagtataaccatgaatcaaagattttacaattaagcttgaatcaacaatcaaaattcatgatttcatacgatttataataaacactaaacacatatacttattgcatttatcactctttctcaaataaactttagcacaaaataaccaagagaaaaatttttttcaactttttcttttcttgagcctttttgctcatatttttctcttttattccgggtacgtccctgtcgtcaagtctgtttctagggattcggcacccattattttgctcacatcgaatacgtcattgtcgtcaagactgtttccaaggattcggtattcattttttcatattttttattctcttttcacaataagcaattaaagctatttgaggaataacaagtcaataaagcatatatataaagcatttatagatcaaaccatatg

SEQ ID NO: 24754 - DNA, 2874 bp, Oryza sativa
tatcatccacataaatctgaacgaacagttgattatcaccatgcttaagaacaaaaagcattttgtcaacctttcccattgtaaaacctttcgtaagaaaaaagttcttaagcctatcataccatgccctaggagcttctttcaaaccatacaaagctttagacaatttaaaaacatggttgggaaaatcaggattttcaaaacctggtggttgtttgacataaactttctcctgtataaaaccatttagaaaagcacttttcacatccatttgatacaatttaaaaccttttgaagcagcaaaagacaacaaaagtctaattgcctcaactctagcaacaggagcaaaagtttcatcaaaatccaaaccctccacctgggtaaaaccttgagcaacaagtctagctttatttctcacaatcaaaccatcctcattttgtttatttttgaaaacccacttggttccaataatattaagtccagaaggtggttcaactaaagtccaaactttgtttctctcaaaattttcaagttcttcatgcatggcgataatccacgattcatcagttaatgcatgtggcacatctttgggttcaaaagaagcaacaaatgcagaatttgcacaaacatcatgagtcgttaccttagaccttattgtccgctcacctatattaccaataatttgttccggcggatgtcgtcgttgaatgtgtaaaggagcaacaacttctgaagttgatccacgttctgtatcagtactagttgaagttgaattctctggaggaccatctcgatcagcatcaacagtacccgaacccgatgaccctagccggtctgaccgctcctcatgagccggtctgaccgctcctcatgagccggtctgaccggaggtgtgccggcggtctgaccggcctggcgcccggtttgaccggccgagccgacctcgtcatcgttgttgtcgtcgctcttgtcttcaaaaatacgaccatcctccctctgaacctgtgacaatgtacctgcaatatcggatttagtacctggactagcctcatcaaaagaaacttcgcaagtctcaacgattttgttagtctccaaaataagtacacggtaaccacgagtatgagcagggtaaccaagaaacaatacatcggtagaacgtgcctcaaacttatccaaatttccagatttcaagacaaagcatttgcaaccaaaaacacgcaaatgtgaaactttgggtttatgtccaaaccgaagttcataagaagtttttccaagtttagatctcaagaaaactcgatttgaaatataacaagcagtgttaatcgcctcagcccaaaattttctaggagttttatactcatctagccatctcaaccaaaacacgatttttcctttcaacaacaccgttttgttgtggaacacgaggagaagaaaattcatgttcaagacctctttcattgcaaaactgttcaaaagaagcatttttaaactcaccaccattatcacttcgaattcttttcaaagaaccaggaaattcaagatccaatcgaagaaacaaaccacgaaagtgttgaaaagcttcgtccttagttgccataaagaaaacccaagaatatcgagaaaaatcatcaacaataaccaacacataccacttacctccaacagattgcatgtcgcgaccgggaaaattgcctttttccgaacgctagtgtattaatccccgtcccaggaaaagccggggtacaccatacaaacatgatataaaagacacatctttattatatcgataatatttacattattacaaaggcacttaaggcctgacaatcaaaaataaacagcagcggactagcgggcctacggctccatcttcacaggcgctcaactggggtataagccaagactccacctaagacttcttctccaaagcttctcttactgaaggggggagaaagatagagcaagaatgagtacaaccacagtactcagcaagccacaccggcggatgcacgattaatgcaagggggtacaaggggtaatgatataggggttaagttttgcagtaaacagcatttaaaagtcacttagttgcccaaagccattttataaagacgatcctagagctacacagtattattaatcaaggccgtgaacccacacgaacctgccttaacccaaggcctacgatgattcagaccgaactggcaacccgaccctgggtcccagctcatcccaagccaacccaggccaaccattccacattttagttgttaagcaaattttaagaattaaaacactgacttgggtacattgctcggcttgcccacaaccgagggagaagacggcgcggccggacggtgctccggcgaggagggagaggcggctggaggcggccggcgcggaggaaagagaagggcgacggcgggaacgcgcctccggcggtcaccgcgcgaaacggagggcaggccggggtggaggaggtggcggcgacgctggaggaggcgacggcgcggccggccggcgcacggtcgaggcggcacaggcggctggaggcggccggcggcgtgggagagagaggagggcggcggggagatggctagggaccacggggaggctcgggagggggctaaaacgagagaacgggggatgaggatcccattttatatgagagaagagggagccggccacgggggaggtcggaacggcggcgggaatggcggccgacggccatggaaagcggtcggacttggcgcgtccgttcccggggattgaaggcacgaatcaagggggaatttgggggcaattgaagaggattcattggggattaaaacccccaattaatttggaatggccattgaatcaagcggattggag

SEQ ID NO: 24755 - DNA, 8280 bp, Oryza sativa
attccacattttagttcttaagcaaattttaagaattaaaacactgacttgggtacattgctcggcttgcccataaccgagggcgcggctattcgaatagattatactctgatcagaggtgtacatctttacccacaagacacatcttcctcacgtgtaaccacgtgccacataccaccacggtatacggacggaagacgtgacatagttcccaacccatcctagccataaacaagagtaccgacccaatcctacctacggccggaacccccgggacaggcaggcaggattgagctccctagcagcaggacaccagccctgtgccatgacatctcgactaccgggccgcagctcgtgtagccttcatttgtcctagagaatgtccatcgacccccgacttcatccatctccaatccgtgtacttttgtttataaccagactgagccacaaactaagccttacccactagacatgtggaagtacggtagtgctttgcaacagaggcccgagcttaatccttatagtggccggggtgctacttcccacaactggcatgcacccaaaccccaccgaaaaacaggttttaggggctttgaaagaggaagagaggggtatgtccaattccaccataagccaaccattccatagtatccaaatgatatgagatttcccaaagtctaaagttataaaaccacctaatgttgcctaattatccagcgaagcatctacctaagttcatactagtggaaccataaatagagtacccactagttggggttttattttcctagggtgaacaaggtaataataacaatagcaacaataataaggtcataacaaaggtaaataggcatggctaaataaaacagtgataacgcgggaatttaaataaagcgataatgcattaatttaaatcaaaataattttataaactgggattcaatatgctcaaggatgatgtgacttgccttgctcagagagaacggccttccgaaccttcggcgacgaccacgaaccacgctttgggaacctccggaacgatgaaagctacgcgaagcacacaagcaaagctacaagcctataaagaagcaataacaatacataaaaacaaagcacagggttctttaggttataacaaacattaagagacttgaacggatcgattcggagttcgtatgaccaagatatgatcatccgaagtttaatgctgttatatggggatttgcggattattataattaagctttgcaactataaaacatgtgtaagcgctagcctggaaaagacaggaaggctgcgccgttgacatgcggaccccacatgtcaacctaaaggaccgcggtagaccgagtacacagaggcggtccccgggtcgacggaagcagaccccgtgtgtcaaccgaggcgagtggccgacaaacggactccattaaacaacacacggcctgcacacgtggaaaccacgcggctaccgagcgggcacactaacacggacactacacggtcaccacccgcacgcgtgaacgactaccgacaccggtacacgggtaccggggtcgacgaccgcacaactggtacggggcgacaccggaagaacaaggacggggcagcgagaggggagaccttaccaccactcgacgaggcgagggaacgacaacgacgaacgggcgcggcggaggcggccgggaactacggagacgaacggcgaggggacgacttcggcggcgatcctaggacgaaggcgagacgcggccggcacgaggcttgacgacgcggagccgtggacgaagacgaggacggggctgcagcggctcgcttgacgaacgcggacgacggacgagaacggctcgacggagggacgaacgccacgacgaccgggaacgacgagaggacgacgacgacgacgacgaccgggaccggcgaggaggcgacgaggacagccggcagcggctgcacggggacgaggacggcgtggaacacgccgcagcgatgatgatgacggaggcggcgccgcgagacgacgagccgggcgaccgacgggacgtcgatcggcgaggacgaacggtgacgaggaaacgatgatggcaggcagcagcggctgagcggaggaggggacggcgtggaacgcgctgctgcgatgttggagaaggtggtggtgcagcggggcgacgagccgacgaggaggaatgggtggccgaaaggacgccggcgacgaagaggatggagaggccggcgcggcgacggcgttctggcgaaaccgaggagcagccggggtggagggcggcgtcgcggagccgagggaggtggtggcgatgtcggccggctcacgggaaacgcgacagtggcggccggaggtggaacagtggcggcaacgccactgttttgccggcgaggacgcgtctctggtgctttccccgcgaaacggagggctgaccgagggagaggaggtggctgcgaggccgagggagaagacggcgcggccggacggtgctccggcgaggagggagaggcggctggaggcggccggcgcggaggaaagagaagggcgacggcgggaacgcgcctccggcggtcaccgcgcgaaacggagggcaggccggggtggaggaggtggcggcgacgctggaggaggcgacggcgcggccggccggcgcacggtcgaggcggcacaggcggcttgtcgcgtcccaaatcgactctaaaattcaccctcgaaattgtgcaaaagaataagtaaaattcaatgaaagcctccaacaattaaaatgtgcaaagataaaagtcaaatgaggcttggaggatttttgtatatttcctaaaagcctaaaatgcttaaataaattttagtggaattttcagagcacaaataataattgaaaagaaataaacaaagtggaaaaggtttataaaaagaaaatcctaaaagaagtctgcttttcccccccctttttccctcttgggccggctcggcccattccctccctctccctctctctctctctccttccccgcggcccatcggcctccccgcgcgcgcgcgccgctgacaggcgggcccgcccgccgctctcgctgacgggtggggcccacctgtcatcttcctcctcccgccgcgcccgccgccagcgcccgtgccctagcgccgccgccgccgcggattccgccgcatcccgccttccccgcgcgccataatgaggggggaattattccccgcgtttccctctcccgattccccctcttttccctctctctctccctcggattcgttcgaatcaagcccgtaatcctcgccggcgtattcaatggagccgagatccccgcgcccgtttcctctctctccggccgctctttccttcccccggcgctataaaaacgttgcccgaactccgctctttcgtttccgccgcttgccgctcgctctcgccgtcggaatcgtgctagcgccgtgctcctctctctccgccgtcgccgtcgaccttcggttagccgccgccgtcgctccgctcttcttcccggctcggcgacccctccttcggcatcgccgcatcgccgccgaccccgtccgccgctccgcttcgcccgccgaccgccggagcaccgtcgtcatcatcttcccgaaccgcgccgccgtcttcctccgctccggccgccgttctcgtcgtcgtcgttgtcccggggtgagccaaggaccgccgttcgccttccccctttcctcctctctctcgggtgccactccgccgcgccgttggtcgccggcggcgaccatcggggcgcgggtgcacgccgctcccgtcggccgcgccggcgaggccgcccttgggcgcgccctcgcggctgccaagtgggcccggccgtcagccgcccgcgcccgcgggtgcggctgacgcgcgggacccacggcgccgacagccgccagccgcgtgcgcccggtccaccgtggaccgagcggctgacgcgtgggccccacttcccgtggacccggtccgcgcgcccgcccctcggctgacgcaataatccgtgtttttaattgaaaattaaatgaagaaattcgcaaatattcatttaaagagcatataaacttcaaatggccatatcttggccatttgaactcggaattggaccgttcaagtctctaatttttccttaagatgtaaagaacccatttttgtgctttgtttctgctgttatgtggagttatttagtgttaaagcctttttcttttccgttggtcgtgtagacgctgcagcttcggaagatccgctcttcgtggaagtcgaagccgtcgagtgggaaaacgagcaaggcaagacacatcatcttgatcatattgaatcccagtttataaaattatgttgatttaaattattgcattatcgctttatttaaattcccgcgttatcactgttttacttagccatgcctatttacctttgttatgaccatattattattgttattgttattattattaccttgttcgctctaggcaaacaaaacctcaactagtggactctctactcatgacaccactagtttaattttaggtagatgcttcgcaatctaattaggtaaccttaggtggttttataactttagacttgggaaatattcatatcacctggatactctggaatggttggcttatgttggaattggacacacacctctcttcctctttcaaaacccctaaaacctgttttcggtggggtttgggtgcatgccagttgtgggaagtagcaccccggccactataaggactaaagctcgggcctctgttgcaaagcactaccgtacttccacatgtctaatgggtaaggcttagtttgtggctcagtctagtcataaacaaaagtacacggattggagatggatgaagtcgggggtcgatggacattctccaggacaaatgaaggctacacgagctgcggcccggtagtcgagatgtcatacggcggagggttggtgcccaatgctaggggctcagttctgcctgcctgtcccgggtatcccggccgtaggcggaattgggtcggtactcttgtctaaggctaggatgggttgggaactatgtcacgtcttccgtccgtataccgtggtggtatgtggcacgtggttacacgtgaggaagatgtgtcttgtgggtaaagatgtacacctctgatcagagtataatctattcgaatagccgcgccctcggttatgggcaagccgagcaatgtacccaagtcagtgttttaattcttaaaatttgcttaacaaataaaatgtggaatggttggcctgggttggcttgggacgagctgggacccagggtcgggttgccagttcggtctgaatcatcgtaggccttgggttaaggcaggttcgtgtgggttcacgaccttgattaataatactgtgtagctctaggatcgtctttataaaatagctttgggcaaataagtgacttttaaatgctgtttactgcaaccctaaccccttatgttataattcctttgtactcccttgcaattattctgcatttgtgggtgtgtcttgttgagtacggtggttgtactcagtcttgctcaattttttccccaagcccagatgaggagttccttgaagatgaaggctttggtgtctagctcgtgcctgccgtcaagcgcctgtggtcgtcgccctagtcttccgctgtttctcgttgtctttgagtgtgctgggccttcgttgcccgtgtaataattttatttacgcttccgcttgttaaactctgaattgtatcaacttttggtgtaccttgcctcctgggacaaggaataatacacgcacgtcaggaatgcctgttgggtgatttccggtcgtgacacggctggaggcggccggcggcgtgggagagagaggagggcggcggggagatggctagggaccacggggaggctcgggagggggctaaaacgagagaacgggggatgaggatcccattttatatgagagaagagggagccggccacgggggaggtcggaacggcggcgggaatggcggccgacggccatggaaagcggccggacttggcgcgtccgttcccggggattgaagacacgaatcaagggggaatttgggggcaattgaagaggattcaatggggattaaaaccccccaattaattttggaattggccaattgaatcaagcggatttggaggagggagcgagctaggtttccgggagagagagagaggtggccgggcggctggaggagggagacgacgcgcctaacgcgtgggccccacgcggtcgggcgcgcggtcagcgcgcggcaacggcgcgcacgcgcgcgcacgcgcgcgcacgcgcgcgcacgtgcgcggcacgggcgggagggcgccgctcgggttgggctgggcggccggcccaggaggagaggagggggaggcggcttgcgccgggcaggccgggaggggggggagagacagcccgggagagagagggaggagggagctgggccgaggggaagggggcccaagaggagggagagaaggagagggagagaaagagagggaggaaagggagacttcggccgcgggccgaggggagagagggaggactttgggccagacttggcccaaaggaggaaggagggttatttttaggtttttctttttaataaactttgttaattgtttttgttgcttaataattatttccggtgctataaaaattcaagtaaaatttgagggctccttttagaccaaggagaatttaacaaaaattctccgggccacatttgaatttttcttgcacgtattttagtgtttgccaatttctttccgaattttaattaattctattattccttttagaaaatgatttttaattcgggatgaatttatcaggacgtgacattgcactcttgctggaccaacagtgtccatatgtaatagctgtctcggtgcatccgtcatcacagaaacaataggagtatatgaagaagcaaccatcttagcatgacgacacggtgtacaaaccaaatcaagatctttcttaagtttaggcaaaccacgaacaagatccaaaccacttaacctagtgagatgatcaaaaccaacatgttcaagtctaagatgccaaaacatcacatctttatcaaacctagcaaccaaacatgttataataggtgaaacaggattttcaaaatcagctttaaacacacttccatagcgagaaatattcaacacaaaatcaccacaagaatcaaaaactttacttccagttttcttaaagtgaacctcaaaattttcatcaacaatttgtgaaaccgaaagcaaattgtattttaagtcctcaaccaaagctacattcttcaattcaaaattttcatttaccttaaccaaacatgtaccgagaacggcacttgtagaaccatcaccaaagataatcgattcagtcttagatgcctttttgagagaggagaatcagtttttatcaccggtcatgtgctgcgaataaccggaatccacgagccacacgttctccttccttgccaccaaagcctacacacaagcagaagtcgaagcctcagtactggggttagatgataataaaaatttaggaaaccagtactgagacacacgaccagaagatccaataggcatatatccacgtgcaaaatcaattttagaattttcagaaaaattcctccgaggccggtctaaccgaggtacagtggccggtctgaccgcctctgtactgccggtctgaccggtcgccggtctaaccgcgggacccactgcggtctgaccggtttcctcgagggaaaactgtcacgtcctgataaattcatcccaaaataaaaatcatcttctaaaaggaataatagaattaattaaaattcgaaaagaaattggcaaacattaaaatacgtacaagaaaaattcaaatgtgacccggagaatttttgttaaattctccttggtctaaaaggagccctcaaattttagtggaattttcagagcacaaataataattgaaaagaaataaacaaagtgaaaaggttttataaaaagaaaatcctaaaagaagtctgtttcccccctttttttccctcttgggccggctcggcccattccctccctctccctctctctctctctcctcccccgcggcccatcggcctcccccgtgcgcgcgccgctgacaggcgggcccgcccgccgctctcgctgacgggtggggcccacctgtcatccccttcctcccgccgcgcccgccgccgcgcccgtgccctagcgccgccgccgc

SEQ ID NO: 24756 - DNA, 7018 bp, Oryza sativa
gccaaaaggtgcaccctggtccaagtcaggtgaagagaagattccatccgcaacaggaggtcaagccaagcagttccgagtggtaaagttttgctggaagttcgtcaagacgcaacggaagaagtcagacaagaagagaagaccgcccaacctatcctcttgctagcctcctcgaatctcggggacgagattcttgtaaggggggtggatttgtcacgtcctgataaattcatcccaaaataaaaatcatcttctaaaaggaataatagaattaattaaaattcgaaaagaaattggcaaacattaaaatacgtacaagaaaaattcaaatgtgacccggagaatttttgttaaattctccttggtctaaaaggagccctcaaattttagtggaattttcagagcacaaataataattgaaaagaaataaacaaagtgaaaaggttttataaaaagaaaatcctaaaagaagtctgtttcccccctttttttccctcttgggccggctcggcccattccctccctctccctctctctctctctcctcccccgcggcccatcggcctcccccgtgcgcgcgccgctgacaggcgggcccgcccgccgctctcgctgacgggtggggcccacctgtcatccccaaccccgcgccgcgcccgccgccgcgtccgtgccctagcgccgccgccgccgcgaatcccgccgctcccgtccaccccgcgtgcaatcaagaggggggaattaatccccgcgttcccctcccccgtttccccctctttcccctctctctctccctcggattcgttcgaatcaagcccgtaatcatcgccggcgcaatcaatggcggccgaaatctccgcggccggtttccttcctccccggccgccttctctcccttccgacgctataaaaacgttgcccgagctccgctctttcgtttccgccgctcgccgctcactctcgccgtcgaaatcgtgctcgcgccgtgctcctccctctccgccatcgccgccgagctccgttccgccgccgccgccgctccggacttcctcctactcggcgacccctccgtccgcttcgccgcgacgccgtcgatcccgtccgccgctccgcttcgcccgtcgaccgccggagcaccgtcgtcatcgtcatcccgagccgcgccgccgtcttcctccgctccgtccgccgtttccaccgccttcgccgtcttggggtgagccgtggaccgctccgttcgtttcccccttccctcctctctcttgggtgccgctccgccgcgccgttggtcgccggcggcgaccatcggggcgcgggcgcgctcctcccgtcggccgcgccggcgaggccgccctcgggcgcgccctcgcggctgccaagtgggcccggccgtcagccgcccgcgcccgcgggtgcggctgacgcgcgggacccacggcgccgaccgccgccagccgcgtgcgcccggtccaccgtggaccgagcggctgacgcgtgggccccacttcccgtggacccggtccgcgcgcccgcccctcggctgacgcaataatccgattttttttaattgaaaattaaatgaagaaattcgcaaatatccatttaaagagcatataaacttcaaatggccatatcttggccgtttgaactcggaattggaccgttcaagtctctaatttttccttaagaagtaaagaacccatttttgtgctttgtttatgctgttatttggagtttattagagtaaaagccttttcttttccgtcggtcgtgtagacgctgcagcttcggaagatccgctcttcgtggaagttgaagccggtgtttgggaaagcgagcaaggcaagtcacatcatccttgagcatattgaatcccagtttgtaaaattatgttgatttaaattattgcattatcgctttatttaaattcccgcgttatcactgttttatttagccatgcctatttacctttgttacgaccatattattattgttattgttattattattaccttgttcaccctagattaaacaaaaccccatctagtggacactctatttatggttccactagtttaaatttaggtagatgcttcgcaatttaattaggcaacattaggtggttttataattttagactttgggagttctcatatcttttggacaccatggaatggttggattatggtggaattggacatacacctctctttctctttcaaaacccctaaaacctgttttcggtggggtttgggtgcatgccagttatgggaagtagcaccccggccactataaggattaagctcgggcctctgttgcaaagcactaccgtacttccacatgtctaatgggtaaggcttagtttgtggctcagtctagtcataaacaaaagtacacggattggagatggatgaagtcgggcgtcgatggacattctccagggcaaatgaaggctacacgagctgcggcccggtagtcgagatgtcatacggcggagggttggtgcccaatgctaggggctcagttctgcctgcctgtcccgggtatcccggccgtaggtaggattgggtcggtactcttgtctaaggctaggatgggttggaaactatgtcacgtcttccgtccgtataccgtggtggtatgtggcacgtggcaacacgtgaggaagatgtgtcttgtgggtaaagatgtacacctctgatcagagtaaatctattcgaatagccgagccctcggatatgggcaagccgagcaatgtacccaagtcagtgttctaattcttaaaatttgctcaacactaaaatgtggaatggttggcctgggttggcttgggacgagctggaacccaggtcgggttgccagttcggtccaaatcatcgtaggccttgggttaaggcaggttcgtgagggttcacggccttgtttaataatactgtgtagctctaggatcgtctttacaaaatggctttgggcaactaagtgacttttaaatgctgtttactgcaaaacttaatccctatattattattcccttgtacctcccttgcattaattatgcatctccggtgtggcttgctgagtactgtggttgtactcattcttgctcaatccttcccctcttcagtaagagaagctttggagaagatgtcttaggtggagtcctggcttataccccagttgagcgcctgtgaagatggagccgtaggcccgctagtccgctgctgtttatttttgattgtcaggcctggagcgcctttgtaataatgtaaatactatcgatgtaataaagatgtgtcttttatatcatgtttgtgtggtgtaccccggcttttcctgggacggggattaatacactagcgttcgggaaaaggcaattttcccggtcgcgacaagctggtatcagagccatctcgactgtaggataagccaagtggataaaacctaaggacatattttataaatgaaactatttgcgaaagctcctctttttctccttcccctaatgctatttgcaaaaggtttactcccttcttccttcttcagatttcaactagtactagatggtcagctttgcgaagaagaagatgtcgtcaattgtttgccgaagctccagaagactgcaggatccgctagcgaagtggaggaagcagtgaagccagctgagaagcaggagtgaagatcttggagaacccgtcgcagaacctaagccgccctctagggtagagtcgttagtcgtgtgtttccttgtttgtgtgtgtagcgcgtggtttgcatcagtggggtgtgatgtaaccatgctaggttgtttgcttaatcaacttgcagaataagtgaaacaaacaacacatcagcaagaagagttagttcctttaaggtcctatccttagtttctaatctgtctctcccctttgttttccctctctccctctccaaacctttgcaacagatggctgacaatgagaagggcaataaggtcagaagtcaggacattggtacctcaagctcccgagtgaatgaagcaccagacaccagttgtgtagcagtggtccaacacctgattaaccagaacaaattgcttatagagatactacagcagcatcggatgccaattttgaacccgagtcggatgcaacctcaagtacagttggaggcagtccaagcactcacaccacaagtcagcgcaccgccaacatcccagaaggcccctcatgccatgccacatgttgacccaaaagaagcaagtatcatctgttttatgtgtgatgagcaagggcactacgcaaggaactgtcctcagcagaaaagaaaagcaccaatgcgaaccgaagatgaagtccgtaagatgatcattaccagcacagaatggcctccaccaggaatgaccagacgtcagagaagaaataccttccgaggtgcaccacagttgacagaacatcttttagctaatggaggtagagtgtctgatagtgaagattcagatcaagtctcctcagatgatgaagatgaaatggaacgtaaggcatgctctcgttgtggagaaatcggtcatgtcgccagctcatgtgccactatatgcgttcattgcgaggaagaccatccacccgacaggtgtccaacgagcaggatcacttgtttcttttgtgaaggaactgatcatgtaccaaaagattgtcaattcagttttctgctgacgaagaagatggctaaccaacccgccagttccaacggagagaagcatcaaggcaacaccaatcctcgccaagattacagttccagcctaactccagtgccaggacagaggaatcgaaatgagaaaagaaaatgccgagtccgggaagacatctgttgcttcaattgtcaaggaatgggtcatttcgccgacaagtgcccaaaaccgagaaacatagctgccggcacgacagtccacgcaactccctgcaatcagaagcttgctcctcaacgaattgtcatccatgcatcccgaagcagtcctatagcccgcgttgcaacagctccaattccaatgaatgcactaccacaaggtgtcaatgctcaatttcagccccagccaccagctgacaagacagaggccagtatctgcgttgtacctttggaagttccaatacagcagctgagaaatcaagtacaagatgaagaacccgagtgtaagaaagttattgtttgttacaactgcagtgaagaagggcattactccgaaaactgtccccaaccaaggcaaaatcgacctccacattaccgccaatttacacgaagcagacattccaatcgtattgtggtcactggagcaaacgccgtacccgtaaggcctcgtgataatcagaacccatagcagaaacaatgcaccaatgctcctcctgctgcacctgactcggcaataaatcatagcaaccattctctgcatcgacagcctcagcaaagaattgtcgtagatggaagaagttgtgtctctccccgacctactccaggccgagccaagggcaatcaacctccggagggcgatacccagcagaagaccgtcatccgcttcaaccagcaatcagaaggaagcttctcctgtgaatgatagcattatgcagtcctatcacatcatcacagaaccaatcaaggatgcagtcactagaacaatgccagctatatctctccggaatcaaaatgagcagccatgtttgtggttttcagttcgctacttatcatggtgtaatcgaaagtttgcagcaataatgcaatacataaatatattcatgtctataaacagtgagcttgctatgcttatggatgattcatgttgaggatacaatgtaccgatgttaagcaccgtccctttttgtttaaggcagtgcctcgtattcatgtaatgagggagaaatgtgtaatacagacaagttccatgaggattcttttggaagatgcgaatatgtgattatgtgtataattgcttactgataaaggagacctagggtctcatttcaaaggaactatgttctaacctcgagttaataaccaacctgttgatggaaaagaaaaccaattaaactgtgttgggttaaaaagccaatgagacagtagttggggaacaggagtttggatacgcctgttacagatcaagataaggattgttgaatgaaacccataagtgtacccgccatgcctctacattgataagttcggatatacctgcaaacagttaagaagatccaggagacatcaatattctagaacataatagtcgatggttggtaattagtcgatcaggtatcagaaaagggtcaaaggtgatatggcagaagaacaatatggatgctccccatctcgaggaagcactaaaccctagtggcatagatacagatagcaagcaatgtatttccctgaaggtagtcagtgcagctttttgacgaaccacatcaaggtttcactgaaaggcagcaagccaaaggacctcatcgtccccagaagcgtccgcaatccacattaaagaataccacctgttagagataagccgaaagatgattgataaaaagagattggcaaagatgttctctagcatgaaagaagtaggccgaaaggtgattgataaacagaaacatgctctgcatcgctcaaggaagacccctgattgtaattgccccgcaacagtcaccttgtcattaagtcagcaagatgacctaggtaaaagtgtttctatgaaggcaaagagtgaaatcttccactcggtatcagatgctacacggagtgaaaaatgcaagcaccggttaccaggcgacgccacgtcctgggagatgatccaacgggaaagaactcatcaaggttaaaggtgtaaaggaatacgttgagtgctaactgatgacaacatgaagagaatagcggaaagtaaactgaacataaagaaagtgaatctgagttgcttgttcgtgggagctattcccagttatgaaccaagtgatatgttcgaagatagtctgcagaggtcagtttaaaatcaaaagtaacagcgaagcct

SEQ ID NO: 24757 - DNA, 5525 bp, Oryza sativa
tgaaaagccttcctgagattctctatcttcctcccttgggatgaactcttcggctgttgttgttggtcttctcaccatctttgtcttctcttttgcctctcccaagcttaggacaatgcgaacgaagatgatcaattgaaccacgcattcaaagcaacgatttggaccacctcttttcatgttcctggcattattcatagctcgagaaattctgttagcaaccaaagccaaatcctcctcctcgatctgttcgagttgatcatcggatgtggcattaaaaacagcaagaaaataaggcttatatgaagaagcatgaacatccgaagaagaagaaaaagaaaccaaagcacttgacttagaatcaactttccgagaaagaacattcatctcatgtgttttcaattttgtataaagtgaatccaaagtcatccaaagcttctccaggtttcatctcaaatttaatgtactcctttttgaaaaatatcacgacgaagttctttaatgttattcgttccttgatgaaagttactcaaagcattccaaatttcatgagcagctcaaaaatgcgcaacacgatcataatccgaacgagaaataccactcaaaagaatgttgtgagctttgcaattttgttcaaaagcagttttttcagcagcagtattaatagcttcaggaatcacatagggacgagaaacttttctccaaatatcataaacatgaggcttagttgaaaacctagcaggagtagccatggcaaaaactctagatcgataaaaatccaaagaagaaaacaaggctctgataccacttgtaggatcgaatcacaataactaagccaaccagagggggggtgaatggttggtatacccaaaaaccataaacttttagcggaaataaaagttaccctcgaaatcgacggagatcggtttgaccgagattgatctgctggtctgaccgaagcgtagccgccggtctgaccggtgttgaatctccggtccgaccgccgcttgccgccggtatatcgccggttagaccgtcgaaacccggtgaaacacaaatcgaagaactcttaaagtagatgatgactttattgattctctctgtgtttgcaaagtgcaccaacagcactgtagcgcccgttccgtcgtggcgcttagcgggaaaactatctcttaaaaaccctatttgcgaaatccgtttctttgcttgttgtctagtgtccgtgccatctcagatctcaaatccccgatctatcgtcgagttcaatcccgaatccaaatccttcccaaatcaaatccctccgcaaaagtctattttgcctccctcgggttcgatgggccaaactcctctcggcccatctcctactccctccccggctctctctctctctctctctccctctcccccgctctgcccgtgcgctgcgcacgcgtgcgcatgagccgcgccgagccgagcgtcctccgccctcgctgccgcttctcgccgcgccgcccgttgcttcccgcgcgcgcgcgccatggtggccgaccgcctggtcgccgccgccgtcagcgcctgcccgcgccagccgcccgtgtcgtcgctccgctccaaaccgccccgccgtcatcgccgtcgtcatcgactcggccccgcctctccccgcgctagcctccaagggacggaggcagagctcctcctccctctgccgcgtcgccccatcccctcctccttttcccaaagtggcaaggggcaagccccctttctcccttcctttttccttttcccctccccgccggcgtcatccgcctctgtcgccgttttggccgcgagcgccgagcgccagctagcgccttgaccgcccaaggtcggtttccaaaccgacatcgtcgtcctataaaccaaggcgccctcccatccattcctcctcccgtttcgctcgccgccaccgcgccattgccgcccctctgtctcacctccgccgttcatcgccaagcaccgggagagccagtgcgttcgtggacgcggaaggggactccgggcgctcgccttcttcctcttccccggcccgaggccggagagatcactcccgtgccgtcggcctctcgtcacagcgccccgcctcatctcggtagtgcatctccccgttctccctcctcaatccatctcttccccttagttttcggtagtagcatgtgtagcccccccgtagctagacagcgccgccccgactgctgccgtcgctcgccgtgtgctcgccgccgttgccgcccgagctcggaagcgcctctcatcgccggcctccctcgatgcgattcctcctaatccggcgcaaggggtggattcccgtagccgcgtagatgctctcaccgccgggaatcggcccctcgtgaccttgtcgctgtttcccccttttctctccgccggttgccgccgccgtaatccgccgccgtcgaacatcccggtgtgctcgccttcgcctgtatcaccatggtttgctccgccgcttgccgctgtcgaccgccgtccgttccagccggcgtcgtcgtcttcctcccgccggcccgcgtggcagccacgtaggcgccacgtcggcgccacctcagccgcgaccgggtcaagtagaccccggtccgccgcttccctccgccccctcgcgggcgtggtccatcgcgagccgtgaggctccgcgtgggcccgccgcaccgcgtcctccgcgaaccgcgcgcatgcgccgcgcctccctccctaaaccctagcacgccccgcgtgcacctcgctcacggtgagccgagtcgccgacaagcgggtccaaccggggaccacgcgggatggacccggcccaccggctctctctctcccctccgcacccgagccgccccattctctcgggccgcgccctcaaatctcgagatctatctaatggcacgcttagaggtcaataataaggctttattttcgccgtttgctgagttgtcccgtttcgcgtgtagtttcggagcccgaagacccgcagtgcgaggatttcgaggatcaagctcaagatctcgagcgaggcaagccacctttgaacatcttgagcctatatttgaacttaattatattgtgtggatattatgggtaccccatacccatacggcatggttatccgactagtcataggggataacttatatctatggaatatgtaatagatcatgactcgggtattacgtttccttatatattacggaacagtctaaagtcctggtttgataatattgtaaagtagatttaggaaaccgataccgtattggttaaggtttctatcttgtaatcctgccccccaccctatataaggtgggcgggaggccctctagagggcatgacacaacctgatcgtcagatcaatacacactcggcggattcaaatccccaaacaggagtagggtattacctctcattgagagggcctgaacctgtctaaatcctttgtctctgcatccatccactttaggtctcgtacgctacccccttttattattgccgaattcatgtttcgacagttggcgcgccaggtaggggtaaacgccgagtttcctgacgacgagtgcgatggaatcaactttatgagtcgccggcttcgtcttcgctttgggagctccttgattcctcgccgccgacgacttcaacaagacgaatcgtcgctgctattctctgcctgatcttgttcgcatcagcacgacggcaacgacggggcaacgacagttcgacggatttgatggtcgtcctcgtccaccaccaagcctactggtccaatctacccaatgaggatgccatggtgttgcaagatggatctacaaacacgaagcatgccaaaaccaatctaatcggatgcataggagacggctgcagccacgccgatgccttcctgccgtccagcgtcgtgctgatggacaccaacgccgctcgcgactgcgacctccgcctcctccgctccgtttcggagtcagtcgaagagatcaatctcggcgagttttttccttttaatttccgacttcgccgggttttttccttttcaacttattgttgtttattagattgatctctaaatgtcagattaatctctcttggtattttctgctgtttgcatgtaacgccgcggcactactcttgccgactggtgtttccgtctgcatggctggcctattatgccgccgctgttgggcgtctacgacttcaccgccggcctgcctccgtcgccgccgagtggtgcctccgcctacacggctggcctattatgccgccgctgttgggcgtctacgacttcaccgccggcctgcctccgtcgccgccgattggtgcctccgcctacacggctggcctattatgccgccgctgttgggcgtctacgacttcaccaccggcctgcctccatcgccgccgactggtgcctccgcctacacggtcggttggtcacaccaccgttgatgggcatcgtcatcttcaccgccggcctgcctccgtcgccgccgattggtgcctccacctacacggctggcctattatgccgccgctgttgggcgtctacgacttcaccgccggcctgcctccgttgccgccgagtggtgcctccgtctgcatggctggcctattaagccgccgctgttgggcgtctacgacttcaccaccggcctgcctccgtcgccgccgactggtgtccccgcctatacggtcggttggtcacaccaccgttgatgggcatcgtcatcttcaccgccggcctgccttcgtcgccgccgactggtgtcttcattgttattgatggacgactttgttcccacattggccacttctgccatcaccaaggggaatattacaaagctaagtcatcatttattttattctttatatgatatttttccttttcctctgcctcactacaccaattggtcttgcattgagtagtgagtcgggggctacagatgttatatcatattttttataatatttatcttgattgcttgcgacataatctgagtacaaaagtacctatcgagttatggagttctatcttcctctgctttccgtttggtttgccaatggatggttgcctttgggccgattcctagcacccgggggctcgttggatggaccgagtaacgcaaggtgctaagtattattcggaataaatcaaaagcatagagatgagataaatttattttctgctcttaataattgcaaaagtacccgagtagtaaattctaatccgtgaaactttgttccattaatgacgaactcatatcactcatatgcatgtttgggaagtgcctaggccgactcccgatgcttggtggttatgactagtcggacagagtgtttaaacgtacagagtcatctgctcggagaaatcaaaattgacaagaggagaaatacatatttataaatattttaaaatacttgattttttctcgagtattatatttatatcagatactactcatcctatatgtttgttctgcaggatccagatccagatatgcataaaagggattcatggcttt

SEQ ID NO: 24758 - DNA, 1885 bp, Oryza sativa
ccgcctcgtccgccgccgactggtgtttccgcctgctcgctggcctattatgccgccgttgttgggcgtctacgtcttcaccgaccggcttgccttcgccgctgccgactggtgtttccgcctgcacggctggcctattatgccgccgttgttgggtgtctacgtcttcaccgaccggcttgccttcgccgccgccgactggtgtttccgcctgcacggctggcctattatgccgccgttgttgggcgtctacgactccaccaccgacctgcctccgtcgccgccgactggtgtcctcgcctaaacggttggttggtcacaccaccgttcatgggcatccacgtcttcaccgaccggccacctcgtccgccgccgactggtgtttccgcctgctcgctggcctattatgccgccgttgttgggcgtctacgtcttccccgaccggcttgccttcgccgctgccgactggtgtttccgcctgcacggctggcctttatgccgccgttgttgggcgtctacgtcttcaccgaccggccgcctcgaccgccgccgactggtgtttccgcctgcacggctggcctattatgctgccgttgttgggcgtctacgtcttcaccgaccggccgccgcatccgccgctgctggtgtcaccgcttgcacggctggcctgttataacgccaactgatgctatcttcttcacggctggctacatcgctgtcactactaataggcatcagtatcttcaacacaagctgcctacgtttgccatggctgccgactgttttcttcacttccatggctgcatgattctgccagtgttgattggccttaccatcttcatcgccggtcgtctcgtctgctgctgactagtgccctcgcttctacatctggtttatacagctatcactactgatgaacatcatcgtcttccgtcgccgactggttatgttgtcgccgactagtgcttttattttcacaactgcgcgtcttcactaccagtttgcttctgttgccgacgactcgtgttcacttcatcacggcaatgcaactttgtcatcatggtagagcgacttcatctttattatcttcggcactggcaaactctattgctgctacttcgcaagttttgctacttcaccaaccacgacgtctttgtgagcctcgacatctcggcatgcgatgccatgttattttactacaacaagaggctctccaatattcaggatttctacttggacatcttcaacacatatcttcaatcaagcaataactattcgacgacaagaggctacagttctcgactctatgttcagttgtttcccaactaatcaaagagtcgggggctacacaaatacaaggctcaaaatttgacaaattttatgtcaagctgaagaaatcaattcatcaacccacgagtcaactccaggagtcattatcttcatctttgcttcggagcagacattctacttcaacaacatcaactctcctccaagtgaagcatctacaacagctataacattaatttgatggattattgtcactgacatcatcaccagcacctctgcttcatcgaccctgacatctctgctgttgctaatggatgattatgttttcgccgacttattatttcaccttcacggttgacctactatgcaaatgctgatgagcgtctttgtcattatcattggttgccacactgctattggctggatcaccgacatcgtcatcttcatcatgtcggttgcgtttgttgtcgtcaactacacaactttatcgctgagcgccttcatattcattgctggctgacctgactgccgccgactggtttcttcgcctccatggctatgtgacttcagtacttttgattggtatcactatcttcac

SEQ ID NO: 24759 - DNA, 1104 bp, Oryza sativa
ttatccgactagtcataggggataacttatatctatggaatatgtaatagatcatgactcgggtattacgtttccttatatattacggaacagcctaaagtcctggtttgataatattgtaaagtagatttaggaaaccgataccgtattggttaaggtttctatcttgtaatcctgccccccaccctatataaggtgggcgggaggccctctagggggcatgacacaacctgatcgtcagatcaatacacactcggcggattcaaatccccaaacaggagtagggtattacctctcattgagagggcctgaacctgtctaaatcctttgtctctgcatccatccactttaggtctcgtacgctacccccttttattattgccgaattcatgtttcgacatattgcttgaaaaatattatgcattgataggatcgcacttaatctgcttgtcccgtctgcaaggcagattggcggacctacctaatttgttgcatttgacccttccattgtaattattataccatgttcccttgtatccacctagttgcgcctcggtaatcgtgcactcggcacgggtatcgacggtcgctgtcacgcccggaatttctatccaaaattccaaacgcttacatgtgtgtgaaccctcgtccaggaatcagccgaggcacacaataacaaattgataatagagtacaaatattactctaattaataagcgaataaaatgtcattacagaggtagatagttcctctcaatcaataaagttctaagcagcggaaaataaataaacggcgcagacggctccactccacaggcagcttgaccaaggctacacctaatcctccacaccatcagcctcattgaagaactcttcctttgatgaatgattgcaaggtgagtatatgacatactcagcaagccacgcagcaaatatgcaagtgcacaggataacaaaggatggcataatagggttccatttgcaaaagcagcatttagcaaacatttgagaatttaacaaaacagttaagtaataattaagcaatattaaaccaacgctatacaacataccctgttgtataggcccaaccattctgaacaacca

SEQ ID NO: 24760 - DNA, 6284 bp, Oryza sativa
cggcgagaagagaagagcacggggatccttttaaaggggctcggaggcgacggcggaggcccacggcgacggcaacggcgaaggaaactcgcggcttggagagaggaaagccgatccgattcgaactcgaatccatcgatttccaaaccgatttagccgaagtttccaaaggagaaaaggtagaggagatcccgaagatcatttcccctctatcaattcagccggaaacggaaaggagcggccggattggaaagcggcggcgacggcagctcggcggcgcgaaactagggtttcggcccgaggaggacgacgggcctgacaggtgggacccacctgtcagcggctgcgagggcgcgcgcgcgcgcgggcggctgcggactgggccggctgggccgaggagagagaagagaggttttgggccgactttcggcccaaagccaaaagagactttttaaaacctttttcaatttaaattatttcttaaatgcaattccatttattaaaaatacttccttagctcaaataaatcccagaaaaatctaggaattatagaattaagcaaagtatttaatgaaattttatctggcccaattttatattggaatttattaattaaacttagatcttctcttcaagacttttaaaattatttctagaaattccaattaaacaacaatttatatattttgaattttcagggtgtgacaaacctaccccccttaaacagaatctcgtcctcgagattcggaagaactggcgaacagaagcggatgagctgacttcaattcatcttctcgttcccaagttgattcttcttccgagtgattactccattggactttgcaaaaacggataactcgattcctggttcttctctcacttgtttccaggatacggattggtttctcaacataagtcaaatcctcttggacttctatctggtcaatattagctccttcggtaggtacccttaaacactttttcaattgcgacacatggaacacattatggactcctgccaaagattgaggtaactccaactgataagcgacctctcctcttctactgacaatcttataaggtcccacaaaacgcggtgccaattttcccttggtatgaaaacgatgaactcctcgaagaggcgtgacacgaagatacacataatctccctcttcaaaactcaaatctctgcggcgattgtcggcataactcttatgtcgagactgagccactcgcaatctttcttgaatgatctttaccttttcttctgcttcccttaggatatccgttccgaaaacctgacgttctcccgtttgatcccacaaaagcggagtgcggcacttccgaccatacagtgcttcgtacggagccatctgtagactagcttgataactgttgttgtatgaaaattctgcataaggtaaattcttatcccaacttccaccgaaatctaaagcacaagctctcaacatgtcttccaaaatctgattcaccctttcggtttgtccgtctgtctgtggatgataagcagtactaaagttcagcttagaacccatctcttcctgaagtttcttccaaaaatttgaagtaaattgactgcctcgatcagacactattttcttagggacaccatgcaaacacacaatccttgccatatacaattccgctaagcgacttccggaataagttgtctttaccggaatgaaatgagccactttggtaagtctgtcgactatcacccaaatagaatcatggcccgatgacgttctgggtaaaccagtgataaaatccataccgatttcttcccatttccattcaggaatcttcaaaggctgcaacaaaccggctggtttctgatgttctgccttgactcgctgacaaacatcacatactgctacgtattctgcgatttcacgcttcatacttgcccaccaaaatctttccttaagatcctggtacatcttagtactaccagggtgaatggagtataaagtatcatgagcttctttcagaattgcatcctttaaatctttgttgtcggggacacagattctctcacccaaccatacagttccgtgctcatcctccaagaaaccaatagcttttcctcttctcatattcttcttgatctcttgaatatcaggatcattaatttgggcttctctaacttgatcaattagagtgggcttcgcttctaaggctgcaacgaaacctctaccgacaattcccaaatttaatctttcaaattccttgcataattccaatggcaactgtcgtccttctgtagcattgcaatagccttttctgctaagagcgtctgctacaacattagcctttcccggatgataatgaattcccatgtcataatccttaattaattccaaccatctccgttgtctcatgttcagatctggctgagtaaagatatactttaaactcttgtgatcggtgtacacttctgtacgagtaccgaaaagataatgacgccaaatcttcaatgcatgaacgactgcagctaactcaatatcatgagtagggtagttcttctcatgcggacgtaactgtcgagaggcataggcaaccaccttcccatcttgcatcaaaacacaacctaacccaagtttggatgcatcgcaatacacttggaaacccttctttggatcaggcaaagtcaaaataggagctgatactaagcgattcttcaactcttgaaaactctgctcacattcttccgaccacttgtacttcacatctttctgaagcagtcgtgtcatgggcttagcaatcttggaaaaattctctataaacctccgataatatccggcaaggcctaggaaactgcgaatctctgaaactgtctttggttgcttccaattggttacggattccacattactaggatcgacggcaactcctcctgctgagatgacgtgaccaaggaatttcacttcagacaaccaaaattcacacttgctaaacttagcatacagttgatgttctcgtagcttctccaatgcaaggcgaagatgttcctcatgctcttctttggttcgagagtagataagaatatcatcaataaagaccaccacgaacttgtctaagtattccataaacaccttattcatcaagttcatgaagaaagcaggggcattggtaagtccaaaagacataacagtacattcgaacaacccatacctagtggtaaaagctgtcttaggtatatcttcctctttgattctcaactgatgataccctgatcgaagatctatcttggaaaaaaacagtggcacctttaagttgatcaaacagatcatcaatcctgggtagtggatacttattcttgatagtcacatcgtttagtgcacgatagtccacacacattctctgagtatggtctttcttttccacaaaaataaccggagctccccatggtgatgaactcggtctaatgtatcctttctgtagcaaatcatctacttgcctcttaacttctgccaactcattggctgccattcgataaggtctcttatggatcggagttgttccaggtaccaaatctattctgaactctatatcccttttaggcggcataccaggtaaatcatctgggaacacatcaggatactcccggactataggaatctcttccaaagttatctggttcagtcttgaccttaaagactcagatgacaatgcatgaacagttacaactcgaccatcatagctgttgagagttacttttctgttggcacagtctatcacacctttatgtctggctaaccagtccatccctagaatgacatcaaggtctttggattttaacaagataagattggccagaaatggtactccttgaatttatattctgacagaggggctacgttgcaaagagagtgcttgatcacttggggtactaaccatcaaaggacgtctaagatcttctacttccatcccatgatttcccgcaaaactcatagataagaatgaatgtgtagcaccagaatcgaaaagtactgttgcaggaactgagttaacaaggaacgtacccaaaatcacatctggagcatcttgagcttctgcagcagcgacatgatttacacgagccttggatgctggtacagcagagttattctgggtagggacaaccttcacgcgtcggggcttcggacacttgtcagcataatgtcctggatctccacagttgaaacacaccacgggcttgctgccttgctccctcttggcaggttgttgctgtgctggagctgcaacaggacgtggagcttgattacggatgttgttgccagcattgttgttgaagaactgacgttgcggacgaacaacagacgaagaacctccctgtggcatggactggggtcctaaagtaagacgcggcttctgattattcccctgttgtgtcttgaattgagcaatccgacgtttcttctgctccatgcgattgtacttgtcctcctgacgaatagccttatccactaatttctggaaatcagggtaatctccaaccatgagtgggtaagaaagctcatcattaagtcctcccaaaaacttctcctggcgctcttcatcattgcgcacatcttctggagcataacgagcaagacgattgaactcgtgcagatactccgtaacagagcgagatccctgagtaagcgacctgaactccttcttcttgagagacactactcccgatggtatatgcgtcttccggaaagcagcggtgaattcaagccaagtgataggttcagcagtagtcctgttaaggcggaagtgatcccaccattcagaggcagggccatgcaactgatgtgatgcaaatgaaaccttctcctgatcagtacactgaagtaaatccaacttcttctctatggcatgcagccaatcactagcttcaacaggattagtggtactagagaaaacaggcggcctcacacgaagaaattctgctaacttgttttggggaggtgcatgattattccctggttttgctgattctgaaattgctgcatcatcatgttcataagctgtgtctgttgagcaagaacttgggccagagtaggattctctccattgttgttattggggttgttgggaccattcccattgctgcgagtgttcaccatctggcatggacagggcacaagaagagaaaacgggggaaactacttaggatagagaattactttgacttttattgatcttaactgagtttcattattacaaactgaagactctcacaccactaaactcaccaacttcctaacactcaaaagcaaacaaacacatgcaattacatcccaccactgatgtaaatcacatgcaagacccacacacacacaagcaaacttaaaacaagcaaactaacacaacgatctaagacaacggcttaacaagtcactctagttcttccaagcatcggaggtcgattgaaggctcgttcggctcatcttcctcatctttgatagctacccactcaaacttggaattgttgcgcttgggttcttcttcttcatcactacttatgatgatgaccggaggatccgcttgagctggggcaacttctttctccaccacacgaacctttggcgccagttgatagcgagggacaaataaagctctcttccttgcggtaagacgaatcctggccttctgcggcggtgcttctcccttcaatgcggctaattccttttccaaacgatccaccttgtcttctaacttgcaaatcttaccacgattccgatcttcacgatcttgagctgctaacacagtctccgcacgactttcatccatagcccacaacatctcaaccaaatgtttcgtggtaacatcattctcaattccttcagtctcaaggtaactgccacggtcacttccctgaggttggcgaggatggtagcgatactcagtgtcggccaattgatcactgtagcgatcacggagctctcctatggcgatccttgccacctcctgacatgcatggatgtagtttcttcctccagcttcaaacattactgaggggacctcttcactattgctgttcaaggtgactttgactcggcacttctcttcatgacgatcatgaggaatctgggtataaaaaggggcagtcccgaatccaatgacaaaggacatcatacgcaactcctggacaaaaccctcaacaccaaacaggtactcaggcttgtaacgcggcatctaaagacaagtgaaaggagggagttaagacctttatccaattaatagcacagtttttggattaatttgaataa

SEQ ID NO: 24761 - DNA, 2967 bp, Oryza sativa
tgggaggagaacagttctacttttccaatatttttcagagggcttctatgggtaaccatttggcataacctagggtcaaagatgctctgataccaacttgtcacgcccggaatttctatccaaaattccaaacgcttacatgtgtgtgaaccctcgtccaggaatcagccgaggcacacaataacaaattgataatagagtacaaatattactctaattaataagcgaataaaatgtcattacagaggtagatagttcctctcaatcaataaagttctaagcagcggaaaataaataaacggcgcagacggctccactccacaggcagcttgaccaaggctacacctaatcctccacaccatcagcctcattgaagaactcttcctctgatgaatgattgcaaggtgagtatatgacatactcagcaagccacgcagcaaatatgcaagtgcacaggataacaaaggatggcataatagggttccatttgcaaaagcagcatttagcaaacatttgagaatttaacaaaacagttaagtaataattaagcaatattaaaccaacgctatacaacataccctgttgtataggcccaaccattctgaacaaccaccccggctgcacagttctatctccaaaccaggaatgtaccattccaaaccaggagctaatcaaattattaccagtttaagcatcttttacaatgatgagaggtgtgagactaatcacgaaagacattgttagacccgcccataaccgcgggcacggctattcgaatagttttactctgatcagaggtgtaccactgtacccacaagacacaaccccacatcatgtcaccatgtgcctcaataccaccacggtatctcggaaaggagttgtgacaatacccctcgcataacacaatccactgcagcgcaccttcctggatcataatcacccccttataaaacaaggcatggactccccagcgacccccgtgggcttatctccgccacttctcagtctggtgccccgcaatgaaccatgctatacaaaagataaagccgttgcccatgctggcttgtggttggcacgataaatgtttcacaaccgaaactcgtgaaccggtccttaattgccatgagcacgaccttcaaatccatgtgctcacaacccaccattaccaggttttagttggcacattaattaattaactaatcacgattgaccaccgtgaactatcaataagccatcatgaaataatagtgagtcattagttatcccataagtgtactaatgtttctaagcagggctaagcaattatatctaatatctagttgaaccaatataaataaagctcaactagtcaaattataataacccaaggtatcaaggaataaggtaatcaagaacaaaagggccataacaatcaataggttaattccacccaatgacattcgaaaatagatgcaatagttgaatagaaacaatagctttaaataggatcaacatgctcaaagggttgtttgggatctgtgtgacttgccttgttggccttggaactcttcaaactcttcttccgcgaaaacggactctctggaaacgacggaatctaagcaaaaagaagcaaaatcaccaaaacagcacataaacaagcatgaacagttcatgtggatatttttaatgtgtagatctcaattttagaaaaatttagagacttgaaccaactaaatcggagctaagatgaattagttatgaatttttaaagattaaaccggattaaaacacttaaatcggtttaaaattgaattatgacgcaataatgaattatttttgaaaaggaaaaggggatttattgcgtcagcggctagggtttgggtggaccgggcgcacgggcggcggttcacacgaacggacggccgagattgatccgatccaaatcggacggccgagatcgatcgggaccacggcggttcacggcggacggccttgatgacgccagcaatgatgtcaccgatggcggcggcggctcggcgaggcagacgactcgagcggcgcacgctcaccggcgaacggcggcgctacggcacgaacggaggacaccaacgggtagcggacggcacggcgaactcaccgacgaccaaagcgacggcggacgaccaacggacggcaacggcgacgaggttgaaacggcggcggtcttcggcttgacgacggcgacgatgctccggcggtctccgacggcagcgaaagagcggacgaggacggcgacgacttggcgacgacgacggcgaccttcccgagcgacggcgacggctggaacgacggcggcgcacggctggagcggcggcggcgaaggcaaagctagggcacacggcgctagggctactccggcgacgagaggcgaaggcgagggtggcggcgtgtcacgaccggaaaacacccaacaggcgttcctgacgtgcgtgcattattccttgtcccaggaggcaaggtacaccaaaagttgatacaattcagagtttaacaagcggaagcgtatataaaattattacacgggcagcggaggcccaacacacaaagacaaacgagaaacagcggaagactagggcgacgaccacaggcgcttgacggcaggcacgagctagacaccaaagccttcatcttccaggaactcctcatctgggcttggggaaaattgagcaagactgagtacaaccaccgtactcaacaagacacacccacaaatgcagaataaatgcaagggagtacaagggaattataccataaaggggttagggttgcagtaaacagcatttaaagacatttagttgctcaaggccattttgtaaacacgatcctagaactatccaatattattaatcaaggccgtgaacccacacgaacctgccttaacccaaggcctatgatgattcagaccgaactggcaactcgaccctgggtcccagctcgtcctaagccaac

SEQ ID NO: 24762 - DNA, 1744 bp, Oryza sativa
cggtggcataataggccagccgtgcaggcggaaacaccagtcgtcggcggacgaggtggccggtcggtgaagacgtggatgcccatgaacggtggtgtgaccaaccaaccgtttaggcgaggacaccagtcggcggcgacggaggcaggccggtggtggagtcgtagacgcccaacaacggcagcataataggccagccgtgcaggcagaaacaccagtcggcggcggcgaaggcaagccggtcggtgaagacgtagacacccaacaacggcggcataataggccagccgtgcaggcggaaacaccagtcggcggcggcgaaggcaagccggtcggtgaagacgtaggcgcccaacaacggcggcctaataggccagccgtgcaggcggaaacaccagtcggcggcggcgaaggcaagccggtcggtgaagacgtaggcgcccaacaacggcggcataataggccagccgtgcaggcggaaacaccagtcggcggcggccgaggcgagccggtggtgatgttctgactgatccattcctggagcgtaagagataagcttaaagccatcaatcctttttatgcatatctggatctggatcctgcagaacaaacatataggatgagtagtatctgatataaatataatactcgagaaaaaatcaagtattttaaaatatttataaatatgtatttctcctcttgtcaattttgatttctccgagcagatgactctgtacgtttaaacactctgtccgactagtcataaccatcaagcatcgggagtcggcctaggcacttcccaaacatgcatatgagtgatatgagttcgtcattaatggaacaaagtttcacggattagaatttactactcaggtacttttgcaattattaagagcagaaaataaatttatctcatctctatgcttttgatttattccgaataatacttagcaccttgcgttactcggtccatccaacgagcccccgggtgctaggaatcggcccaaaggcaaccatccattggcaaaccaaacggaaagcataggaagatagaactccataactcgataggtacttttgtactcagattatgtcgcaagcaatcaagataaatattatgaaaattgtttaaaaaatacgatataacttctatagcccccgactcactagtcaacggcgaaccagttgatgtagtgaggcaaaggaaaagacaaaatatcatataaagaataaaataaatgatgacttagctttgtcgtattccctcgatgacagcagaagtagccgatgtgggaataaagtcgtccatcaataacaatgaagacaccagtcggcggcgacgaaggcggtcgacggtgaaagcgaagatgcccactaatggcggcataataggccagccgtgtaagcggaaacaccagtcgacggcaacgaaggtgagccaacggtgaagatgtagacatccaacaacggcggcataataggccagccgtgcaggcggaggcaccactcggcggcgacggaggcgggccggcggtgaagtcgtagacgcccaacagcggtggcataataggccagccgtgtaggcggagacaccactcggcggcaacggaggcaagccggcggtgaagtcgtagacgcccaacagcggcggcataataggccagccgtgtaggcggaggcaccactcggcggcaacggaggcaagccggcggtgaagtcgtagacgcccaacagcggcggcata

SEQ ID NO: 24763 - DNA, 1676 bp, Oryza sativa
acgcccaacagcggcggcataaataggccagccgtgtaggcggagacaccactcggcggcaacggaggcaagccggcggtgaagtcgtagacgcccaacagcggcggcataataggccagccgtgtaggcggaggcaccactcggcggcaacggaggcaagccggcggtgaagtcgtagacgcccaacaacggcggcataataggccagccgtgcaggcggaaacaccagtcggcggcggcgaaggcaagccggtcggtcaagacgtagacgcccaacaacggcggcataataggccagccgtgcaggcggaaacaccagtcggcggcggcgaaggcaagccggtcggtgaagacgtagacgcccaacaacggcggcataataggccagccgtgcaggcggaaacaccagtcggcggcggtcgaggcgagccggtggtggtgttctgactgatccattcctggagcgtaggagataagcttaaagccatgaattccttttatgcatatctggatctggatcctgccgttgttgttatcagcaatggcggtggcgaagacaagccggcaaagtggactcgcggccgatcgaccggaaagctgagacgcctcgactccatgaccagcattaatcgcctcaatagtgccgcgtaattatatgcgaacaacaacaaaaaataacaagagattaatctgagattaaaaatcaatatgataaataatgataaaactaggcgtccggcgctggacgagtagttagcgtgagcagatataaaaaattgctcaatggaaaatattacataaaaaggaaaataaagacacttagctttgttctcagtgtcctcctccgtatatgtgttaatggatggacatgggatcatatcggcagcttgtgacagacatgcactgtatgtggaacaagctggattataccgaattgaaaaccatctgtatgtgcagtatggcttgtgcttgcatgctgcgtgctatgcgtgcgtgagtccgccagccatctgggcaagacccaacagatgccgactgcttgcatcaatataatggcaatgtgtagtggcagtcggacatgcaaatccagtcacgagtcggtgctgatggctgagttgctttaattagtcatggttgatcagatcccaagtcggagaagattttggaaataatcgtcgcgacggtcgcgtgggacttggcttgatagtgatcaggttcctccgatggcagggcatgtatttaatggatgatcttgaaccggtgatgtcgaaaactaaatcgtcgaactcccagagattgatcttagatggcagggcatgcaacgacgcaaaccttcgggcgtgttcatgcaacatctcgactgatatttcttttttaagattgatctgaccacaggatggtgtcgacgaacatggcgatgaccggatgagaacgaagccatcttgagccttcccgactgatttgaatctgagccagagagaacttgttgaagttgtcggcgacgaggaagcgaaaactcccaaagcgaaaacgaagtcggcgactcatgaagttgattccatcgcactcgttgataggaaactcgacgcaacccctacctggcgcgccaactgtcgaaacatgaattcggcaataataaaacggggtagcgcacaagacctaaagtggatggatg

SEQ ID NO: 24764 - DNA, 705 bp, Oryza sativa
taattgtttgggtaggctaccagagaggtgtaatggtgcgggtttaatatctgatttatcagttgctctatgttgggtgcacaggtatagagtacttcctccatttcatattataagactttctagcattgcctacattcatatatatgttaatgaatctagacatatatgtgtgcctagattcattaacatatatggagattgaaatactcttgtgcatatgcgtcccatgttcgtgtgccctcattccatagcctttcgaagtcatcgattatcggttcaaggaacacatcgatatcgttgccaggttgtctcggtccttgaatgagcatagcaagcataatatactttcttttaaagcacaactagggaggaatgttatagttaacaagcagaactggccatctactgtgacgactgctcaaatcaccaaatggattaatgccgtccgtacacattgcgaaacgcatgtttcttgggtcctttaagaattcctggtaaatcctattgattgtcctccactgtactgaatcagctaggtacctaagcatactatctactttccgttcttcagcatgccagcgcactagcttagcttgttccttattcgtaaacattctcttcatacgctccgcaattaggagataccacaccacctttgcggggcctcccctatttgacttacttccttcacctttcgctctt

SEQ ID NO: 24765 - DNA, 702 bp, Oryza sativa
atccacaaagccaaacaacctaacaacccaacttacggctaaccggcaacattttattatattacttgcaatgatttgatttacaaatttccagtacatatatgtatttcttcactcgtgaatacgcaagagattgtatctctattaaacaccgaaaacggcacacaaactattttttgaaagaaaaaacatatactcctagtttgttttaatttattctctttttacttgtaaaaactgcggatgtaacaacaagccagatcctttaaacttgctctttgtaatctcatcaatcctccttgccatctctggcgtcaggtggtttctccaatctccgaccacgccacgccggaagaccgtgttgtttgggacagtgctatcgactatggtgatcgttcccgaccgattcacctctaatccggacatgttctccaatgcgcaggcctccacgatattcctatccacccgtgcttctgctcctccgtcgtgaatggacatccgacaaactcggcaaggcgtctcaactggccgagcgtgttggcgacgagctcatcgtaggtcaagaagagcacctggttcggcttctcgacgtgccacctccagtagccgaggatatgctcccagaacggcccaaactgcgagcgccatcgcagaattgccggtgcgcctcgtcgatgtcccacggcatgaacctgttccaaa

SEQ ID NO: 24766 - DNA, 4616 bp, Oryza sativa
cttccagatctagaagaggaagctgtagggttaacgcacgcaaagcaaattcgagacgaaagcgggtgggggagagagagagaggatttggatgctcaccaggatgcaggaacccctcccctgctccggtcgcgagattgaggatcggcgccctgctctgccctcctcgcgagatggagatcagcgctggcgcatggagcggagacgagacgggagtttttcttctttttttttttcttggcacgcgacgggagtttttcttttctttccttttttttatttacgcataagggacagcgacgaaagatttcctttttatattttaaaaaaaagtctgtgtattgcaacgggtgaatgctattttaatcttattattgttgtacggtttagctaagatgaaattcactttgggaatttgcttagattttttttagaaaatcatgaacatcaattagtagtccaactttcatatcaagtaagcatgcggattttttaaagggatttcttatatgactccttttatattttcaaaagcaaacgaatttaaaatccgactcaaacacgaatgatgtaccaaaatattaacaaaaacatcttcaaattttataatagtagagatactaatgtaatactatctcatccgaattaatatctaaagtgtttgttttttggatgtaggaagtaaataaattataggtttgtctaaactattgcttattgcttatgtttggtaggcttggctacggtgcaactgtagccagccgctacagtccctgtgtgtttgttacaaacttatagtgcccgctaaaaatgttacgtacagcgtgacggtggtcaagcctactaaacagcacattattatgtactccctttatctaaaaatatagcaacctataattgattcatagtaataaaatatgtctcatcgggtactaggttactacattttataacggaggtagtaggtgttattttgaacaaccttatttcaaacttttcatttaaaaccaactgttctttataatttggactaggggcccacctttcggtggaattcggttggggatgggtgcagacaacaaactcctccgccacggatgccagcgacacccactggctaccactcttcacatccacgcaccaccaccgccgctccttctccatgagccatcgtcattcctcctctgcacccaatcgcacacattagccaccgacatgtcttctcttgcctcccatcgtaatgcacgcggctattatagtcattgttgagatcggtagcaccgggctagtgaggatttagagaggcaggaactgacctagtggagagtggggacgctgattcatgatcctctttattggattcaatggttcccccagttgctggagagaagaaagaaagatgagagatagctagtgtgtggagcgatgacagtcattggacttaggtggatggattagatgagggtggtctaagttgaaataaaatgtaaagttagctggtgttaagtaaaaagaatggttgaagaatggtctaatttgaaaacttgtaagaatacctagcccaaatagcaatttacacttttttttcagcacaactaaagggcatgttcaatttgatgcatttttaaccataccattttttagtaaagttgtcaaaaaaaatgtctacatttagtttgttgtcaaatttggttaatacataagaaatcatgtcaaaattttagcaatattggcatcttgccaaagttttggtaatattggcatcttgctaaaattttggcattgcaaaacttggtaaggtttattttggctacaatctgaacaggcccaaaattgggttgtccatgagccgacgggcccatgctttgctataccaactatagttttatcgtgtctagatggcatggttgggctagcctatttaaacagaatccaccaaatcccacctccgaaaatcaacgtcggcataccgcttcttgcatagaatgccatcatcctcaaccctaaggaacccaatcgcgcgaccacaaatccaacatccctacaacaatccaatacccaaatcgcaccacgcgctgcaagaaatcggtggaaacgaaatatggtggggagggggggagaagagaggaaatgaaggggaggataatttttacccaaggtacaactttagtgcgactccggagcatagtaaaaaaagagatcggcccgacggttgaaccgggaaaaaccagaaccagtccctagcatggttcaatttgtagaaaagatcgtctatgcatatgaaccagcgaaaaccggttagaccggatggttttatggtgaaccgtcttaaaaaccaaagcgagtcatatcgtaaactgtactagctacatagaaaaaaaattaaattcttggttgggcaattaagagtcaaccccaaaccttttgagaaaggatctgcatgcctatagagtatctccaacatgttatctaaatttgactctttacatgttcatttggccaacttgccaaaaatttggagagccaaatttatctttcaattcaacatgctctccatcatagcaatgggacccacttgtcagtgtctatctccttctcccttcttttctctgcacaatgctcccctcctcattcctcccacctaccaccgccgatagaggcggcgaacattgaaaccgctattccctcatcgattcctacgtgtcgatagcaggcgagcggatctgacggcggcagaggtgtcggtgaaaaacagtggtgacgaaaatgggcagtgacgacgaaaattggcgatggcgatggcaacattggaagggctagagatggggacgggggcacagggaggagctgcgtcaaggaggaggggcggcagaacaaccgtcgagccgccatcgttgtgccctgttcgtcgattcaaatcccatcgtgggggaaggattaggatgagaggcggcgacgcttgtcagctctgtccggtggggttgctattgaggaaaaggaggtggggtcgctgccgctaccattgcacccctctccaccgatcgacggacgcggtggacagagaggagaggcggctccgatgactgcataattgtggcggtggtggcggcggtggggggaggaggatctgaatatgtgacccacctttggcaagccaagaaggcttgctagatttagccagtcggggggttgatttggcaagcaggacgacaaaatctgttggagggtgttttttctcttcacttactaaattttagcttggagagtcaaatggccactctcttggagatgctgctcccacctaaccaactatgcaagaggatcttgtaggtgaggatagaaaaaactactttgagagtggattacaacttaaaaaataattaacaataaatcggcggttcgactggtggaccgatgaaccgacatgctcaccaggtgagtccctggtccatgtttttccaccaagttctggaggcctcatccacaatcttgctcatgggcgtcactaggcccggcgacatccggatgatagtagggtacactagccagtggaggtcacctggcggtgtacctgtctctagcagatatttaaaaattaaataaataaaacgccattttggagtgttacagttcaaacgcaatttaggcccggacagttcaatgtggcattactcctatggtagaacaacatcatggttttcactaagcaagtaaaatgcccgttctttcttttctttctaactcacaaaggaacttggcttttatttaagcctccttgaagcaaaggtcttctgaaggattttcataagaattgaactaaccccatgaaaatcctgtaaaattcatgagttccaaaggagccttctcatgacgaaatacaggatagacaaataaaaaatgaagagtgaccaataaaacatagtcatcttcattttacaagggcaatgcttggttggatagaatagagcaaaactatatgacaggctctagaccgtttcacacaaccaaacgcatcatcaaggaaaagaatgcacgaaatttgaaagctagtcagcatcatcagtaaataagattgggtcaataggttcacattttctcatgttgagattcaattcatggagaatcctacaagccccatgaaattcagggcaagaatcatccccgaagatgaaccgatgcacccgtcctcccacctcaacacaactctctcccgcaaccttcttcatccctccttccctcatcaccctccttgccttcgctgcctcgtcccatgatccaatttcgcagtagatgtttgaaaccatgacgtagttcccgcttctccggggctctagctccagcagtttgccctgcaccttgtcaatgatctcaatacagtccttggagctatgcagctggcaggctgccaataatgtcctccacacaactgggtcagcctcgactggcattcctacaacaaagtcataagcttcctggagaagaccgttgcggcctaggacatcaaccatggcgctgtagtgcgtcatcatcggcacaataccataaacatgctgcatttcgtggaagaaccggcgcccctcatcaaccaggccagcatggctacatgcacaaagcag

SEQ ID NO: 24767 - DNA, 2058 bp, Oryza sativa
cgcggaggcgaggccgtccttgacggcctccgagtgcacggatccgacaacggggagggatcccggggcgaggcgcgcgagcgccttgaggacgtgcgggagcgtgtgcgcgtcggggcggagacccccgcggcggaggcgaaggaagagggcggcggcggtggaggggtccggcgaggaggcgagcgggggaaggaggaggttgaagaggtcgagggatggggaggggagggagaggaggagacggtgggcgaggtggaggtggggattgggcagcgaaatgaggcggcggaggaggacggggccgagggaggggaagcggccggaggtgaggagatgggcgtggatctgccggagatgggggacggtggtggcgccgccgccgccggcgatgagggcgtggaggtggagagcggccattccatggaggttgcgcggcggcgcgcgacggccgacggcgatttggtcgtgggggaaagcacacgctgcggttgctgttgggcctaacgggcccggcccgctcgatacttgcatctgcatcttttggaaaaagtacagcgaaggtccctcaacttgtcatcaagttacaaaatcgtccttgaactgcaaaaccggatatgacgtatcccccaacttataaaaccagtgtaaaataggtcccttggcagtttaacttcggttttatccgatgtggtagctgaatcagcgtgggacccacgtgtcagcctcttcttcccctcccctctccacctctcttcctctctccttccctctccacgggcagcgcccggcgaagaggagctaggcgcgggcgcgcggcaggccagtgcggcgggcgcgagcaacggccgacgggagaggagttgggccacggggtagcgggtgctcatcaggcggaggacgtcgatcgatggggatggccgcgccatggcctccttggctatggcggtccccatgaggccacaaacgacgatgactagaagggtagaacctgggaggaggtcgagcgcgggtctcctcaagcgatggcggcaggggctcctctctctctctcttcctctcgttcccttcaagcccatgacttcctcggcaagctcctccagccaccagccctcgacgggcacggcagcggtctcaatgggtggactcggcggagggtgtggtgtggacactgctcactctcctccacggacggggattgtggcggcgagcggggtggaattgaaggcccttcaaagcttgtttggtaactcgagggaaggggattgagagtttacacgagagaattgataatgagattaagatgggaatttgatttttaatcccaatatcttgtttggtagaggttatggaaattgatagggagtttagttggagattagatcattaataaaaatggatgactgagatttgcttagattaagtaaaggaggaattccctcccaattacctgctcctacccacgtattgaaaaggagggagttccttcctcaattccccatccccatccccatcccaccaaaattcccatgtctcccaaccaaacaaaacacttaatagcctcatccctctaaactcccaatccctcctaaaaactccctccaaccaaactataggcgatgtgtttggtgggtcaactaggcggaggagacgatggggaagagaggaagggatggccaccaccttcccgcgcgctgatccgccgcccgccggtcgcgcccagctgctccccccgccgcctgcgcctgcccacgcgctgctctgccgcgcccagctgctcccccaccggccaccacccatgcagctgctcacccgccgccgctcgtggagaagagaggtgagaggaagagaggtagagatgggaggggaagaacaggctgacgtgtggggcccacgtgggttccacgctgagtcagctaccacatctgacaaaaccggggtcaaaaccaccgagggatataatttgcactggttttgtaaattgggggatacgtcatatccgattttaccactggtagagaaaccatctttggtcggtcgacccatatccataatagt

SEQ ID NO: 24768 - DNA, 12921 bp, Oryza sativa
attcctgcagcccaacaccaaccgggactaaagattgatttttagtcccggttatttgaaccgggactaaagatagcgatctttagtcccggattcttagtcccggttgaaaaaccgggactacaggggggttacgaaccgggactaaaaagcatttctccaccaatgtacggttcaaagatgattttgtaactcgatgataagttgagtgaccttcagcgtactttttctgcattttttttgtcacgttaggtgatgaacatgggccctatttttctattctcaataattaataatcctgaaactgaataagtggtaattacttgtactttctccgtttaatctggattcattaacatcaatatgaatatgagaaatgctagaatgacttacattgtgaaatggagggagtagttgctaagatttcgtaaaatataaggtggacgctgtagccaaaagcgtccagctgcggatgctgttgcggagtggtgcgagctagctgctgccagcgtgctcgccggccggtgagcccatacgaaccagatctgaggatgttgttgcatgaatgcctttatactgctgttgaattgttgatgattactcgactcaaaagaatccaatctagttcaaatccgttgtattaattgtgttccatccaagtgctaggttagattttttgaaacagagggagtatgatgctagctattgctgtccgtgttttgtttgctgttgatgcatgcatgctagtgctgttgttgatgaatccgaggaaaaaaaatcatttctaaaccattctatttatgtcggtggaacggcttttatgcggttaattttctttttcttttgaaaaaaaaatattttttagccgggtgacataaggacaccgcttatgaaaaacctatttccacatgcggccgtcttcatctatccgtttgcaaaaatagctttttctaggtgagcggccatcctcctgtgaagatataatattttcgcatgcctttgcttacaagcggcgtgtgtgaccacctgcaaagagcaattttggccgcctgcgaaaattgcttttctagtagtaacaatagcaaaagggagactccaaattgtatttggatctaccaaaattaaccctttcattcattattgagtactctctccgtcccattttaagtgcaaccataagtttccgcgtctaactttgaccgtccgtattatttaaaatttttttagaattagtattattattattattatgagatgataaaacacgaatattactttatacgtaacttatgtttttaaattttttcaaaaaaatttcaaataaaacagactgtcaaagttgtgcacggaaaatcatgtctgcacttaaaatgggaaaagggagtagtaatttaaggttatatttatgaatttatgataaaaaagtatgctattaaaaatatgtactcagtataggtaaaatgcgctactaataatacaaataaaatatcatttccagtatgatgtctaattaagatgaatgaacaatgtttttttttcaaaaaaaacttatgtactttctttaaagtaaaggtacacaacgtacatgagagaggaagtcgacacatataacttccagattgtagaaaagaccctaagaaatgggcaaattaaccttataacacaaaatatgtaaaagaggacttaaaaaacttaaaaagcaatcggatcctactttttccacaggaacggcgagccatcttgtgccgacgtcgatggggaggatgattccatggcgagctgcaaaggagagagccgaggagcaaacccagtcggggcctccgcagtggaggttgaagctaccttggccaaacaagaaaaccacagctgcccccagaagacgaaaaaccgaataccaaggaaagaacaccgttcttctgtgttggtcaccagagaaaagttggacggccgacataacctctttgcatgcaaatctggtgaacttgaagccgcagacaccgaagagtagggcgtctagtacttacccaatgagtaccgttggaatagagagtacaggaataagtttcaacaactccatccatggctaagcacctccaggacgaagaaggacgacacaacttcctccattgaactacacaaactacggaaaaaacccgacactgggacaagcccaaccgctccctggaccctcccccctcccccatcccctccctagcgacccacggtcatcggagacagagaaagaattggagagctctcttgcactgttcaaacgaggagagagaaagaaaggataagaatgagcctctgatcccccaacactactcagatgaaagaacagttgatcctatattcagtctctttggaagaagtatatatatgactagttaagctagagttcacatacccaaactaactcaaataaatacgaggccttggcaatataattcaccttttgttacacgtgatcgttgccacctgtgctgactcacagccacatctcatacataagctatgtcacaagactcagactaccaatcaagaggttttgcaaaatcgtcatgaagggaagggcacatgcacatgagactgcatgagtaagatataagcacacactttgatataggtgatatatatgaatcctagctagctagctagctgctcagctccaacccggtggcttgtggtggttgtttgggcctgagggtgcatagtcctgtgtctccaaagccatcctcgcattgatcatggcgtcctcctctagggcaacaactggtctctccatttccatctgaaagagatatcattgatgaaaacgaacaattctatgctgtgtatagtaaagtaagtgtttttctgacttccatgtgatatgaatccaccatctctcttgatatataactcaatacggagtggttctctcaagttggctatgggttgggccataacaacgatatctaggaaagtgataaggttgtagattgagtacttgtgtacctaggtccttcgacgcaaattgatgcatctctaattcaacagtacatatcttggggatatcaatcatgctaactatccacctttttaacatgggaatctttgaaaaactattcctatacacaattcttgcactagcaacaggttatgaaccactaatccttttcttcactggagaacaaattttgatgtacgaaaaacgtgtaacaaacatctaagaaaattttgaattatgcaagatgctctgcgtcggtttataggattcctctcatgagctcttatatatgcatgcatataaaaaacccagggaaattaagataaaaggatggaaacaatgtgtccttaagaatgagaagataatattatattatttaaaatacctttggctttgctgtgctgcctctgactaatggcatctcactggactcttgcaagtgcagcctttgcactcctgcaatcaaaagggatgtgaatgaacaggttgatcttacatgctagaacaacaaaaccaaatggatcaaggaatcaaggaaggcaatgagtgtgattctgaactcacttgagagaggtatagcattggaaggaacaatcaagaagtagaatgccaacaaggtgataagaagatagtagagtggtagtgctggtgatttccccattgtatgcatgcactatagaaggctgttgagcagcactatctcaagttctcaatggaatggaatctctgctggcttcatgtgcccttgcactacttcttggtcatgccctcaacccctttttattgcacatgtcatgcaacctagatcattcatttaggagccaaagtcaaaaaggcaaggtggagattcacaaagtctaatcagtggaatttggcactagcccaacctttctctgcctttcttccccgtccactagttgatgaagtgcttctattagtccatatctcatattgctgtatttggtcatggcatgccatttgttgaatgaggagagagtgagagatggtgtagtttctattaaaagaagactaattagtaagtcatatgtaagtagctacttcatgggtatcttgtgttttcagaggtgtttgcttaatttgaaggaaaaattgtcaccatcttaatttcattttacacattaatataactagatatatttatcaaaatccaccgacttggtctaaacaaagaaaaaattaaaatccttaattactccatcacgttgttaatatttttgcggtgaaattcaatgtagcaacaagtcctgaacaagaaaagctatttccagcctctatgtcaaaacaaagtgccatacacgaaaatttcaaagtccagagctgtattgcatttcagacaatatgcatgtcattgtcacaacaaaactaatgggacggctttctgatgaactattctcaattatgcataatgcacggcattacgcatgaactgagagagatatttccattgggagatgcatggatcatccatagtggtggatgcacaagctaagcatccacaacaaccagtggctgcaactccttgtttggcatggcagtggtggtggcgtctgtcttggaacgaacaaaaacccatgggaatttcacaagtccacaaaagaacttttgattgtgcgttggtaagtacggttggtatccaagagtggcgagagatatggtgctggaaaggtggtcacttttgtatatttgcaacggggacaggacatgcatgcagtggatttgagaatttcggctgagcaatggggtggtttcttataggagtggatctgtgcttttaaaatgctgagagtgttgaatgattggatctttattagagttttagttagcgctactagatggttggtgcaattagtccacgagttctgtaattagatagtgcactctataagctcgtgctcaagtgctaaccaagtttatttaataagtagtaaattgtgtctatggtacgtatataaacttgaggtggatgtaatttaatgcaagaacttaaaaaaaaagcatagaggtgcgataacttggataatgtgtacatttttgttaaaaaatcaatattccacaccatatatactttttaagctagcgatgtaaaaaagcagtcactcagactatctcgataaggatctacatgtattatgttgtgactatctcgataaggatctacatgtattatgtattgttttttttcttggttgtataataaaattgcatatcgatttgaaactgaaaaatataatgattagcaaaagtaagtgtgtatgcaaactaacatagtttccaaactattagactaatcatacatatcattgtctccggtgacaaatacactgcaaaacacaaaattaatccaggagccaacaatcttgttaagcttataatacaaataacgaaacatgattaatcaaaggtgcataacaatgtttttaaccaaaatgttgccgagtttacataccaatctactcattttttaagttagtacactagatcgtacccacctaccaagttcttgtatcacatgtgcaatttatactctttaatgaaaacaaaacaatatacttgtgtggttttaatttcatccgcacctcaatattgtttatttttcttactccatccgtttcacaatgtatgtcattctagcatttcacacattcatatagatgctagcgaaaaatgctagaatgacttacattgtgaaacggaggaagtatctattataacatgacatatgaaatgtgaatttagtctaccattatgtgtttcaatccccgtttactttctaaaagtcatgtgttagttcaatatgattgtgacaagtcatacaaaacggatcggatcggatcaaaagtaatgatcggactatattaatccttatgttaggtcactgtaaaaatatagtcttgtgatggtattacggttcacaaaaacgggaccatggtggttttgggattttcacaaaaaaaaaaccgttgtttactagtgaaatccgatcaaattttgtcaaaaattaaattcagtttgattttttaaaaaacttcagtaagaaactgacccgtatgtgttcccgagccagcccaggaagttcagttttcgttggttttgtaaatccttgatggcatagacttcacaagtagtttggttaagtcaacaaaattgtgtaatccacttgtcgccttcttagtacactcttcgtttcccttcctagtcaccacactcagacccatgcagcgcactcactgaagctgctacaaagttgacatttgaaggccatccgagcaacccaaagagaaaagagggggtctaagaaatgtatcactctatcgtgtatattgtacagcagggtgagaggtaaaggatgcagagaaccttacatatccttctcatctctgcttccctgcttcaagtctccaagtaccagtaaagctgcagcctagctaattgagatagcccaagttgttagacacttgtgatgcacccatggaggtgataacttatttaataaattgatttgtcttaattagcgtagtgcatgatcaaatgcaagtaagcaagccaaactaaaaaaatcatttttgcaagcggccaaatgtgatttttgcatgcggcgagcacaaccgcatgcaaaaatcctatttatgcagcccgccgccgtcctccgagccagatccgcaacagcgccggtgttgcctgctccaggccctaccgcccgccatcgtcgtcggatccgtcgcccctaccaccctcggtcgtgcgtcttgagctctctggactacgggacgtggcgggagcttagtggcggcagctgatgatgacaccatggtcatggtcatggaggccttcctccacggaccaaacggtgcctcgtccacgcgactggtgagcacttcaggttccactcccacatgttcccttcacttcagtttgctgatctaatacctgatgagaccaatgtatttgttcccccttcaaattttgtctgctgctgcttatgtgatgttcgatgttgcatcgtaaattccactcaacatcgcaccgaagcagaattagtataatgcataatgctttacctgcctctatctactcttcgcttggagctttaaagttaattaatttaatttgtgctaaattaggattggttactctggatttcgttgcttcatttgtccactgcaactgcaactccacgctcagctgatcctccccttcgccaatcggggctgccttggggaactctcgcccatcgcgcgcctgatgcgatcgatcctgccaccaaaccgaagccgaaccatcccggccgctgcctttgatcgattgccaccaaccacgacgcctccaacgtttcagaatcgatcagaggttcatctctttttacaatcacagtttcatgctctatggttgcactatttatttcgaacaacatattatcagtgaccctatattcttgcttagtggaatacatacatctatgattagtgaggttgacatgtggggtccactttctcttttttttattgtcacataagcaccacatcagtgaaaccagatatctataccactagaggatttaatttaacccggttttgtaagttgggagattatgatttctggtattacggttagggtattaaattaactcgacgtaaagatgagggatgataggtggacttattctaatctgtcatgcatgcatggacagcccatacgccatagtggcatagagagcccactagccaaattttgatatctgaaagtgtggcccgtagtagccaaggtcaaatgtaatgttcaagcccaaatatgatcctgcacgtacgcatgtctactgggtggaaagaagccttatgtctacggtctactgaacacgatttgtgggctacattctgggcaccgttcacccggctaatttttgcggaaaaagtccacattgaatcccttaaatatcggccgaatctaattcataccccttaacaagaaaactggataagatggctccccgaactattaaaacggtgtaatttgactccctagatggttttgcaagcggttttggctgacgtggcacctacgtggcggtgctgacctggttttcatcccacgtgtcgcttacatggaataagaggaaaaaagaagtgggacccaccgacatgtggccccacaggtcatcctccctctacttcccatcttcctcctcccccccccctctctctctctctctcttatctctctttctcggcggcggcgcggagccccagcaacaagcagcggcggcgggcggggcgcgctccagcgcacggtgcaggccctccgtgtcatcgtccgtggcgtgctcgaggagccctgcgaaggcgtcgtcggggagcctaggcgctgacgggaagcaggcccagcactagccccgcgatggtggagaggaagatggagaggagctgccacgcctgggggctcacctcggcagggtgcgaggcgaggaagcgcacggcgaggccgaccgcgagggacacgaggagaggaacgagcttcgcaccggtgggggccaggctgtccgcctcaagtttgggtgttttcgaggcgaggagagaggtgggatgcgacggcggagaggcgttagcattgttctcggccgtcccttccttcccggaaaaaggaaatgatacgatgatgcgaggagagggagagagagagtgtgaggtgtggggtagggagaggggaacgacagcgatgtggcggcgccggagctggtgcagggataggagatcgagcgagctgtggaggctagagccgctggctttggcgaggaaggcgatgtggatgcggggagatggactggctgctctccatcgcaaactctatcgtcgagctgacgagatcaccctgtcgatccaagagctccccgacggcggggggcggttcgaggtcatagtgctgcgccgtagcgacatgtacatgaatctcgtggaggccgtgccgccgccgttgctccagcacccgtcggccgtcgacccgcctgcctccgccacagccgaagggaaaaagaaaagagaaggagagagagggaggaggaagaagggttggagtgagaggatgacatgtgggtcccataatattctttttgtgtgaatgataaatgggtcccacatatatattttaaattctaatgccacataagcgtcatgtggtacgaagaccaagttaacactgccacatcagcgccacatcagcaaaaccaccctctaaaaccaccgaggaagtcaaattacaccggttttaatagttcggggagccatcttatccggttttcttgttaaggggtacaaattagattcggccgatatttaagggagtcaaagtggactttttccaatttttgcttgggagagacaacaaagggttttgggttgggctgattctcagctgaaattctgtaatgttaaaatttggacaaatttgactggagttaagttcggtgattagttgtgcatgccaccaataatgagtagtccaatatatcatcaataagatttatttctaggagttatcatctattttacaaagctagtccccttccctgctcaaccctaccatcgttgtcttcttctatttgtatgttggaagtcattatgttctgttgaagtatcaaagtttgtttgaccctacgtaccacaatcatcctctctctccaataataaagtcggccagtgagactatgaaggataagcccatcaccagatcttcatcgtcgagtgagaaacagtccagatcactggctaaggcccaaggttcaaaagaactctgaatagcctagcaactggggaatgctatgctgacaaagcgacgttataccggatagaaatacgcctagttattagtgccatttattctatcaatggaaaaaaaaactttgcatgagaaaaagtacatgcttagagcgggtataatagcagactattagccagctattaaacatattttaataagataaaagataagagataaaagcagtgggctacagatctgtagccagttgcagcacggactctaaaataacatacgtatatgacatgtgggaccatatattaatagtatagtaagctattattgtatgaattggctattagatcggctattagatcggctatagatgaattggagctagtagtggacgattctattaaacttgctcttagtagatgatagcatggtgtaccacatcagcgatagatatagcatcatataagtgtggcatacctagctcgggcgaatagcttttgcgtctacggtcaacacattttttttcttagcaaaataaacactcctatatcttggtaaagttgagaagggatgccaaccaaaacccagcatgaatctcttctaatctagcttccgattacagaagtttctactcccaagaagcaagaagaggtcatatttttttttccaaagcaaagactcgcatttcttttatttccttgtgcaacgtgacatacctttaggcggtgtacgcaaatcctgttggtagatggatcataagtcacaactttttaaaaatgtcatcggtgataataaagactgtgtacaaacacactaccctatgataaataggtcgcgacgactagaaggcatgagtacattattatgaaaacaatcatgaatactcactccgtttcataacgtaagttatttcataacgtaaattattttagtattttctacatttatattaatattaataaatctagacattaatatgcatgtggaaaatgctagaatgacttacattgtgaaatggatggagtatctcacaaacacatatctataatgtgtgcagtcctaacaaattttagacaaaaaaaaatacgatcaccgagaggaaaatatcgttaaagttttaggactaccaaattttagatgcggtatttcagtactactttgattgataaattttgctataggacactactattgtgtggttttagccgcgggacactgtccaaactcacttttaggggaaaacactccataaacatggtaatttgccaatgaacaccgtgccaataaaaataatgatttccggttgaggagagagaaatcacgtgaaatgttaaaaatgctcttgggcccacatgtcagctctccatctctcttcctctctttctttttctttctcccttggcgctgcgggaggtgctcgacgcggcgcagtgtgctgtcgtgtcggcggcagggaggtgctcaagacgtgcggcaccacgccgctgctgcgcgcggtgcccgtactgctgcgtgccgccgctgcgggcgggctcagccgggcactccggctccagtcgtgcaggtactcctgcggcgagtgcctgttcccggaggcgcaaccgttcccgcacgctgactttgccgacgaggtggcgtacctcgacggcgccctcccctgtgaggtcctactcttccgccactccgccgtgatgccgccgtcgtcgtcgcccggtgcctcgcacaggtggcacgtctacttggcatcttcgtcgtcgtcgtcgttcgtggcgcgacgcggctcacggtggaggtgtgcatgacggagctggaccgcggcctagccgcgcggttctaccagcgccccggcaacggccggaccaaccacgccatcggcgacgagttgacggcgcgtcggggatcggcggcgtggtggaccgctaggccaccgtctcggtctccatctcctacaccgccggtgctgcgtcatcactctgcacgccggtggccgaagccctggagaaagaaaaagaaagagaggaagagagatggccagctgacatgcccaagagcatttttgacatttcatgtgatttctctctcctcctcaaccggaaatcattattttaatcggcgcggtgtccattggcaaattaccatgtttatggagtgtttcccccaaagtgagtttgagcagtgtctcacgactaaaaccacacaataacagtgtcctattgcaaaatttgccactttgatactacctccgtcccaaaatagccttttttgagtttttgtttgtaatatttgactattcgtcttatttaaaagattatagaatagttatttattttgtttgtgacttgctttattatcaaaaatactttaattatgacttatcttttttatatttacactaagtttttaaataaaataaacggtcaaacgacatctaatttgggacgtacggagcagcggacaacaaatttgtagccagctgcagcatggactttaagatacatgtgtgtatgacaggtgggaccagacattaattatgtattacatgtttattgataactattacatgaattggctattaaattgactatagttgatttggagcctatagttagctataatactactacctccatattttaatgtacgacgccattgactttttatccaacgtttgaccattcgtcttattaaaaaatttatgtaattatcatttattttattgtgacttgattcatcatcaaatgttctttaagcatgacataaatattttcatgtttgcataaaaattttgaataagacgaatggtcaaacattagataaaaatcaatagcgtcatacattaaaatacggagggagtattaaacttgctcttatgatactctggatttcacttagtttgcaagagccaggtgtgtttgcaagagcaagttcccaacactcccctctcgtttttcgcgtacacgcttttcaaactgctaaacggtgtgttttttgaaaaaaatttctatacaaaagttgtttaaaaaaatcatattgatccattttcgaaaaaaaaattaactagtacttaattaatcacgtgttaatggaccgctccgtttttcgtggataggagatgggttcccaacggggatggattctaatagctcgagtgg

SEQ ID NO: 24769 - DNA, 43203 bp, Oryza sativa
  unsure (1)..(43203): unsure at all n locations
aaattaggcaggccaacctggcccctccgcacgcaacgccgcatcccggcgccatcgaaccctccaaaagcctcgtttaaagcccccacgaaacaccaccacctccttctccctccctccctcctcgatcccattccccccccccctcttatctctctccccaatctcctccacacagcaatggcgaagccgaggctgctcgccctcctcctcctcgccgccctcctcctcgccctctccttctcgcacggtacgcaggcgctcacctcaccgatctctcgctgtgttaactagattccttcttcgattggttaatttcatgatttggtgtggtgtggtgtgtgcggtcgatcgatgcaggggaagcgaaggacgtgcagctggtgaagccggcgcgccgctacgggcggtggcgctcggccctccaggccggcgatgggatggtgtcgacggtggcggactactccgatcccaagcccaacaccaacccccgcggcggcgtgctccccccgaccgaccccaactcgccgccggcgcactgaccgccgccgaccaccgtcgatctacggtctccttccaccccggtcagccggcgacgtatctgcgtataaatacactatatatactgtactaccgtataaatacctagtagtagtaaatacggcgtataaattcggaatacatgtgcgtaattaagtagtagaggaagaggaaggatcggaataagctgacggcgttcttctccttgggcatatacggtgcagtgaccgtatacatgtacgcgtacatacgtatacatgtacgcgtatacgtatgcgcggcgtacacactagccaattattgaagtagacctagctagacttgtgcttgactgtctgtcatgtgtgtgtgtgattattgcgtgtctgatgttgatcgtcgttgattgattattatgagattctgaacaatgttttgtttgattaatttggacgattaattgttactagaacgtatacacgtgcgtgtgtgtaatgttgatgtgtcttgcatttcgtccccgttgtatcacaaccgatccatgtaatttgcaataaaatcatcaataataatgtgtcattgttggatgtaacagagtgtttttttgtcttcagttattcgtctctattccattttccgtgaatttaatttattcctgtataacttgatatatatatctatccatggatgtgacaaactaacaacattatatctatctctgtcgaccactgaacggtctgggtttgtgcatgtgaaatcaattagaacaccatttttcagtgagcgcgcacaaatatagtttatagtttagttaagctaattaaacaagagccaagaaatcattcatcttcagttattggactgctcttgcaaatgtggtcaactcatcttcattctcaacggtcaatgaaacacgatactgttcagaacttcagacatgttttggcatgcattgtcggcgagacttaattatagcttgcatttctgatgttaattaagcttcctcacggtgtgcatcgtcgttggttgcaagcaaggtttctttctttttcttttaagtatttgaaatttggttgcaagcaaggtgatgatgaaaattggtacactagtttaatttaggctcgtctacattgcaaggatcatgaacttttcagacagacctcttacatggtgaaattgacgatggaaacggtttgattcagcagaaatatattcggacaatcttctttgttctcgatcaaagatcctgccttagtttgatgtcatcgtccgatcctaggtgtttttttcattggctgaattagctgtgtgccctttcttcgagcaccaatcatgcttttgcaactagggataccaaaaaatcattgcttgcttgaccaacacaacaccatatatatgactatatgagcatcgatcacatacatgaatatttggccatcgatctgggtcaactcatcgggctggctgctgcagaatgtgatctccaagttcaattctagtttgatctgcaccaaccctaagttttagtctgatcggatctcattttctttctcggatataagtccatcaagccatgatgcccgtctccaaactgcaggaaagtgtacgtgggctgactagctgagtgacgtgccaccagttagcaaattgagctgctagctactccatcaatgtactctctctatcctaataaaatgaatctagaaaagattcatcctagattcattatattaggatggaccacatgacataaattatttattttgggatgaagaaagtaagcacctttgaaaaaaaaatatcgattaagttgagaggtgaaattaaatggccagattcatttagataagggtatagattaaatgagagatggtctccccgtaggaaaaaaaaaggaaacaatttcatccaaaaaataagatttttgcaaaaaaaaatgaattaaacaaaatttattcaaattttgaaatatttcagaccaaaatatttcaaaatatctgcaattttcaaatgtttggttctatcaaataggccaccttgtgaagtagttatactttagtagattcttttgatcggttggaacatgtcaagctcgtgatgggtcggtcactcaccgatcaatgcatccatccgacgatgacgcattcacgcagaaagaaaactaaattgtccacggcgatgccaaaacggaaaaaaaaaagggagaagaatttcttataaacatcttcatttaatttggtcagccttgagacttgagagattaatttgcatggagatggagccatggatggccaaaccaagaagaggagagctttatctctcattcttttcgtcgtcacattgcctaactagctccgatcgaaagaggtaggagtagaatagtagtaggatggatgaacaggacggctgtggctgtgttcggaagcagccgttcggcccgttcccaacaagcacagtgctaaaaaaaagggagcacagaaaacggagcagtacattatcgtgtgattaattaagtattagctattttttaaaaaaatggatcaatatgattttttaagcaactttcatataaaaactttaaaaaaaatataccgtttagcagtttaaaaaacgtacgttcggaacacgaggaagatgagttaggaacctgagcgaagaacacagccgaattgatgattgcctcccctttgcatatgtgaattatggatgtgtttggtatccagaaagaaatagtagtggggtctgaacttatagtccccctcccatctacatacgataaaaaaatttaatggggttttcgtggggctcttatagtcttcacgccagtagtgggggctcgagaccccgccgcccccatgctggatccgctcctgcatgtgcacaaaccatcagattgatctgattgtctgaaacttaataaattattcagaaatggaagagatgctatttaagtgcttcctaggtgtgggtcccggatgttttcgtgccaatcggtcaagcattttgactcatcagtttgtagtttacctcttgttaaatgtgagttgcacagtttagaaatcttggatcactggacttgtctcgtactttcccttgttttcttttacagttttgacatgagtcgcgtatgtatagtgtgtatactgcggcgtacatgccggcatatcggcacaaatgccgttggtgatattcggatatgtttgacgccttgacgtcgtgatcgatggaacagcagacaaaagctagagcaagttgggggtggcctgatctgatcatagttcagaagctagctgccgaccttttccagctccaggagagtactccatccgtctaaaaaaacataaatatagattttcgtgtccaacatttaaccgttcgttttatttaaaaaaattataaaaaaaattaaaaagacaaatcatgcttaaagtattaatcatgttttatcatctaacaacaataaaaatactaattataaaaaaaatttatatgagacgaacagttaaacgttaggcatgaaaacctaggtttatctaaaattaggacggagagagtactcctgagcagcagctggctaggccggccgacgacgactctgttggattggatcgatctgtgctggattttcatttatttttaaaacttattttataaatagatctttgaagaaatttattttatgagaatggactttttctcggcgtcagtaaccctagtatatgttgtatcggaggacccatttgtaagactttttttatattatagttatttttaaaatattttttgtaaatagattatcaacgttaatgtcattaacgccgttccccttcgtaacagtgatttagattccgcaaaaggaccagagcgtcagcgccagcgtcattggcgtcgagacgttagacctcgacaacaataaccttagcaccgaaaaaaggggttgatatgtgaaataagtttttacatatgtatatttgtaaaatatttttttgaaaataaataaaatgtaaaaagtccagtcgattgatctgtgtgcatgcccttcttcgtcgcgacgttgcaggtcatggtcatcgagaattcgagaaggacatatgcatgagtgtgtctttgtcatatgtatagtactagggccgtaagggaataagatgtctcatcggatatgcatgcatgtgattgtgtgtcaactccagctgaagtctgaacatttttttttaattatacacggaagagtgatgatatggtgggagaggcataggtggtgtttgaatctcctagagataaaagacgaagataaatattaagtgtttcacataaaacgagataataataatgtgtaattaattgagttttaatcattataaacttgaaaaatgattaatctgatattttagaacaactttcatatagaaagttttcgtatgaaatgcaccatttaacagtttgaaaagtgtgtcacttttatccaaaagtttatttggagaaaataacagagtatggcctgttttagttcccactttttcttacttccaacttttccatcacatctcaaaactttcctacacacacaaacttccaacttttccatcacatcatttcaattccaatcaaactttcaattttgacgtaaactaaacgcgccctatgtttggtacatctccacagccattcagcctgagcgattttttaaattacagaactgcgacctcttttgtcaaacactttgtcagcgagagcacataactttttctagataatggaataaaatattttggcatttgcttcaacaagctccagccaaatattctggcctttgctcaattattccggcctttgcgcatatctttttttgcctccagtcttgtgctactgatcaactagtagtgggtactatgtagggtggaaacgagccgagccgagccagttacaatggctcataacaagttaggcttggtttggctcggctcggttagggaaacgagctaaaacatgagcttggctcggctcgtttcctggctcgagccagctcgagctggctggtgagccttccgttgaagctgtataatttgtaatcattaagaaaaacaataacaaatcatcaacatgtaaaattaaaataactttatatattcaattcatcaaatatagatgataaattacatattgacaaataataactccactaataaaataaaatcatccatataaatgcatgatggtctaggctcacgagccaaataaaacggcttgcgagccagctcgggctcggcttgtttcagaaacgagctgaaaaagagacttgggattgactcatttggcattcaaagccgagtcaagctaaacgagctcgagagtgtgcagcggtcagggccggccctgagccagtgcagacggtgcgaccgcactagacctctaaaaattaggggcctccaaaatatatatattatggtatcagacctgataggcttagaggaaagacagaagaccgatcgacgatcgagcatattatgactgcttggttgtattttagacttattagtgtgaaattcgttaatgacaataagcttttaaatattatcttgtatttttatggtgaatgggggtttttattttttgttccgcaccaggccaccaaaaagttagggccggccctggcagcggtgtactcacagctgcacgagtgcgcgtggcgtcgcgacggaacaaggctagcggcaacggtggtagccgggccggctagccgtgcgcacacatcactgatcacatattcacttgtggtgtggttgtgccgtgctgtgcgtgcatcggtgcatccgaggcatcagccaacaaacaacgcgaagaagatagaaaatcacgtcgctgatgggcttctcgtaatctaggattaatttgtggttaaatctgaagttcgtccatgaaccgtaataccaaatacgacgcgttcctaaactcttagggcctgtttagctgatattttctgcagctgcacggcaactagctgcagcagcaagcaacacaacacaattacagctgcacgaacacaagcactgcagctgcagcgctgccacatgaatgacagccgaacaggctcttaaaattagtgcaaataaggtctcatggtaggttggacggcagttttagttaatgtgacacttatttggtgttgacgtaacacttaaagtaaaaaattaacatgagacccacgtgttaatgaatctacttctactatactacttataagaaataaaaataagaggtgtttccatcatccgtctaaataaaaaaatagaaaaaaaacctaaaataaaaaagtccgattccccataagaaagtggcgaaaataaaaaaaactaccgtatccgattcccatctaattttgttcgttttctctttttttctgtttttttccgttttattttcttttcccgtttcttttttttattcactttttttccggttttctttgtccgttttcttttcccctttttgcgtattttcttttcgccgttttttctttcaccaatttttctgtttatttcttttatcgctatatttttttgcggttttttcatcgggccaaacccagcgccgccgccacgttgattttcctcctcatatgcttcctcctcctatttactgcaataaccgattcctcactactctctcattattttccccatgaatctactctctcattattttccccatgaattcccctttcgattcagctttaattcaccagattgaatctccatttaatcatcgttattttttatcccaagtatcccaagttttgcagattgcttcgattttgatgaaccatttaattgtcgtcattttttatcccgagttttgcttattgctttaattttaataaaaaaaggggaaaagggagatcaagtggataaaaatccctcaataattttggatatggagaaagattcgaccggatttgatagagatgatcggcttcgttagtcatcgtacgggtacggaactaagcgagctcgagtggattaccgtatttgatgggaggatcggctccgtcatggtataagactatgggagctcgagcggattaccggatttgatgggaggatcggctttgtaatggtatggacacgatactgttcgacttgggcctacaactccatttgtggactgagccaaagagaggtagactaagcagagggagatagcggactgtactaagactagagctgaaaaggacagaaggaatgtgcgtttgtttggtccaaaacgtacgggcattaaagggagtatagtgcgtaggataaaaaatatttttacccgttacaacgcacgagcatttttttttagtatgagttaaaaataaaaattgcagtgtcacccacattgccgtgacaccctccaacctcccactcctctccggcatccacgcgtcccgtgatctaatagtcccgttcgccggcccaactttgtaggactaatacacagccctgttccggtgatcgggctgaaatataatgggccttacgtccaatggaagctaggctgtgtgagcaagctggatgggccggtaggcccattatacgcctgagctgattcggcttgtcatttttcctttgagggctgctatataaggaagggactacctatacatttgtcgacaaattttttcctaaaaatttgacagatgtaattatagtacaatcgtagtgtaattacactgtaaattgcatgtaactacagtgtaacttatatgtaagtttcacataattttgaatcgttagatctattacaagatttgttttggtgaggaagaaaacaaatcatagcacacacatatgtgaaagaatttgttcccacgacctccattttaccgaaataacatgttacgtagagatttttgaaagttacatacaagttacactatagttacagtgtaattgcatgtaagatacagtgtaattacactacgattgtactgtaattacatccgtcaaatttttagggaaaaatttgtcgacaaatatatagcaaaatcgataatggaatcccgttttcgaacgggatgatactggttagttatcagaaccggcatcgggtgacacatatcaggtatcaggcgattctaccatattttcaggtgaaactcacgacgtatcaggtgatacctatcagatatcatgcgatttttgccacatataaggtgatacttacgaggtatcaggtgatacctatcaggtattacgcgatgcctattagatgatacttgtgatgtatcaggtgatacctatcaggaatcacgcgataccagccaggtatcacgcgatacatacccgacatcgacgctgacgaccactgccgccctagtgccccttcctccctagctccggccatcgccgccactccaccgccaccccctcccatcccctagatctggctaccaccaccgttgcccctccctcccctggctccggccaccgtcgttgctctctcctccagctccggccaccgtcgccgccccctaccctggctccagccaacgccgccatcccctcccatcccctggatccggctaccaccaccgttgccccttcctcccccggcttcggccaccgttgtcgttccctcccccggcttcggccaccgccgttgctccctcccccggctccggccactgtcgccgcccccttccccagctccggccaccgctgccacccctccctcggctctttggctccggccaccgccgccgccctatcccttcgctctctggctccagctgccggtgcccaggctccggccaccgccgttgctctctccctcggctccggccaccaccaccgctctccccccgtcgctggctcgggccttgtgccttgtgctcttgcggctgatggaggtggaggggaagctatcccgttagagcaacggtatcccgtcccctagcattcctgttttcctttctaaaaggtagatgtttttctaatggatttagtagaagttcattattattattttttcaacaaaaataaacaactatcatattgatcgatcgatggcatggagtatgtggatctatgatagatcgatggcatggagtatgtggatctcaagaaacaacgtgatattcagaggcataaatccttattttcatatatgtaaggatatattcaaaaaataatttgccttggttatccttagggcatagggcaaaagatagtctcaaactcctaatgtcggaatggctagacaacctttgatttttttttaatgtacatatgtaatttgtaatctttttatactatatatatttactcaatgtaggagcctctccgatatttccatttttttttgaaaaaaaacctgttaaactgactcaggtatgcagaagtagttgataatacatggtgcgttcgattgtaccttttcccatcttgtattactctctcttttttacacgcacgtttctcaaactgataaacagtgtgtttcttataaaaaatttatatagcaaagtatatttaaaaatcatattaatttatttttaagttttttaagttcatacttaattaaccatgcgcttataagatacttcattttgcttgccgggaggagaaactaccaactcatttcagtatcagctgatctttcagacaatccaaatccgtagttaataatctgctagtgttttgttaggaccataccagtcagagctgactggtcatggtgttcgattaattgttgatggagtcatatcgtggagaaagtaattatgagttattcttttatttttttcattgccttggttttttaagttccatctattgttcgtctccatttagtttttaggttttttttatacaatcctcatagattagatttgtagataatttagggtttgtcttccatgatatttttggagttaggcttcttcaaagacttttgtcttttctatttcttccttggtggtggctatttcgtccaaaaggtcatccattaagacgtactggggttaatttgtttgaaaggttgttcgatgatcagatcgacacaatgattttgggatcatcaactttttatgatattaatttgctgttctgttagaaattaattttggggtttttcttccattttacttatctcagaattggttattgttgtgactgcaatcgtccgttcgtattgcttatggtatcttgtggtatttcaagatgtgaagcatctttgttttattctagtttttctagtttttcaagagatttaatttgtttctagtttttctaacagaagggttatactttctcctcttatttaataaatctaccctcctttgcggaaaaagtgaaaaaaaaaagtaagcacgacaagtaaaattagaacaccaattgtgagaagaagcagacaaaacagatatgtgcattttttccacacttgtatttattttgtcctcgtgaagaagagacaaaagcaataccgtaccaccaggtcctttagcacgaacacaggcaaaaaaacaatagtgtatttattgaatatatgtgcaaccaaaacttttgaagattcaaatttcgtccaaattttctcagaacagttatatggttctccagactataataactccatatctttttttagggaattttttttgagggaagaataactccatatcttattctttttctgtgatttttgtgtacatgcatgatcagatgctgcacatgtatctatcgttgaaagcgtctatgatcatttgatcgagctacggttggtaagccgtaaggaaataacgaagtaaaaaaaaatctatgtgcgaaatttttatatcgatattatttgtagtttaaaaatcaatacagattacgatgaaaaaagaagtacgaaactggcttccttgttgtgtatatgcatgacgcgtcagcttatttggcttatgattttcctttaccatgtgcttttctaaaggatttagtagcattttttttattttttcaacaaaataaagaagtattaaactgacccaggcaccatatgcatatcggctgagaatatgtggctgcgtcaaattcccaggaggcgaccaatctatatcaactgatctttcgggcgatccaaatcatgtttaataatgctagttagtgttttgttaggactcatcaggaccatacatgatacatagcagtcagagctgactggtcatagtgttaggtggttaattactgatggaatcaccatggagaaatgcggcaggcataagccaattctatttttcccttgcactgcaaattaatcttgtacgacaagtaaaaactccacttttttagaagaaacagaccgcaattagatggttctatttttttttctatctgatcttgtgtgccattttctcttgtctaggagaagaagagatattagcaataccatcatgtccttccgcgtgaagaaaggcaaaaaatttctattttttttcctgttgaacatataaaaagtaggagtagtaaaacttttgattattccagccaaaatttcctcactgtttcatttattctctagactagaaaaatgcatccttatcgtgttcttttctttacctccagcatcatatgctgccaacagataagtgtttttttaattaacaacatcagacgatgcaatgatttatactgatagagtatgaaaaaaataaaaatattatcaccgagagcaataatcaggaaaattataggtgttttgttgaatgtagcgtaccaagggtttaccacagcaatgaccagccaatcaaccctccccctggggcataagccagtctagcttatttctttgtataacaaaaactcttttcctgctaatatattgacgtgtaatttttttacgttcatgaaaaaaagaccagccaatcaacgctatatattgatagtagatctgtagaacaaaatctacccccactaatagcatccatacgaaattgtcatcacgtacacatattcagacattcagtcaaccgctcgaccaccctaaccaccccctggctcaccgtgccaccttgccaccctaaccacagtcacgtacacagtgttagggcatcaccaatatttactacctactttgagaataagggtgggccctatgttaatgggtattagttcttgttatagctacaatggtgaaataacaaaagtgggtagtaagctgggccgcacaaccaatagccatgagagagggatgagaaaaatcatttgtttattacttatggctaggtagtaagcatattacctagtatttattacttactactttcacaatgtatacaacctgatagaagtagtattttattttttattacccactttatatgcaggatgcaattactgatggaagaaatgcagcaggcataagccaattctatttttcccttgcactgcaaattaatcttgtatgacaagtaaaaacaccactttttgagaaggaacagaccgcaaaatagatggttcttttttttttcttctatgatcttgtgtgcctttttctcttgtcttggtgaagaggagataatagcaataccgtcatgtccttccgcgtgaagaaaggcaaaaaaattctaatttttttcctgatgaacatataaaggtagtaaaacttttgattattccagccaaaatttcctcaccgttttatttattctcttagactagaaaaatgcattcttatcgtgtcatttccttttacctccagcatcagatgctgccaacgtataagtgtttttttttaacgaatagcatcaggcgatgcaatgttttatattcatggagcatgaaaagaattacaaaaattaccaccctagaggataataataaggaaaattataagtgttttgttgaatgtaacttaccaagggtttaccacagcaatgaccagccgatcaaccctatatatcgatcgtagatctctgtagaaaaaaaaatctgcccccactagtagatagcgtccatacgaaattgtcatcacacatcttaagacattcagtcaaccgctcgaccaccctaaccaccccctggccccccgtccaccggatcccactcgcccctctccccaccgtgagacacatcaaattcaaccgagaaatgcaaaaaaaaaaaagaacggaggagcagtagagaacaaggcgcaaatgacaacaaagacaaaagacaaaagggagaaaggaaaaaaaaaacaaacgttgcctccttccaaaccccgaacgcgaccgcacgccaagtccccacgctgacccacctcgctgcgtgcccgcccgcgacgtcgccgtccgctctcccccccgccacgcccaacccccgaacctcccgcgaaccatctctctcccccacaaacccaaaccaacccgttccacgtctttccccacgaccacgaccgttcatttctttcccacttccccgcgagaccgcctcaatttcctattttttcctttccttccttttccacgcgactctctccttccggcttccgcgaaccctccttccttcccgccttcgcctcgcctcgccttacgcccagagctatatatgccgtccccgccgttgatcccggcaaggcacacgcaagacacaaccggcaacccaacccaactcggagacgcggacgaagcaaaggtagaggagacaatctctcgagagaagagaagcggacggaagcaactgatttatttggccatggaggcagcgtattcggcgccgagcacgtcgtcgacctactcgttccacttctccatggcgcaggccgtgctcaccatctccctcaacgtcatcgccatcggcctctccgccctcgtcaaatcctcctcctcctcctcatcgagttcgtcttcccggcgccgcgccgctgcagcgcccgcggtggcgccgccggcggcggttgacctggacacggttcttggcctgatgggcggcgcgggcggcgccgcgccgtcggtggggttcgaggaggcgtccgcgctgttcgagtaggaggaggccaccctgggggaggccgcggcggcgttccgcgtcttcgaccgcaacggcgacggcttcatcgacgccggcgagctcgggagcgtgctcgcctcgctcgggttcgccgccggcgccggccacgccgagtgccagcgcatgatcgacgcctacgacgcggacaaggacggcagggtcgatttccgcgagttcctcaagttcatggagacggctgcggcctagggaatccacaggattcccatggcgtcacttctctgcaaattctttgttctttcgttctatttttctctttaatcgacttcgatcgctcagccgaatgaagaacggcagcatgtgtatgcttatgatcagtttaggtgctgtttggatcatggcattacaaagagccaagaaacgggttgtgttttacttgaactgaaatcgatggaaatcgaattgaaatgacaatttccgtgcttgggttctatccctgaatcaaattccttacccttggcttaaaaaacagaccgaacagtttttctatcctctacctaaagcatgtgcctcatctgcttatgcttatcagacaaattttaaattttcaaccttaaattttaaagttgattttgagatttttttcattgaaatttatttttagcttttgcttttaaatcgctaagaacacgtatataaaagtctatttaccaattactttttatttgcaaatatgccaacgatggctccgtacatgtggaaaggacttagtaagagaatatgaacgaggtttaaatttcactgattcaatttgatttaattaagcctttatataaatggtaaacatgtctccgatcattgaactctcattgattttagtttacaattgatattcaggcccatcaaaaccttccagggctcctttagattgaaggaaacttatagtagaatttttagaggattaaaaatttggaatctgtagagaagaaaaacaggattgctaaaaaaaaggtcgctacatttttcacttaattttagtccattgttctcctatttgtaggtataagcttttaattctcatatctcatctttcatgtaaataataaatactccttttttttaataatgggaataattgtattagaactgaaattacacccggtctctgcatcgactggagatgcacacgacctaaaataataaacacgtttaatcctaattttcttatacattgtgtgttagaaaatttgcattgtaaatgtttcttacaatgtaattataaacttgcagtgtacttacattataggtgtagaggtaatttacaaaagacgacttcttttttggaaattgtgatgccataacaaaaggcacactttctaaaaaaaatgcatctttataaaggaataggattgtaaaattctcaaggatatttttctttactaagtccgatgctatactgctcttttgcatgtgttttcctcccaaattctttctgtttcaattcctctgagccatctaaacacattatctcgagtgttattctgttctgaaatcttatgatattacatagcacttcctccgtttcacaatgtaagtcattctagcatttctcatatctagattcattaacatcaatatgaatatgggaaatgctagaatgatttacattgtgaaacggatgaagtacgtggtaatatattcctatgttttcatgtttcaaagctttggaatcatgggtttataattgctcagttaacatccctggcaagtccacgcctcttaggtcttataatggacgcatatcatatcctctacaataaatacagagaatatgatatgtttaaaaaatgtatatttttactgtaggttaaatgtatctgatatgctgcaaatgtatattcaggtatatttgtatatgatatactcatatatatttgtatatgtttaaaaaatgtatatttttactgaaggttaaatttatatgatatgctgtaaatgtatattcaggttaaatgtatatttgtagtatgatttaacctactgtcagggttatggataccacatatctaatagtagttgactaaatctcggcaagacccaccacataccatgtcctatacgaaagcaaccttcggatataggaggagttccgaataaggaaagacaaccagggttctacatggaaacgacaagtactactcggattgtatccatattggtttccttagttctacttggacaagggaacacctatgggtataaatacaagactccctaggaggggaagagagcggacacccaccagagagaaccaacacaatcaacatacacccaccagaagccacaacatacaagccaacatacgccaagacaagccgccggatatcgacatcagagatacgcctggatcgaccctatccggtaccttcagaggccggccgtagggatctagcactgtctctgattccgtcgggcgcgagctcgaggaggaaggctaccctgttgtcgactacgagtcagaccttcagaccgccatgtcgacaacagttagataggctaccccatatattgtactggtgtgattatggtgaataaaaagcaacatcggctccggccaacaggatgtagggctattacctgacaattcaggggtccgaacctgtataaaaatccctgtctccatctcttttaccttaatctcgcgtataccctagcatcgacgatcctcataccatgcaaataccagaattgcgacatcaaacgtcgacacctacaaatatacatttagcatatcatattcaggtaactgtagatgtttttagcagggtggctagtgaacagcacagcagtacagtacagaagtcccgcggatccttcctcctctttttcggatcatagttgggccaggcgaagaattttggcccatccagatcactccataaggcccatttcctattcggctcggctaagttgtcgcttggtgggcttcgggctcgtcgtcgtcgtcgtctcccctccccccacctgacttgagacggggagatgcggaggccgtcgccttcgccgccggcggcgaggggcccggcgctcgccgctgcggcggccgtcgtcgtgctacttccgtccatcttccccgcgatcttcaccccgcttggccgcgccttcccttccctcttctcggtgagcccccctcctcccctctctcctcctcgcgcggcccgaaattggagccgatgtgctgtgaagtaagattcaaagctactcttcgtagatttatgattggtagctccagggacccaatcacttgggatgagcaaaggtcgtcttccattttggcagatagctagttccttgtagtgtatgagggaagaattggtgtgtctaattgatgagaattttgcttgtgctcttctagtttaggttttatgatcttatatttgctttgagggttaactaggcagggttttgtcaattgtttgcaggagtggaatgcccctaagccaatgcatgagtctcttctgaatgaggctttgcggcgaacaattgtgagtacataatacttagctgaaaactggagtatttatgttggagcccatctgtaacttgtattttgtacagtcaaacgaacaaaagagagagctgtggtcaccattgccgtaccaaggttggaaaccatgcttgaagtcatcaagtgttcacggtaacctactgaaatggcatgattccgacagccgcagcgatagaaaatcgattattgatcagttgttctgataaattataggggtacctttggaacccactggatatatccaagtatttcttgatggtggactgaatcagcaaagaatgggggtaacacacttcttatgcattgatgctatgatatataacttaacataactggcatccttgggactttagattatccaactctttcctttctgttctttagatatgtgatgcggttgctgttgctaaaattctgaatgcgtctcttgtgatcccacatcttgaagtaaatcctgtttggaaagacacaaggtgcttttggagtctcggagcactatatttttaatttccattttccactgttgaattttaagtatagtttacctttttgtattgtagctcctttgaagaaatttttgatgtggatcattttatcaacaccttaaaagctgaagtttcaatagtcaaagttctcccaaaaaaattttcctggagcacaagagagtactatggtacaggcatccgtgctacaagaataaaaaccgcacctgttcatgcctctgcaagttggtatctggagaatgtcagtcctatccttcaaaggtttgtgaaaaaaattgacttggattgtttctctattagtcaaacatgcgctttgtttattgagtcagcttcatagacttctctgaaataattggctcaagtcacgccttgcaatggtcttcatatatgtagctggtggtcaattaaggttacggagaaatggtcataacatttagcctaggtcaatttccactggtctagctccatatgtgttaacatgacatcctgtcattgtttaataactttgttagttggtcaatttacaaggcaaatcgtttagcagtcatcttaccttccatttgtttccttgcagctatggcattgctgccattgcccccttttctcaccgtcttgcatttgatgacttgcctgtggacattcagcatctgcgttgcaaagttaacttccaagctcttgttttcctgcctcacattatctcactgggggagactcttgtgaaacgcttgagatctcccgtccagggccaatctggtgaacttatccaagaagttggagaagacacaaaccaagccggaaaatatgcagttttgcatctccgttttgataaggtaaatggaaacttctccaatacattttttctgtggatccacagtgtatgtgcattgttgtgccctttaaaacatttctgcttctgatcaatttttcaggatatggctgcacattctgcttgtgacttcggtggtggcagagctgagagattagctctggctaagtacagacaagtcatctggcaagggagggtattaaattcacagctaactgatgaggagcttcggaacttgggacgctgcccattgactccagaagaaattgggctgttactggcagctcttggatttgacagcagaactcgaatctatctagcctctcacaaggtttgactcttctgtgtgtttaccatttttttttctggtggtattaggaaggtctaatatacataacgtattaaggtatacggcggggaagccagaatttctagcctgcgcaaacttttccccctaatggaggacaagaggagccttgcgtcggaagaggagctgactaatgttgaaggcaaggcttctgttctagcagctcttgactactatatcagcatgcacagcgacattttcatctctgcatctcctgggaatatgcacaacgcactggtatgttctgttcgatcttgaatttgcttgattgcttcctttgttactggtcctgactagaataatttgttgaaatttagatggctcaccgtacctttgagaatatgaagaccataaggccaaacatggcattgcttgggcgcatctttgttaacaagagcatggagtggttggaatttcaggaggctgtacaagcagggcacaagggtagatacgggcaaatcagactgaggaaaccaaagcaatctatttatacttaccctgctccagactgtatgtgtcaagggtagactgctaaattttgcaacaaaagactagattctttagtgtgtgaagctgaaggatttttgctcggcgaccagtgaatgttacaatgaggttctaattgttgtcagtttcttaggacgacaaggttctttggatatagggttgggaagaagttttggttgacccaagcattcagctgacttaatttttaccctagaaaaaaaattcagtctcgttccacattcagtgtaaaggttgtagtttcgtgagtgatgtagacttggcatattgtatctttttgtcctttccgtactacattctgtgcatatgtaagtaaacatggatctttcggccgtgaacttgtaagcacacatgttgagtttccaccagggttgaacttttcgatttcaagttcgaggtaaaaatcacacctcacccgtttaccgaaaactggtaaaaccgatggttatttggtcaatgccatacgaaaaccggctagctaatagcgatcggttttcacaaactgagatctctatcagtttccactgctctacttgagcatctgtttaatcccattttgggtatatacaattctaccttttgtatttgtcatcgtagcataaaaaacgtttccaatactgtgtgaaactgtgaaagtgccatttgccatgctgaggataattaagcgatgatgctaatgtgtggtggaacctcgtgtttctggggttcatctctagcttccaattgaagcagaatctgtgacatcaggttgtttggattggattgcatccattctcagccagtattttggaaataggtggggttgttttacatcaggttctcgaaccaggaacccagtaaccctagtaaaatgtacggaaacggaaagagattagggcatgtacaatggtgtttaatagcgggctcttttcgttatcatgcaagtaaatttggttacgtggaggaaagagagggaagaaatgagaaacatcgttgctatgcatttattaacggaaagtttgttgcatgagggtatagtaaaggaaagaagtataataaaaaaaatatttagtgcattaatgatttataaatcttattgtctctactattgtaggaggacggtctctagtgatattaattaatacagagagctcatattagactctacctttgtacatgcccttatacggaacccaagcctaaaccctaaccctagtaataaacggaaagagaacttatcaatcttcccagaaataacaaaaattctaaaattaattcgaatcggatttgatttaatttggactccgcaataaatacagacttccaaacagatcgtcgagcaccacagacgcttcaacgagttcgtccgtgatcaacaacagttcacacgcgtgttctacgagaaaactaaaccaaaatctccaatggcggaagcagcagcaaaggaggtcgccggcgccgccgccgccgccggcgacatgatcctgctgatcagctccgacggccagagattcgaggtggcgcaggcggtggcgagcatgtcgaggctggtgcgcaacatggtcgaggacgagtgcaccgacaacggcgtccccctccccaacgtcccctccgccgtcctcgccaaggtgctcgagtactgcagcgagcacgccgccgccgccgccgccgccggcgaggaggtggaggagctgaagagcttcgacgcggcgttcatcgaagtggacaacgcgacgctgttcgacctgatcctggccgcgaactacctcaacgtgccgtgcctgctggccctcgcgtgccagcgcgcggccgacctgatcagggggaagacggtggaggagatcagggccgagttcaacatcgccaacgacttcacgcccgaggaggaggcggagatccgcaaggagaacgcgtgggccttccaggactagattatcatcgaagcatagaatttttagatgtttctgatatgattctactatagaagccatttaggtggaagccatttaggtggtttatgtgtttagtcaccctcgctgcattagtttcttgctttgcagtaacagtttcgaggcatagtttatttattatcaatcgaaatcgaagctgtagctcctcgcagtgcttttggcccagggttagacaggtttcaatttcgatttcggctaaaatttcggtcatttcggcagaaccaaaattttctaaaattttgacacaatttaactgaatttgactaaattcaagaaaaaaaaccgaaaatttcgaccaagatattgacttgcgggaggaggggggtccgaaatttcgaaacaaaatttcaatcccgggctcagacatttcagctaaaaaagaaaacaacacaacaaaactacggattgatccgagcgagtcataatgcatatataaaacaattataagttgtaaaatagaatgtcagtcattgaaatcttggagctctcctcacgtcatggtggatcatttggtttgaacaaaatagaagaatcttcctggacacaagcacaacggaaagaggcagaagcaaatttcattgtagaagatagatatagatattgaccaacgagctttagcctttaaatccccctaaatgcttttattttactagctaaaagcaggtgttacaacggatattgtaaaaaaaatgaaaggaaagaaaaaaattataactttatagcatagttagttgattaagtatataggggctgtttatattgatgtcatttttaaccataccattttttgacaaagttaccaaaaaaaatgtctacgtttagttcgttgccaaatttgataaaaacataagaaatcctgccaaaattttgtcaaagacaaattttggtaatattgtcatcttactaaaattttggcatggcttattttagctacaatctgaacatgcccataatatcatatccaaagcaaacgcattcatgtgcgtagttcttataatccctatatatcagcttgtatttgttgcggactcgataccaccactatagattatagcctgttctgcaggacctcagctactgagttgcaatctcttctaaacgggaaactattctaatccctcgaggggatgtttccttgtttgctcaaaaaccatctaaatggttatgaaaaattctggaaaaatttgacaacattcatacaacacatatatataacttcacaaaatcttaagtccaaactcaactcacacgtcgagaaataaaaaagacaaattcagcgtatgaatagtagcgtactgtttatatctaaatttgtcttttttgtttctcgatgtgtagatcgaatttgaagatgaattttggtcgactagtaggtatcattatactctacattgtcaattttttcagattttttcacaactatttacatcgaatttgaaagaaaaaggtatacgaggggatatcccctcgagggattagaatccactccccttctaaaccccatctttgtttgtaacttacttcctccatcccaaaatatttaacgccgttgacttttttaaaaatgtttgaccgttcgtcttatttaaaaaaaattaagtaattattaattattttcctataatttgatttattgttaaatatacttttatgtatacatatagttttacacattttaaataagacgaacgattaaatatgttttaaaaagtcgacgacgttaaatatttagagaagtagggagtattatttttattccttctcttgccgtcgtttctttttgccgaggaagggggttcggccgcgaagcgcgacggccggagagagcagccaccgcactggatcgtcggcccttctcgccgctcgtagtgactgccaccacgtcggatactccggatgccttcatgctgccaactgccaaattccaggttcccacaggctttcggcccaatacaaaaatcggagcagcaaagcccgcctccagaaaaccctagcacatggccccccaccccacgaccacgagcgctatatatacatctcctcccaatggcttcatcccatcgccgccgccgccgcccgccgggaagctgatcccctcctccgattcgtctctagggttctctgattctcgccgtcgccggcgtcctctcttcccgctcagctgcttgttcgcgcctctcgtttctctttcgagcaacttcctgtttctttctctcttgggatttgggatcttggttttgggggattttcgatgggttgaagcaggtgatgaaagcaagacagggacatcagcaccctcttctcttttgagagagatgggaatgatcgactaagtctataatgggaatctctctgatgcttttttaccttccccccaactcagatctgctttgttttttttttcgttatttctcttctccttttggttttgattggtgttctgtggtacttagcttaattaatacgtgaatttgcggttcgtgttgctgccagtgatgcataaacaaatgcacgtattatcggattcttccgtgacgatctcacacaaatattgtcactaccactgaggcagctcagctcagcctttcttttttttttcagaagcatctactgttgtgcttttgatttgccaggtttttttatttcgtttgtttgttttttgtttgtagtttttttgtatctgcagttcgtttggtgcaaattgcctatgatggtgttaaatatactttgagcagctcgctgtgaaaaatacttacaatctgaggccattttcatctcgaatgcattgttaaatatgagttttttggtacaatttattctgaacagtacactccaaatattttcaggctatcttcctcaggggattgctcagaaagctcatgaagctaatacatttttttttgaattcttcacggaaggaaaacactagaaatttgtaagctgcaacctgattaattagggatggcaataggactggttgggcacggttagagcaaaaccatatctgacccgattcccaatattgcccacttaaaccctatccactagagttagtgggtaaaactccgttccgtatccatgcctggtgggcacggatatgtccggcgggtatactatggatcacatataaataataacttgaaagatatataatttaacaaagaaaaataagatcaatatttatcaaattattggttatcaacaataatttaaattatgtcataacttagtatcagttagcatcacaaatgaaccaatagaaagggtataagaaataaaaaataagtcaaaattagctaatataaatacatatgtatcgatcgggtatgggctacctacgggtaaaaaatgaaacctgtttgttgcccatgtcgtctttgggtctcgggtgggcgtgcccaagaaggtgaaccatcagaaagggtataagaaataaaaaatgagtcaaaattagctaatacatatgtatctgggttacctacggataaaaaatgaagcttgtttgttgcccatatcgtcttcgggtcttgggtgggcgtgctcatgggtaaaaagtcacaccatacctatcggattgggtctcgggtgggcgtgcccatgggtaaaaagtcacacccatacccatcggatcgggtaccacggatatccggacccatggataaaattgtcatccctattaccaaactctgtatgtattgaaagattccatctgcagcagaaacgcttcaagatttatataaactagcagaaccaaatgaaattcaacctaggcatttcacccagccacgaaacaaccaaatatttttctttttcgcccggaaataaaatcagctcagcgagatgtggagacggagaccgctgcgcttttctgatgtgttgattggaccgaaagcccagatcttttatgggcttcgaattgatgaggtgtgggcttttcttcaaaggaacacgtctattttgcatcctttcttcttcctcctgattgtattgcgtctctcaacaacaaaatcaggtgtataacgtatccttcagctttgagaatcggtacaaattgactcctatatatggtttaggaagcggtttctgcatatggtccacttgccagtgatatatgataaccaacatatatggtggtcccacgtgtcaattccttttctccttccccacctctccatccgccccgtctcgctcaacccgtccaactacgttgaggtccgcgagaaccggacggcctctgaatccgccacaagcatacacttagggcccatttgaattaaatgatttatctaggaatttcgtaggatttgcccatttgaatcaaaggatttatctaggaatttcgtaggattcaaatcctatagtaaattttcctacttggccctttgattcaaaggattgaagttttccaaatcctatgaaattcctatggaatggcacattgtatgttattttgacggaaatatagcaagagctctaacctcttggaaaattccctttgagtctatctctctcatccgattcctgcgttttttctgcgctccaatcaaacgaccattcctgtgtttttcttgtgttttgcaatcctctgttttacacttccattcctattagaatcctgtgttttcctatttctccattttttcaactctgggattcaaagaggcccttaatttcatagttgtttctacatgtcgccgtgtcggcagcaatgctgtgcttgttgatgtagtgggtggaggtgtagaaaagtacagatgccgatgtagatcagcatggcggtgggtaccagcgtgatcgacgaccggcacgacggcgacccaccaccggcgccccgcgagcagccgaggcggacaagcttgagctgcacgatgttgacgacgagcaccatggtcaggaacctgcacccaagcacacggagcctaccgccattgccaggctcccgacgcggagcgccactcggttgatcatcgccgccgcgagttctcttgatgagaatgctcgtccccgccgccgccgccacctcctgcacaggcgatcgaatcgagctgcgaagcgaagcgaggggttgctcttcggaaagcttttaccaaacgtcgagcgaggagcaaggcagcgacgcctcatcgggtagcggcggtaatctgtggagtagctcccggccgccgctcccagcgccgactgcgagctaagggaggcaaaatagacctttttcctccttcaaaaatcaaaactgaagaatctccttacaagctgatggatataggggcaaattcatactttttgcattgtttctctctatttgcacataataaaataatacattcaatgtctagccagcagctaattatcatgttttttagtgtaatgtagcaaatacgtgtttttccgtgttctatagcaaagactgtgaacctttgaatctcggtagcaaattttgtctaatttgttcagctctttaaatcaaacatcaactctctattttgcgaaaaattaataagataaaagatacatactccctcagtacaaaaaaaaaagacaaaccctgggtttctgtgtccaatgtttgactgtccgttttatatgaaatttttttataattagtattttcattgttgttagatgataaaacatgattaatactttaaacgtgacttgtctttttaattttttcataatttttttaaataagacagacggtcaaatattggacatgaacattctcagggtttatctttttttttttgggggggggagggatggagtaataacacgattgggtactaattttaaacaggagtaggatgaaaacactgctccagacaaatttattgtgaataaagaaccctgcgcctggtttttgactagacaatgggcaacatgccctgcttccccggcttttttttgctcgagcatctgcagtacagtactaggacgcatgactggcttactagggaacagcaggaacttgcattactgatgagcactggccatatttctctgcattcacgcatgacatgagttagatatgaagtgatgaggcagcccccatgcaacagcttcccccactgttgtgagttgacttgagtttatactgatcatgtatacgtaatgcttgcagaattcactacccccgtcagcttgggaaagacaagaactgaattttaacaaactccattactaacttcctattctctcttactgtcttataatccctccgtactcgtaaaggaattcgttttggacggtgatacggtctctaaaatataactttgacttcttgtttctataaaaatatttattgaaaagtgatatatgtatatttttatgaaagtattttcaagacaaatctattcatataatttttatatttttaaactcaacaacttgagagttatttgtgatttatattaccaaggtttgacttaaacattgtcttaaatgacttcctttatttacgagtacagagggagtatgcatgtagtaactctgaatttttctgattcatcgtgcatgtccccattgtctacataccattcagcttatatgctgttaccaaaattttattttttttaattttagtgtttttaatggttttttagcattaacttttaaatagcgaacaaacatagatataacaattttacgcataaattattttaaagttgtttatatgccgttttacggcttatatcagctgtgtaggccaaacgatcagctgtaggctagctttattttgagcaaaacttgctaaattgttgtatgatttgtattgtggttcgttctaaattctaaatttccgacgggaatgtgagcgaggacaaatgttactatttggttgcatggccgatcgaaaagagcagcgagtagggtagggtgatggagttgcacgctcctatctatctctacacactcggctatggccgctgggggtacctggcctccatagtagagccatttaattgctactgctctcccacgtcgtcgtatgtccaatccaacaacgtcacatgtatcaccagatttcgttctaccggtcactccaaaatccaggaaattagggcatgtttagattcctgcaaaaaaaaaaaattttacaccctgtaacatcgaacatttgcatacctgcatgaaatattaaatatatgctaaaaaaactaattacaaagattgcgactaatttgtgagacgaatcttttaaccctaattgctccatntatgataatatggtgctacagtaaatatttgctaatgacggattaattaggcttaataaattcgtctcacagtttaccgatggattttataattagttttttattagtgtccgaacaccctatgtgacacgttaaaattttacacccggatctaaacaccccttagactctgtgctagctgcattattgcaatcattccctgtgtgtataaaaggcacagcgaatgcttctcgtcagctagctgctatttttctcctctctgattcatctgctgctatagcttcttctagctagctccatgatggatgagtaccaatgcctgaagaacatggttttttcttttgagcccagcgacgtctttgagttcttgcatgtggggaggaggccaatgatgatcatcaggatgatcgaatttatcgtgtagccaaggatgaattgccggcgtttcacgctgttgatggtgcgtgcatatataagttggcgccggcaagtcatttcaggctacatgtttgcctcctcctctcatgctagatcaaagatgtcaggttttccaagctctcgatcttctcctatgtacgtatatatgcatctggagcgaaaaggtgcgcgtggattgattttcattacacgctatccatataatcagaagatcgaatttgttctgtgatcgatgcatgcatgatactactaatgcattaccacgaatcactacatatacattggtttcttctcatgcagcttaccgtgttcagggtgtgatcataattaacatgcaaagctgcagcctgcagccttgcgaggagatctcattgcaagtgtacacgaatctataaaagtttcttgatgtactcagacgtcaaggcctattagctcagctggttagagcgtcgtgctaataacgcgaaggtcgcaggttcgtgacctgcatgggccattttttttgttttattagtttttttattatttttttattttttgttttattagtttttttttgtgattttctgttttattagttttttttattattttttgttttattagttttttttttgtgattttctcttccccttgaacctgtgtctggaactagccacacattcccctgaatctgtgtctggaactatttattattttttttttgtgattttctcttccccctgaactgtgtctggaactagccacccattccccctgaacctgtgtctggaactagccacccagtgggtagtgcagtaattatcgaagtgatttttttaatataattatagtataattataatataagtactttaaaaatgtataacttgcatgcaactactttaaaaatgtatataaatttttttatctaaattgtatagatattatgatgtagttacagtaccaatgagttataatcattgcaacttattgtaactataatataattataacttatgcgctacgttagtgtagcgcgaaatttgacatatcatcgtacgattgaaaatttaaaaactagggaagaaaaaactgtcacatgttttctagcagttcggactaataaatccactaaccatgcacacaagaccatatattcaagtttaaaaagatatatattgttttgtttgatttatagacaatggcgaagcagccaattaagcagggtgtagactgcagagtatttttttttcttgaccagccgggacaggcggttgttgactagccgaatcagggctcacagccgccgccgacgcatgcaaagcgcacaaaagcagacaaagctttcgcggtaatccatccattaatcccttataaatagtgtactagtgcacacgttaattgccctggtagagtggtaattgctcgcgcgcattctgcatgcatgagcgcgcgcggcggtgtcacgatggcaggaggcggaggcggcgaccgcgcgccgtcgtcgtcgtcgacggcgatgatctcgcgactcctgccgccgggcttccggttccggccgaccgacggggagctcgtcgcccactacctcgcccggaaggcggccgacgccggcttcacctccgccgccatccgcgacgccgacctgtaccgcgccgagccctgggacctcctgccgccgccgcgttgttagtcgatcgattgcgacgagacattgctgcgtgcgtgcgttggctttgatcgatgtgtcgtcgtcgtcgtcgtcgatgtgtgcaggtgatgcggcggcggaggaggaggaggaggaggaggagcggtgcggctacttcttctgcacgaggagcttcaggtggccgtcgggaacgaggacgaacagggccacggcgaccgggtactggaagtcgacggggaaggacaaggcggtgctgcacggcggcggcggcggcggcggccgccccgtgggggtgaagaagacgctcgtgttctacagggggagggcgccgaggggcgagaagacgagctgggtcatgcacgagtaccgcctcctgcacggcggcgccgccgccaccgcctcttcttccccgacgccgacgacagttgtcgcccgcgtgagtgaaatgcaacagttcgaatgtcttgtgcgactgaatttgtaaacgttttcactaaattggatcgaattttctgctgaattctgttgtttttgttagagtgagtgggtgatttgcagggtgttcgtcaggaagacaccagatggtaacaacgataggggaactacagaacatcatcttccctccgacgacgctcatctccgttcgtcgccggcgccggcgaactctgtggacggcgcaggccatgcgagctgcagcttcttctccggtgctaatgagtccatggcgccaagcgaccatttcaacataggagacgacatgatcctccatggccacgacgaggaggagttgctgatgatgaactgttcttcggcttttgatctgccagagcttctcgactacgagagcttctcgctggacctttgatccaacgagcaatggcatgttctaaaatctaaagtatgatctggttacttctcttaatacaaaagatacataagtcttttgcgtattctccaaaaaaaatctgaaggatgatgcagctagctagctagctagctagatcgatcaatcgagatatatatgaaggccataatttgatcattagatgcatatgcatcatccatgtctacttcttcagatcactagctacttaatatgtcccctctctgtaattaaacttgcacgtatctgtatatatatttgtactgtagtcattcatgtaatatacgttttgtgtttgcgtattttatacacccttctatttcaggcgctcttagcatttcttttactttcttagattataaaaactagtgtgtggttgtgtgtttttgctatgtacatcttacttatatagagagttaaataaaaactctactatctttaaaaaaaaaagtatacatgctacatgcacgagtatacactagaaaaaaaactattttttgcatacaaccaaaactgattttcgtaggcggcacatgcggtcacctatgccaactgcaggcgaaaataatttcgttgaaaaaaacaaaatttcaaaaaaaaaatcaaattcgaaaccctaactcctttgttcatccccaaaccctagcccaccgctagcacaaaccctaggtcacaagctgatgtcttcgtcgcagccaccaccaacgtcgtggtactcgccatagtccatcctaccgccgacgtcgctgcccgctgctagatctgtgcaggagagggcgggggagtgttgttgccgctggattggcgcggggagggccacagccatcaacgcactgctcctccgtgggcctcccactcgagcccaccatcggatctgcgagggggccacagccgttgccctcgccgccgctgccaccagagcccgcgtttgccatcctcgcccgccaccaccgtcgggatggaggagaggtatggttgtgaggagtagggagagtgaaggagtggagctgtgagatggacgggaaaggggagatagagaggaggggagaaaaaaaagaatgggaagaaaatggggtattttcttatgcaggccgcttaagaggactgcgtggaaaaataatgtttttttttcgtatgcgggcctgttaagaatctgtgcaggggagatcaattttttagacggaatcagttatagtttgcctacaacctaaagagtgttttgtccagaaaaatcgatattgtaatagtgatattccggtaaggacatgcggctgtgctacatatataaatagattattgttgttgtgaagaatgtataggtgtgaatttttatacatgttgagggtggactctctgaagtgtaagtcaccagcgcgcagcgcgtatctaggattatgtatatgtacgacatttttgtacgtctgtatatacatacgtacgtacataagtatccagggatcgatgttggtgtgactttcttgggttctgatggctcagctgtctttttcttgaagtgagttaggccttattagtattgtccttcgatgtcaatgttttgtatgaattaacttaactcgtttcaggttaattagttgcttccgtgtgtgtgttcaccttgttttgagccctgctagtctgcttgcatcactgcaggatcaggacagagggatttgtaggtcaacttgcatcacacactctaacacacattccctcccccgaggaaaaaaaataaatgtgagattagattttgcatgacatcatatattttttggaccaagtcaaattaatattagaaaattggattatcaatatccccccctctctctctctctctatatatatatatatatatatatatatatatatatatatatatatatatatatatatatatatatatatatatttttgtttggtgctccatggtgcccgggcaccattgttgaaattgagtatatacctaattcaaatgagtatgaaactttttcaattacttaggtattaacattaactactttactctctctctctctatatatatatatatggattggccatctcaaggtatatgctccaaagtgtttagcatttcactccaaaaattgccatggaaaaaaagacacgagatttaaagagagagacgtcgtccctacaaatatttttaaagaagaaattataaacttgttaggattgaacacgggacctcgacgttgaaatcacacacctcttgccactgcactatcaagtactttctccgtttcaggtcataagattttctagcattgcccacatttatatatatgttaatgaatttaaacatataaatgtgtgtcaagattcattaatataacatctatatgaatgtaggcaatgctataaagtcttataacctgaaacggatgcagtacatcacaacaatggtggcaagaggtgttcaccaaactgatcagtgcataaggttcaccaaactgttcttgagccaaaaaccgaggttcaacgtacggttttcattccctacaaaatctgatcaaagtgtaggaaaaaataaactttcataattgttttttgttcttcctcccattttccgataaagatatctggacaaaatctccagttctcagttgcatgcagtttaagggtctcttttaattgtaggaattgaaaaaaaaagaagtaatataaaatacataggattttgaaatataaatgtaaaacaagggattgaaaatcacaaaaataactggttaattggtttgcagaaaaacacaagaatcaaataaaagatatagaatcaaatgaaatttttcaagagagaggagtttttgctaagttttcttaaaatctacgtacatgtgatgaaacagaatgtttcatagaatttgtaaaactctatttttttttatcaaaggggcaaatagaacattttttcatatataggatttgatttgaatcttaggaaattactacataaatcctttcattcaaagactgacccttaacctgaagttggcttgcacgaaacagcaattacgctcatatgacctaacacactgtttacctaccatgatatcttggcatcttgcttctgcaaccacggtatatgttcatatactcatatgcatttatatgtcattattccaaactactaaataactctgccagcgatggccaagagcgtaactgatcgagcctaatgatgggggctaatataatctcccagttaagatctgagtcaaagccttaatggcgcggtggcggctcgcgactgggccagggcggcgatcacctgaccgccgcaacagtagttaaacggctgcaggctttctcgaagctcacaagctctgaatcaaactgaagaaattaaactgcaggccaggttcagtgtccctcccgtttctgaagaacttcagattaattacagacgggagcgtgatctccttctagatcgcggcttgcgtcagtcacagtctcatcacagatattgtagtatacattcttctagcttctctcacacagcacttgaatggagagagaagaattaatagaattctctcattatctggctgattatttagagtccgagccggcattcttcagacgtagacaggtctgctattaatataggaattctctcatgcaggctgatctgctgatgaagcacacaaggcatcgtgccggcatgtcaaagataggaaataaacaacgatcgatgaaaacaaatctaaatatcagctcaaaaattaagtttaaaacttaaattttagctgggacttgcaagctgaaagacaaacgataggatcggagtcctagtttccaactgtttctttccaccaaatgaaggattcaagggagaggtttcaaggtattccactacttcctctatccacaattataaacattcgaaggatttgaaatttatctatagatataagcatttgaggagtactatttatcataccaatcataactcactcaaaacaccccttttaaataagaggcgtcaaagttttttctcattgatcttaatctctgctaaagaatctataggtgcttatatttatgaacggaggaaggtaccttgcaaataaaagggggagaggtttgaagtaaagattattcttagctacattggatgagttttagattaagactttttttttcacacttcttagacttgaagaaaagatagttagttttgaatgaatcagagttcgtttgcttgtcatgatagaatttgaccctccacagaagtttttccttgaacttggactgggcaatagttcaatgcgagcctaatttaatattccttgcaatctacgctgagttggattgcatttcaaaatttgttataaattttgcagttatttcatgcatttacttttaaaatgcaattaatatcaaagtgataattttattcagttttgtagatgattttgctctattctatttctaaatgctccttccaaagtctcaatagcatcaaaacataggagtaccttaaattttgaacttgtgaaaattcagttcctcccaaaattcggcccaagttgcacttatcatgaaaatctggcccattatgccaggcccacaaacacaaggccttcttctaaaagaaaaagaaaactgggcatctcaaaaaaaaaaaaaaaatcttggtcgtctcgtcgtcatcgcctcgtcgcctcatctcgatctcgtcgattctatccgagcagtagactagggtttttgctgctcgagcggagagcagatggggaaggactccaagccgaaggacaaggggaagggcaagcaggctgccggctcgtccggcggcgatgacgccggcggcggcggcaagggaggcaagggcaagggcggcaagtccgccgacggcctcggcacctgcacctacgtcaaaggtatctccagttctctcggtcggattacgagcaatttgttctcggactcgatcgtgattggtaagatcggtttggattggcgcgatattggattgggatcttggtgcgcgggaggggggaccgggtgtccctaatcgtaagtggatggatttagtctttggtactgaaatagatgtgggcctgaacctaccttgttttcggtgctgatttattgttagctttaaagctcttttggttaggattattctgttcgtggtaaatttcatgttgtttttttttttttgggtacttgactgctgtgttgttactggtttttcagctaggcacgtactgtgcgagaagcaagggaagatcaatgaagcttacaagaagttgcaggatggctggttggacaacggggacaaggtccctcctgccgagtttgcaaaggtaagcggcagatgtacatgcagctcagcttgaaaactaatgtggttggcccaaagagagagtaaggaattacagttttcaggagtttggtacattcgtatggtacaactttattatgtatgttagtattgatgattcgatggttcaattgctaatctattccaccaatcatgcatatctgttggatttgcacagctgaatgctgcagttccagttatctcctatgaatcacagatggtatttatgagaagtgtatctaacattcaatgattttttggctttgatgtgatagtattgcatattgatacttgaagtggaacttggtatgtttggttgtatgattgtatcgggctggaaaaaaagtactattgcttaggacaattggttgaataataactagccaaaggactgtggtaggaaatcttaggatattttgcttggccaggatcaatctgttttttgaaaaatgagatcccagatctcattattcattattacaaataatactattagaatattgtggttaaacagtacacacttaaaagatggattacctatgtggaataagcgtacaatagtcagttgttgaacaacatataaatttgattgtaggcctgccttctatgggaattacctatgtggaataagcgtacaatagtcagttgttgaacaacatatagttttgattgtaggcctgccttctatgggaattgactcactctctgtatgattgtgtaatcactacttgagagttgagacttctattttaccttacttttgaggctttgtgtgtgacatcagaaggaaaataaggacaatatttctacttgatttcaatttcaaacaaatcatttatttgacttacagggctatccacttacatgttgcttgctgtctgtaggctcaggctgctttcataacccactagacactatgtatatatccgactgatattactattttgatactgcagatagcccaagaatactctgaatgtccatctggaaagaaaggtggagatcttggatggttcccgcgtggaaaaatggctggcccttttcaggatgttgcatttagcacacctgtgggagctactagcgcaccatttaagtcaacgtatgtgtataattgtattactaccctttttcctccaatcttcggtctattaacaatgcaagtagcgcctatgacatgagtgctgatctgtgcgataccgtagtgttccttttggcctagcaagtaggttctatgaatttcttcaacaagtggtctatgacaaaaataaaaggacttctaaattatttagcctgcactgttatcacctttagattattaatcgcctgcctcatcattaaccagttaacatgatcattgtttgtttacattcaggcatgggtaccacttcatcctctgtgaaggaaggaagaactgatcagtctgcttcaggttggaacagaagcacctcagtctatacaagatgcagatgcctcgtgtctctgtcaacttaataagcactgaatgacgggcatccatattctatgtttagcctttctaatgctctctgaaagagtcttgaaaaactgtgctttctgtaagtaacctgtggtgtcaagcatgacatctatttgggatatgctgagatttagcatttgtctgtgtctcttatctaattggcatcttgttagctattgttatgtctctaattggatggttcctcctcttacgacaaggcgggtcttgcctgaaaattagaaaatgcgtaaaccttgtgcgccatataagcaatttatcccgagtaacatagcatttgtagatgtggtttcctgttgctggcttgctgtcctgggaatctcccgaatgtcaagagcttttagacgatgacacttatattcagtcaactcagtgtttagaaagcataagttctactctccgtttcatattataagactttctagcattgtctatattcatatatatgttaatgaatcaagactttctagcatttgtccatattcatatagatgttaatgaatctatacacatatatatcttgattcattaacatctatatgaatgtggataatgctagaaagtattatgatatgaatcggaggaagtacttgatctcagcctgaattgaaccataatactactgtgtaaacttctccacaacggaaatggcgtgggtggtgaaaatcaaggaggaaggtgaaactcagttggagtgaaacgtctgtcggagctcatcctcagttttacttttttggatattttctttcacgactatacaaactttttacttctgttttattcaatgaaatctggtacgtagcttgctttgagctaacgacaccgataagcagaatttagaccctctttatttaggcttataagccaatttataaaccgaaaagtttaagactaaacaaacaagtaatgtctttttaaaatcataagccactctaacactgttaacccaaaaacttggttggagaagttttttttcttatgtgagatagatgtataacttcatcactaaccttaaaacattaaattcatcggtttataaatcatatacaaaccaataaactagtaacttaaaattctaaacaaataagctaagcctaaaactaataaaagggccttgacggtcttgacggagcagctgtgagcgactgttcatatccatagtcccccaagagcgcgcggaaccaacggtcgtcgtctcctctaatccgcaaccccgctctcgtccgccttctggctgcgcgccatggctgctgccatccaccaccaccacctcctccctcctcgcctcctctccgtccaccgcagcctccccgcctccgcctccggcgcccgctcccccgccgcgcggccgcgtccggcgcagcggccgggacgtcgtcgtcgaccgcggccgcgccgccgcccacggacgccgcgctgcaggagttcaggcgctgggtgtcgtcccacggcgcggacgcgggggccggcgcggcggcgcccgccgccgtccccgagggtggcctcggcctcgtcgcggcgcgggacctgccccgcggggaggtgctcgccgaggtgcccaagaagctctggctggacgccgacgccgtcgcggcctccgacctcggcggcgccgtcggccgcggggggctcaggccctgggtcgccgtcgcgctgcttctcctccgcgaggccgcccgcggcgccggctcgccgtgggcgccctacctcgccatcctcccgcgccagaccgactccaccatcttctggtgagttgaggtgatgctgatcgctcatcgctcttcatgtgttcgacgaaatgctcctttttgttttgggtggttcatcacgattaacctcacattcctctccgtgctgatgcttttgagtggtttgcttcgtgcctccagtgcaggtcagaagaagagctcttggagatacaaggtgggcgtccattgcaaaaagttcaaaatccatgaatttaaattacaaagcgagctcgttttgttcatactggttgctagtatctttgttgaaatctgtatgcttttgttccttgcaggaacacagttactgagcacaacaatgggtgtgaaggagtatgtgcagagtgaatttgagagtgttgaagctgagatcataagcgagaacagggagctctttcctggtactgtaacattcaatgatttcctatgggcattcggcatactcagatcacgggtgtttgcggagctccgtggagataagcttgctctcataccatttgctgatcttgtaagatcttgaaatgcaatcatgcctgcattttctatttgcttttccaacatgctgtgaaccgacttatctttgcaaaatagataccactggaaaccatgcctgtaatttgtcatgccaaaacgttcagaatatttttattatacactataatatgctctttcaatacttttccctcgatatataatacaaatccaaccaaaatattgggaaaccattatgttctaatcattttggtgctttgccaaaccaggtaaatcacagcgatgatataacctcaaaagagtccagttgggagatcaaaggaaagggtctttttggtagggatgttgtgttttctttgcgaacaccggtgaatgttaaatctggagaacaggtacaagttcccatttattcattttaaggaaatcatatagttgtgcagctgtgacttttgttcactgacaacatttatatactaaataatgttttgacagatatatattcagtatgatttggacaagagcaacgcagaattagcgcttgattatggtttcaccgaatcaaattcatcaagggatgcatatactctgaccttggagatatctgaatctgatccattttatgatgacaagcttgacattgcagagctaaatgggatgggggagactgcatactttgatattgtccttggtgaatctcttcctcctcaaatgctaccttacctgcgattactctgccttgggggaacagatgcatttctcttggaagcactcttcagaaatgctgtttggggccaccttgaactgccagtgagtcaagataatgaagaagcgatatgtcaggtcatccgaaatgcctgcaaatctgcccttggtgcttaccacactaccatagaagaggtatgtttataacccgaataagcattgttcattttcttttttatgttattatctccaaattagtattacgaaacatgtcaaaatatatgtaggacgaagaactgttgggaagtgaaaatcttcagccaaggcttcaaattgccgttgaagtcagggccggtgagaagaaagtgctacagcagattgatgacattttcaagcagagggaggaggaactggatggcctagagtactaccaagaacggagactcaaggatattggtttagttggcgacaatggtgaaattatcttctgggaatcctagagactttttattcattttctgagggtagagaaggttttgtaaaatgccactgtgcaatagcaaattaatgaaagaaaaagagaaaaaaaatgatattctagcacatgcaccttgtgccgtaaccagtgcaatagtagtagatgtttacggagtactccacaaagttggaattatcgccaacattcaaaattatgacttccactctaccagtagtcatatcacttcaattcctgaaatcaatattttccttcatacaaacaaaaattggacatcattgcacatttgcactagtacttgtagtgttattgcatttcaaacacgtcaaccgaacttttttttaattaaaaaagcctataaattgcgcttaaatcggttcaaattgacgaggcacatttcacattttggccactttgttacacatttgtggcagagtccaaactccaaactgtatcaaggtatttgtgggcgcttctctttgttcgatcgga

SEQ ID NO: 24770 - DNA, 19445 bp, Oryza sativa
cgacctcccccgcgcagagtccctcttcctcgccgcccccgcggccgagtgctcctcctccacctcgtcgtcgacgcccaccctggccaacctcgttctccgcgccgccgcgtcgtcccgcgcgccgccggaccggctggtggcactcttctcgcgcctcgtttcccgccacgggttccgccccaacgccttctccttctccacgctcctcgctgccctcgcggacgcgggcgccgcggcgctcccacacggccgcgctctccacgcccgcgcgctagcgtgcgggctagtgctgtccagtgggcacgtgctgaccagcctccttgatctttatgcggcggctgggcaactgggggaggcccggagggtgttcgacgaaatgcctggcaggaccgtggcagcatggaattgcatgcttgcggcgtatgttcggtgctgtgagatggacgccgcattgtggttcttcaatgagatgcctgggagagactctgtggcgtggacaacgatgattgctggttgcgtgaatgccgggaaggcagcagaggcggttgagctgttctggaggatgaggaaggcaaatgcgaaggttgacgctgtgaccatggttgctttgcttacggcctgtgccgagcagggagacctgcggctcgggcggtgggtgcatgcccatgtcgagcaggaaggacgacagtggcggactgttttgctggacaatgcactcatcaatatgtatgtgaagtgtggggctgtggaggatgcgcaccgcttattcctggtgatgccaaggaggagtaccgtctcatggacgactatgatctcagggcttgcgatccatggccgcgccgaggaggcactagacttgtttcacagaatgcaggagcgtcctgatggtgctactctgcttgcagtgttgttggcatgcagcaatgcagggagggttgatgatggacgacaatactttcagagtatggaaagattttacgggatcactccagggatacagcactacggctgcatggttgacatgctctgccacgggaagcaattgcgtgaagcaattgagtttgtggagacaatgcatttgcagcctaatgatgctgtgttgggcgcactacttagcggatgcaagagggaaggcaatcttgagctcgcagcacaagtgattgaaaggttgattaggctgcagccagagcgagcagctgggcaccttgtcctgctggctaacatgtatgctggtgttggacaatgggagcaggctgggaaggtaagagaaagagtagctgccctgaatgctggaaaacctgcagggacaagcagggtgaatccgaaccaatccagcatgttggtacatagcatgctggcatgagcccaattgattctgcagtttcgttaacaagacttcggaggaatctatgagtaagcatgggagcttgaagagaaatggcaagcacaaaattatttggtgttctcgtgaatgccttgggaaaaaaaaaaaaggttgagctggggcaaaagtatagcatgcattcctgatcttctggtgaagccatgaaattatgcagtagtgttgcttcttttcaggttagcatattatatgttcttacttacccttaattgtccgagaatcctctttttactgaacttatagctaaactgctaggaacatgtatatttcagtaaattatcgctcagaacttctgataatgagatgctttctttttgaatcccttgtttcatcttattaatcttgtgctcaaaactatttatgacaactcaggacattgtcataatggaataccaaaataaagtaatagcagaatacatacacaagctgatctaatgcatctcattcttgtctatatccttcctaggagatgcaaatcactattctgttccaagttaaaaaatgcttgaatcttctcttctgtctgaacctatgctgtaaattgttcttaatgtcgacaaattgatgtttgctaaattcctttgtctggcctcccgagtaactgaagtcaactacttttgatactagcagttcctcatatcactcaagaagcttgttacatgtaccgatgccaagcgcagcggcgagatgccatgcagcatggatatagggagtctctgggaagcaatcatcagcgatgaacagcgcgcctcctaacagagacgacatcttgtgcaggttatgtgccattctgagctctggttcaattgatgctctttttgcaaaggaaacctggcacatagaaaatgctagatctttagagaagtctagatttatgcagcaaatatgcctagtgatcgttgaaatgatgattggttttatttagccaatatgccatgccattaatattacttgcctccatcattccagtgtgaacaactgaaaccatcaaaggctgaaatggtaggagcaatgctgatgctgccattagtaatcgcgggttctcattccgaagtgctcttgataaacactgcacaaaacacaggcttgtcacaatggcatgatttgcatcagtcagataatgtaacaacaattatccatcaggtcacgaaaacttactacatccgtctcataatataagggattttgctcgtacaactacatgcatgggcaaaatgccttatatttgggatagaggtaatattgttttggcatgccttaagtcaaacatttgaaactttaaacatgcatatctctttatatatgtttagattggatcataaaaaatgtatgtagagattcattacggaaagcactttcataatattatgataattgtttgttgtaatagatatattgttatagaatatagtggttaacattgtatgttcaaaacaacatttttttgtgaacagagagtactagagtactccatccgtctcatattataagtcgtttgactttttttcaagtttgactaaattcatagaaaaatatagtactattttcaacacataacaaacatattgtcaaattatattcaatgctatatttaatgaaactaatttcatattttaaatgttgttaaaattttctattagctcggtgaaacttaataaagtttgatgcggaaaaaagtcaaatgacttataatatgaaacggtgggagtaataagtaataccgacgatatgacttaccaatgtagtggtggctatcatagtatagtctgcccaccgcaggagttttctgatttctcccttggaggaatggtacaagcttgaagctatccctactccgactagcgaattcgcatagagcgccgtgtttaagttcgtcctgcaaagctggtagcagccccgttagacgggaagcatagaatctaaaccaaaaagaaccagaaattagctagagtagctcgccttggcgtttgcattccgagaataatgaaggggagcgaggtgactacattagctatagtttcaccagcatgcttgtcacctgctcgcaggaaaattcagttagaaactgtatactgagaagagctatgttggtgcagctataacttggatgctttaccgcatgagattctacaatggacgggcttcaagaacgagggcctgtgctgccacaatcgcctgcagtttgcaacaacggtatatgaacgtcagactcagcaaaccaaagggtataaatttttagagagcttttctactgacggcatgttcacttcttatgccagttattttttgacgaaggccatgtttagtgcatctccaactacccctaactttcaaccttccatcacatcacatctaaaactttcctacacacataaacttctaacttttttttccgaactttcaactttcccaaaacttctaacttttttcatgaactaaacacagccgaaatggaattacctaatcggcaatctctgcagcgttgtgccgtccccgaacttggcttcagaatcagagattgccgagtactccacgacggtcgtcctgacagcctcctcctcctcctcgccgccgccgccgtcgcccggcgacggccgacggccaagctgcaccccgtagagcccatccagaactccgggagacggcttgacccccatcaatcaacgtacccgtgtggcgagcacagtttcacagcttgcagaacgagcaagatcagggttggccccctcctgctttgctttggctagcttcttcctcctctccggccgatgcggtgcagcagccgcggctagccggcgggaggaaataaatagtgcgcgtgtttgcgcgaagggggaaggaaaatgtggaatgggatggagagacccgtgtcgcggtgctgggttgaattctctcggcagtgcgcgagacgccaagagaacgggaggcgagacgatgctgattcccaccggatcttccgttggcgagtcccccgcgggctgcagcagccgggaatattctcgcccgcaaccgcggcatccatcgtcccgcgaccagggtgatgggctgatgatgaatgagcccggcccacccaaacttcgggcctgttcagattgatgtcattttaaaccataccattaatttggtaaaattaataattatgtagttacattgagagcttgtttggtttgatattaacttattgccctaccaaattcttggtaacttcaataatagcaaatgcatgtttggtcttgtcacaatagttcaaattcaacactacttaatttggtagtgtcaaagcttgccacggttttggcactatcaagattttggtagagtaaaaattagtttcaaactaaacaagcctttaactagttattaaatattggtgatgtaaataaaatttcgacgatagcctatcatttttagtattactactaaattttagaaatgttcattttttaccaatgaccttcaggaaacgaagccgggaacgagatttgtcgagagagagagaagggagaggcatctggtatgtcgctcgtcacgtcgtgccgggagacggggagacctggagctgacactgggctttggctttggctcggccatggccggcagagtagtagccgcatcggtaattgtttccgctgcttggggcagcgtagcgtcgcagagagtcgtagctgcacggagagacaagacggacacgcgcgcgatccgattcgattcgaagcatcaaccaacctggcaaaggtcgcgtctctctatcgcctcgatccgtgcctgcgttgcgtccagattggccgttgttcctcggtccgtgtttcagcttgcgtggccgactttgtcaggcgagcggcacggcagctagaccacaacgccgcgccatgggaatccttgtgaagggaagatgatttcctcgcttgtttcgtctttaaggttattgcccgcgcaagtttcatacgagcaagttttataatagggatagcgataacatctaattttatttaaattattattaatttagaactaacacatacaacaggttgccgacttcatcttttcgtttatacttatgtttatgtttatgagccaaagtttgaattttcaatcttaaatttggagttgattttagggttttctcatcgaagtttatttttcagcctttgcttttagatcactaagaacacatatataaacgttctattcacaaattatttttcgtttataaatataccgttttgcttattccctaaataagcgaaatgatagggccatgcatctatctacactactcccaatacactctggctgtgtttagttcacaccaaaattggaagtttggttaaaatttaaacgatgtgatggaaaagctaaaagtttgtgtgtgtaggaaagttttgatatgataaaaaaattaaaagtttgaagaattattttggaactaaacacgtcgtctgtaccaatccacttctctctctcattccttaaagattggatagagattgacctttgcacgagagaagttgctcattctttttccttttcttttctctcttgcacattatcttatggatctacatggtaccttggggctagtgataaggggcttagagcaggtacaaatgtggactataagccagctataaacatatatcgagaagataaaaaaagagagagatgagcaatgggctacagatttgtaccctggctttaagatacaatgtatgtatgacaggtgtgagcaaatactaatagtgtagtatatatttataggtaactattgtatcaattggctatagatgatttggagctattagttggactatactattaaacttgctcttagggtgtgtttagttcacgccaaaattataagtttggttgaaattggaacgatgtgatgaaaaagttgaaagtttgtgtgtgtagaaaagttttgatgtgatggaaaagttgaaagtttgaagaaaaaagtttagaactaaacaagggcttagagtagtgatttattattttttaaaaaatcagatcaaatttttcattgacccggctttgaaagaaagcccaaaacagcgaacagagtcttacacaggctgaaagtaaacagcaaaagcaaaacaaaagaacagacgccagtacaaagactggttctctctggaccactgctgcaaatcttacaaacacctcacagacttttcggcattgaccctcctaaacgcgaaacctttccccaagatattatcccacccgaaacaaaagcctacacaaactgaaaaacaacagcatcacactgaagcagggaggcagcacggcttcagccgttgaagtttagccatcagtagatcaccccatcctttcatagcagcttgatctccttcctttagcatgatacaccaccgctgaacaaaagacatagctttgtaagcaacttgtaagggagattttaccaaaatatttgagaacacccaatcattcctaactagccagatagcccagcacacactagcaaagaacatcacccacacaccctgaacattttcccctggttttagcctcaagcaatcccttatgtttgtaggactattagttagtcccaaagcgtctctcaccacacaccaagtaaacacagccagagggcacttaaaaagggcatgatcagtagactcaatcttgccacacaatttacagaattcatcccctccttgccatttccttttgatcagctgaagagcacaaggcaacctgcttagagtagtggcttataagtcaactataagagcagggtcaatagtaaagtagtcagttggctacaattatacctaacttatctatagctcactttgcaacctatacatacaatagttagttatattgttggtccttacacacttcacatcattattaaaaaaaaatgagagaattcacttagtacctttgaggttttccccacttctataatctactactgattttgttaagttgaacaatataccatcgtgttttcttgaacctctgcttcatgccatcaccgtcaaagagccgttagttggcatccttttgtgtatttaattttcttttagtgactaaaataacctttgacttgttgattgaaaacattagcacaccgtctaccccgacaaattgatctatccctgtctcccaaagttccagtgaggcggcgccgactccccatcgatgcaacgccgggactacccgacgcgccgccggccgctcggatgcccatcgacgcgcggccaggcgccaggctcgccatcgacgtgtggccgggcgtcgggctccccatcgacgcgggtgggcgtgggcggcggcggatgaagatgatgggtggtggtgggtgagctgcaggtcggtggcagcacggatgacaagggctagcgcggagaccatggcggaggcgttgtggtcggtgcgcgccgcgtagtagtactgcacgtacgtctccggcgccagagcgccaccgccgctgacgaccgcggcgagctcctcctcgtcctgctacttctgctttgctgctgctgctggtggtggtggcggcggtggcagaggcgcagctgtttgctgcgtcgacgaccacgggatcgagctgtggatcgatttgggctttggaggcagcgcgcggagacgatgaggattgaggacaacgtatgctgataagaacagccaagagagagaggagacgaggacaacgtatgctgtttttttttttgcattacgtacatttatttctactacatttatatagttcaatcagtttgacagtatatgcattcatatgtcgatagattacatacatatctccctggaaataaaatgtcagttaggggtaaataggtctttttatagcgctaacggatgcccaactaacggctcgtggacggcgatggcacgtagcagaggttcaagaaaacacgatgacatattattgaacttgataaagtcagtggtagattgtagaagtggaaaaaactcagtggtactgagtggattctctcttcaaaattgcagcattgatcccatgctgcaactgctgcaaagcagcatctctctcacgcccaacacttttgtctaaagaagcgtgctacaacccaacgataaaattatctcccgctcgcgcccactcacgttctctctcttcagctcttttctccatattagcattgcaatctacgtggacttggcgtcgtcgatattgtacctgctctaagcttatgtggaaaaaagatataaagaaaagtgaggagttggcacttagagcaagtttaggagtatagctgactactatctccaaatcatctatagctaatttaatagttcattcatataatagtttttttttcgaacggtcgatcgttgccaacgttttatataaagaaggtgccccattttaagggtaaaacggtgccaaaccttacattacgctcaattaattaggggaaactgagtgaaaaccacaactacaacaacccaccaactaacctaacctaagctaccacgacggagcccatcgtgagacatcggcaccaggcatgccatagaagcgacacggcaactcacatgtgttattgttaccgagcttgtcactagcgacacgacagttccaacttcaccttaaggaagcctcaacgccaaaaaaaaaaacaaaacaggttggactactcacaaaggacagcagcacaagctaccaaggagccgcttcctacacacggctagcactaacaacccaagatagagattgtagtgagtcatcgttgccaagcttcattgcaacccaacaacaaagcagctccgactttacccagcaaaaactaaaaagaaatgatggttactcgccgcaatgcaagaaaagaaaccaaagtggcgagggcctcatcaaacaccctaggcttgtagagtttcggagccgttgcaggaatccattaatgaccatcattgcacgcggttggtgttggaagagagtggtcagcatcataatgatgcctccaaggagaggaacgacgcctaatggcgtcgccgtcgtcaagccggcccaaggcccaagcaaggctttcgccaacgattcccaatcaaaaccccacacaaccatcttgtacaatgaccatcgccggaccaccgtgccatcccttcagtagggctgtcaaaaaaggtcgaggcttgcgagctgctcgagctcgacttgtcctaggctcgatttgagctcggctcaagctccagatgagccgagcccgagcctctcccaaatgtcacgagctttgtcgagctgagctcgaccttccaacgagcctactaatatataatttttgttgttacttaatttaaattagtagattaaatatgttatctgtatgccttgtattagcatcatatatttattttattcttttttcctcttctattaatatgatgaactagaaatagggatggcaatttcacccgcggggccgggtccctgcgggggtggggacaggtgaagatttcgccccgcgggtggtcggggtcggggccccggagttgggcgggtgcggggacgggggatgctttccacccgagggtgaccagcggggccccgatgagagtatatcacctcttaatgtacagctcattgcaagcacaagaagcccattgctgagatatataagcaaaaacctaaccctatcctctcactccccaatcctccacccggacaccacgcagccgccgcccgttgaggccgaaccacgcgcgacggcacgagtgcctcagtctccctctatcgccgcgtcgcttccgcctccgttcatcgaggggctgccaccacctccacctccgcttgtcgccgcaccgccaatgtctctgctctgcctctattcgtcgccgcatcgcctcctttcgtcgccacgctgccgctgtctccggaccacctccgctcgtctcggtccgtctccactcgtcgtcgcgccaccgccgtctccggtctgtctccactcgtcgccgtgccgccgctgtctcgctccgcctctgcctgtcgccacaccgatgcctcctgctgccgcacagcggcgcctcctcccgtcgcctcgccgactccggtcacctgcgggtgtagcgggtccccggtcgagtggcggggccccggaggggccggggacggggatcgatttcaacccgccctccacttcggggccggggccgggtggacccgcagaggagcgggggcagggctgttcctgcccaacccggccctgacccgccccgttgccatccctaactagaaattaattattttttaaaagattatccttgaaatatgcattgttttaattaaaaatcaagcttgatagtcgagctcgagcttgatcgagcacgaatcgaccctgtctgaaagctcgaacattttataggcttggctcgagctcagctcgttggcagccctaccctttagcgaccaagcccaacaccaccccgcagctcaagctggctcgatgggctgctcattagccagtgtcgccgccatcccctgcgcataagccaacgcctccccttttcctggagctccccacgatcaaacctgaaatggtcgggccatagaaggggaggagccctatgaagaagaggatggttggccagcaacaaagaaggcgacctccactgtctaactgcttccctaattattgccataagccatcgaggttatcactggcgaccggccaccaccgcaggcgacccgagctgccggccacggcctcacgccatgccggacatgccccgctggccatggacaagcgttgctcatctcgccgcctcgcacgccgacagctgcggtcgtggtcgccgttgccatcggttctccaaccagatctggtaggagacgccagatccggtgcaccctctctgcttgcatggaggccggctcctcgcgcgcgccgacagtcactgatgccctctctgaggctgccccgcaggcttttcctgtgccgcagcggctgccactgttgtggagggtcctgagcaggagagggaaggccccgccgctgttgtccttgtagccacacgtttttctggcggcgaggcgggggagggaggagtggtgggtggtgatggtggatgaaggtgtcgcccgtgcagcccaagcctagagcgacgcgggtgattggtccaagaccgtcattgtggtgggccgctattcatacaatagttacttataaatccattaatatatggttccacatatcatacacacgtaatgttttgcagttcatactgtagctgattataaatttgtagcccgcgattattctctcctctcttatctcttccatatatttttgtagctgccttgatgcttccgagacgctcaagcgaaacagtttgacagtcatctaccaaggatgaagacaagtacttacctgatcttgtcttgatgagttggacggaggagatggagcgttggatccccatcggacggctcatgtagcccaactccttcgttgccattagtgccataaagttgggactcacgcgactcccagcacaagctaaaacccaaaccaaacaaacccgtcgcatatccaaacagataaggtcgcgcgcgcgtgggccacctctgccgcgcaaaccaagcctctccatggacaccaccgcgtcatggagtctcctccccctggccgcctcctcgccgtcgcctagaaggaagtcggctcttctccggcgccacccagcggccaccaccacctcctccaccagcaagcggacgacaaggctcctctgcctcctccatgacacggtaacatccatctctcgaatctcccactactgcatgatagattttcctagacgccgcccctttttgtttccatgcggttcgtaagtggaaccgcatggaaaaatagggggacaggcaccgggttatcgtccgcacgggaaaacgcattatctcgtgcgggcggctttagccaactgcacacgaattttcgcccgcacgggacccaccgcttttaaccgcgcccactcgtcttcccctccacccgctcctctcctcccacctccctctctaccactcctctcctcccactctcctctcctctcctcttttccctctctcccggccagccggcggcgtgacagcatgcggcggcgcacggccccttcctccctctcgctcgacagcgggcgggaagaagggcggcgagagcaggcggcagcggccgaccatggcagcccctcccctccctcccattgcagatccggcggaggggaggcatgggggggcggatccggcggcgcgcccccccctcccctcattcccgttgcagatctagcggagggggctggcggatccggtggcgcgcggcccctcccctccctccccttaaagatccagtggaggggaggaatgggggcggcaaatccggcagcgcgtgccccctcccctccttccgcttcagatctggcggaggggggcggtgaatccggggacgcgcccccctcccctccttccccttgcaaatccggcagaggggaggcatgggggcccggcggagcggcggcatgcgtcagcggacggcgtggaggtggggtgacagcctcggcgaccggcggatctatctctccccctccttctctctttgttgtttgtgattctttatgatttgtgagatgcgttcttagagttgatttgttgctgtgagatgtgttcttatgatgtgagagttcatttgttgatgtgagatgtattcttgtgatgtgagatcattgtgtgtcgatgtgcgactacagatccagcgccggcgacgggagcgggcggcagatccgtagccggtgaccgcgagggcgacggcggcgggcctcggctaggtggtagaggcggattagggttagggttttttttctttttttttgattttttgtttttccgtgcgggcgacttaagctcccgcacgcgaaaatcacgattttctcagatgactgggtgcatgcgggctgctctcctgcacgcaaaaatagtttagcccatacgggataatcggtattgtagtagtgtccccgatcgatcgatcaggctgaggtggtttagggatggtaattttacccgcggggacccgcccctacgggggaggggacgggtgaagatttcgccccgcgggtggtcggggtcggggccccggagttgggcgggtgcggggacgggggatgctttccacccgcgggggacccgcggggccccgatgagggtatatcacctcttaatgtacagcccattgcaagcccaagaagcccattgctgagatatataagcaaaaacctaaccctatcctctctctccccaatcctccacccggacaccacgcagccgccgcccattgaggccgaaccacgcgcgacggcacgagcgcctcagtctccctctatcgctgcgttgcttccgcctccgctcgtcgacgggctgccaccacctccacctccgcttgtcgccgtatcatctccgcctccgttcgtcggcgcgcagctgccatcttcgctctgcctccacccatcgccgcaccgccgatgtctccgctctgcctctattcatcgccgcatcgcctcctgtcgtcgccgcgctgccgctgtctccggaccgcctccgctcgtctccggtccgtctccactcgtcgtcgcgccgctgccgtctccggtctgtctccactcgtcgccgcatcgacgcctcctgctgccgcacagcggcgcctcctcccgtcgcctcgctgactccgatcacctgcgggtgtagcgggtccccggtcgggtggcggggccccggaggggccggggacggggatcgatttcaacccgccctccactccggggctggggcctggtggacccgcagaggagcgggggcggggccgttccagcccaacccggccccaacccgccccgttgccatccctaaggtggttcgagcgcaagttcgtcgagacgtacctgcagttcatgttcacctactggctacctcttcttccccgggtgagttccctcttgctaccacgtatacttacaaagaaattattaaagaacaaaatgcggcaacttcgaatcgatcggtgaattgtgcagagtgccgagaccaatatactggtactgtaattacctttcaatccgagtctttattgagcatcaatgcagcaataataatcatctactagtgatctggtccatccctctgggcaaaaaagaaaaagaattatcttaaggtcttaaggagatagtaagacacactcctaaaatatacggtgtagaattttattgtaaaatttgacatctatgagtacttttcggaaggattataaactttctaaaaagaatgtagttttgttttgctaaggtgatcggagttaatatgcatgccactgccagattttgtttgtctgaaccaaataaccgtgaaactcaaaattgccatatatctcttgctgtgaatggcctaatctatactttctattagaagcaaaaactcaacatgcaagcatggcacatcatcacccactagcaattactattctaacccatttaaaatcccatggaagcataccacatcttcactcactagcaattactattctagcctattttaaatcccatgcaagtatgacacatcattgccaatctcactggaccgtattcttatcgaaacaaaatagcatttctttgtatggatttgtaaaacatgcatggtgccacaatcttcttggatgtatcgagcaaagtgagatctcacataaaagaaagggaaatgataatgatgcaatattattgtatactagcccaggcaccgaagcatatgttgtgcttgagaaaagattgctagataagttgcaggtgttggcaaaatctagtaactagagtagcagcctgtctttctgtttcacagttaaggcaccgttttctcatgatcatcttcaaaaatactttcatactagctttacacctaaattataagtgattaatataacgaacgtcccaatctttcattgtatactaattcgaaaaagagtagattgcagcttggtctagatcgagctttgacctttcacgtacttcgcacaatgtgatttggaattccaattggataaaaaccttgacctctaggagtgtgtaagggactgcaagtaaaagttctagatttagattcccatatgagtattttgcaattgaacgaagtggtaccagattacaggctgtcctgcccttagcagagttcacaattcgtttgaatttcatcacccaaaattctcccaaaactgcgttctcagcttcataaaatttgttagtctcgctggggctctcatttcaaccttaaaaacaagattgtaaaccctgtctattgtttacatattaaactgagggtgagtgaaaaaatatgccaaattatgggccaaaggcatgggccttgttgatttcactctggggatccttagcaaagatattgctttttgagttgggacattacccctccgtaggacatggcatatttgaggttcgctcattgctcaacaacttggcttgtaggcgtatcattggtttacccttgcccttgtcacctttggcttgttgatcgatggatcaaattgtgcttcaattatgacattgaggtttgaccttgatttagcttaaccctccctaatatagggttgtatagtactccctctgtcttctaatataagggattttggctttttcttgcactgtttgaccattcgtcttattcaaaaaaattgggaattattattttttttgacttactttattatccaaaagtattttaagcacaacttttcgtttttttatattgtacaaattttttgaataacacgagtggtcaaacagtgcaagcaaaatgtcaaaatcccttatattatgggacgaagggagtatggggcgaagtcttgtctccagcttaagttcatagtattattttagcatgttttttttttcatttctgtactaacaagataatatgcatcaaaataaattaccaaaattttctacacaattgggtaaatatgtaaccccccacccgggcgccgcctctaacaagttgctttggactttttaaagtccacattacataaatttggttacctaggtctttagtagtataaatttatgaagtaacgtgagtgcaatattataaaagctcttattacagtaaacttgaatataccatttttcatatagccaaaacctatattataaatacattttatggtcaaagttaacttttgttgactgctctaaaacaacctgtcttttttttactcgagaaagtaaactagtcaccaatctgtgcgtggcacatgcacgcacatgctattattgttgatattataaatattcaaattcgttgagcatattggttaactttgaaagtgtaattgcttgtaccaagacaagggtctacattagttacagctaactgttagtttccgattttagaattaaattagtaaaatactaaactgataatccaagctctaccatatttattaattactggtttccgaattatcaaattagagtaaatattattatttctaattgcatttatttgagatatacactccatgatgattttttaagataatataagcttttatctaactcaaccaattatatcaatatgacataatcgtacttaaaaaatcagagtataacctactatcataaataaatcaacggccaaaattcttttttaacatgtgagattctacaaagtgtctagttaatactccctccatctacttttgataaggcatatttccaaatctgaaaaatttacttttgataaacatatttcaatccaatcacctattctcttaatgactttcttagatttaatacgtggctctccattcttctatgcaagattggctacatggacatcgagaaatgtaaatattaatgaatcgcttgtttacaaggaataacgtactccctccgtcccaatatgtaacaacctagaatgggattagatccatcctagaactacaaatctgtacatagagtatttctagattctctattttcagattcgtagtcctaggattggtctaatctcattctaggttgctacatatttggacagagggagtagcatgtttaaatagatgataagtagaattacttattcttggtcattgtgccaagatgaaatataactatcaaaagtagatggatggagtacgtctttacaatcatactaactactcactccttcccaaattgatcatcatatatttatgcatcaagaccaaggataatttaaatcgcatcaatcaagacaacatgcactagcatgcacacattctcccatactgcattaattgtattataataaaatccgtgtccatgcggttatatgatgatcaatttggaaaattttaaatttcattgtatgatgatcaatttggaaagaagtaatatatactactatcttatcaatttatagctttatagctagactcgccacaaataaccggcacttgctatatccttccaattaatgtgataattttaccaatgaatatagatacacttttcttactactactttcaatttttaagatggtggaaatggagtactactttactggtcccttttaaccgagtaaaaagaatacttttgacgaacacaaatcatcgactagcttgttggtgccgtaactcatggatgcattcgcgggtctacctagcgcggtatgatcattgcagcacatgagccccctgaaccggtgcacagctcaagcaaaaaaatttgtactactagtcgcactatgcccctacacgtctttatttcttttgctccctccttgttggccgaggaaaaaggtttaagggagaggagggtgctttgtactaggaaattttgttccggggaagaggagcaaggaaaaagtgcctggcactcacgtcataatggcgttgtgatgatatcaagcgcacgcgggacccatatgcatcacccatccagtggtgtggaaaatatactgaaagattagccttggtagtgctgggtgactgccaccatcattcccaattcaacatccccccagcaggatgctccatgatccatctgtccatccatccatccatctcaccacccacaaacactcagcaaaaaacacttcacattttgctccattagtggtggtcagctaaaggtgtgtaaactactcgagctatcagcattttgattgtaataaatcggttcggagtcgttcataccatgctcaaaagatttgagggagtgatgtgtcgtagtggaggatgatgatctattgatctagtagtgtggcttaaccagaagtcgacagcctcacgagccaacgcaatgatgcgggcacatacgaattgggacaaaaaaaaaggccgtgaaaaggactagtaacacgccgtcgtacgagccaaccatccaaacagattaaccaaccaaacctttctcccctgcccaaaaaacctttctaacgcccggccgcccacgagacgacgtgagatggcacatttcggccggcgcgcgcaggcgattctccgttaaaattttctcgcgcagcggcagcggcagcctgcggggggaggagggacgcaatcattcggtcgcgcgcctctcgggcggcgcgcgcgggggggaggagggacgagacgaaatcactgcgcggccagggcacgcacacctgccaaaaagccgcggccacggccagcgcccggacacaatcacgcggcgtcaacagaaccgtgcccccgcgtgcatgcacccgcaacgcctccctctctcgttggctcgaacggctcacacacacaacacacaaccgtagcagcagcagcatccgtagctgcgtgcgtgcgtagtagataggcggcgtggcgtgcattggcattggcggtggcgagatgtcaatggggggaagggaaggggaaaacgcaacgcatgccccggggggggcatcgtgctgttccctggcgctgcacacggggccttttttctattgactgtttggcagggctggtcggctttatactcgca

SEQ ID NO: 24771 - DNA, 30866 bp, Oryza sativa
gtcaaatcactaccctccagttcggctgcgctttgcctgcctgctcgagtaggggagtacattttgatacagcgaaagaatcagaataccctgtcattgcgttgcggtcaaaatgttgggcaaagtgacccaaattatattagttggggagggggagggggggggggggtctatggatttagcagcaatcaccgttcctgataaagtcattggacggggataacctagaaataatttcactttagtggagaactttacttccttccgagagataaatccctttctaattgctacccctagacactcatcaaagtatactactccagtactactgctactcgccattttcaaaacaatcgaaagcagtactaaccgtaccacattatttgtcgctttaaattttttataatgtttaattattcatcttattaaaaaatttaaaattattatttatttcgtttatgacttgttttattataagagtactttaagtatgacttattatttttatatttgtattaatttttcaaataaaatgaatggttaaactttacaagaaaaggcatctattatggaacggaggtggtagcagcaagaacacgtaggtatatgtaggcctgctgagccctcgaaacattgatgccagatgaccaccatcgatcacgagacacgtatgcatgcaatgtgtatacatgtgtttcgcagtcgtagagcacaaaaaggacagtagtaacaaaaagaaaacactttaagccagaggcaaaaaggcaagggccccttctctctagctcaagctacactagccagcgccgtacacgagcccccctggcctttgcctccctcgccgtctcgatcgaccactacccgcggcggcaaaagcacacgataaaaaggcccccctcctcctcgtctcctcctccgtaaagccatcacccgtttgaccgagagagagagaacgacgtggtggtgggttgggtgagctagcgatgtgggaaggcgggagccacgacgccgcggcgcagctgctgccgtggttcgtcggcgagccggcagcggcggcggtggggggatacggagggtgtgtcgacgtggtcgggcagggcggggtgttcgggttcggtttcgaggccgcggcggcgccggtggtaaccaggcagcagcgtggtggcgcggcggcggcggagggatcatcgagaggcggtggcggtaagccggcggtggtgtccgggctgctcggcagcctgcaggcggagctggggcgggtgacggcgagggagatcatggacgccaaggcgctggcggcgtcgcggagccacagcgaggccgagcggcggcgccggcagcgcatcaacggccacctcgccaggctccgcagcctcctacccaacaccaccaaggtgagccatgcacgccgttgcacccatcgatcgatcatccatacacacgcacacagttgcactcacgtacgccattttggatcatctctatacacttatcgcaatataatccgatctcgatttgattccggctcgtgtccatggctaaacaccaaatgaacaagaaatgcaagatccataatagagaagtaatttccagggttgcgatttttttttctttttcttggttatgaactttctaggattataatcttgtaatttttcttctgctctatcaataaaaaatatgaacggacttaactttgtctagttaacgatgggctgggattagtagctagctagtactagaatagttttgtgatgcttagtttatatagtactagttctttgattgcttatctagataaatctgacaagaaaagcaaatagcagaaactgagtattatcatcatagattgcctgaaaacaattagtatagtagtaagtttcagctttcttccatttagctaatggcatatatatcctgggagttgctactctaataggattgggccatcgagcaaatatagtacggagtactaagtggaatgaacacatggagtataactaatcaaaggataaacaccactaaccaggtggtggtggccattagttagtggcaaatgtggaaggacgacgcggccactgcacgcgcgcacgccatatgtgctcccgaaccccctgacaagacaacaaggggacaaaaaatatttcattcggcgaaaacgctgcctctcttggacactgtacacactgtacatatgtctgtgtgtgtgtcagtgtgagcgttagccatacactgttgtgtcagaagcttagaactccaacctagcgttcgtaaagctcaaaaagacatgagaaacgcagtgagaaaagctgcacatcgcgccacgccgcgcgcgtctgtatgtcttggtttgcgacgctagctcacacgcgccgatggatcgatcatttggtggccacggcgtgcgtgcgtgagtgctcgcttgttgatgagctcgtacttacgtcagtggctagatccagaaaatcaattcgttgttgttgtgatactcataacatgtttatcaatgttctagtatgctaattatatttaaattatggtgttataatatatgaataaacagttttcctgtaggttttaccgaaaatcgtcggtgtcctgatatgggcctttctactgtatatccgtccctgacttacgtttgtggttgtgatattgtatgtgtgtgtggcgtgcagacggacaaggcgtcgctgctggcggaggtgatcgagcacgtgaaggagctgaagcggcagacgacggcgatcgcggcggcagcggcggcgggggattaccacggcaacgacgaggacgacgacgatgcggtggtggggcggcggtcggcggcggcgcagcagctgctgccgacggaggcggacgagctggcggtggacgcggcggtggacgcggaagggaagctcgtggtgcgtgcgtcgctgtgctgcgaggaccgccccgacctcatcccggacatcgcccgggcgctcgctgcgctccgcctccgcgcgcgccgcgccgagatcaccacgctcggcggccgcgtccgcagcgtgctcctcatcaccgccgacgagcagcagcagcagcactgcgacgacgtcgacgacgacgaggacgggcatcgcctccttcttcgccacggcatcgacggcgccggcgccgccgccgacgacgacgacgagtgcgcggcgtctcaccggaggcacgagtgcatagccacggtccaggaggcgctgcgcggcgtgatggaccgccgggcggcggcgagcagcggcgacacgtcgtcgtccggcggcgctgtcgtcgccggcggcggcgggggcagcatcaagaggcagcgaatgaactacggagtgcacgagcaatgctcggtgtagcgtgacacacactagttgcagctaacgtgccggcattttagctagctaccactttccatgcatggcgtctatgacgagaaagtagcaaactttttagttatttttcaagctttcgggttggttttgggagtagtagtggtcctttggtataacgagagcagctgcttcatggtgcgaaagggaaaagttttatatgtcccttgtgtgtgttgttgtgcacacatgcgcgtgctacacaaattaatgcatgtgtgtgtgttgggaatgacttggatatgtaagggtgcaaagcagctgggggccagcgagtgggtgtgtaaatctactggtggtatctctcttggggtatatcaacgaaaggtggaattaattggcccgcatcgtttttagatttccttgtgaagtatatatacatggcttatggaacaatacatgaaagtgtacatggatctctcacactccaagcaaactagagtttgttcatggatttaattaagagtggatggtatagttgtatatgctcgaaacactactaaaaatatatcattccaaccggcaccacgggagcagcactgatgaggaggattcaaaggtgtcggtttaagaacgagcacaattcgagccaagccgacgcttcaaagccaaaaaaaatataaaccaaaagctgtaacagaaaaaaaaagacaagtaaatatcagagaatcaacaagttcatagatcacataatcaaatattcacatcaaagaattaacaagtttatagagaaagatcacataatcaaatattcacatgagagaataaagaggagccccgggcggttcgctatggcaacgtcacggaggagcagtacgtggcggtgaggggggcgaggatggcgatggcgctgtggcgcaagaggcgtaattgatggtgacaggcgccagcactcctgctccctcacccgatgaggacgacggcgccacgcttcctcttgcgagggcgtcgtggcggcggcgtgcggcaaggggggtgaggacggcaatggcactgtggcgcaagaggcgtggttgacggtgacgggtatcgacactcctcccactcccccacccgatgaggacgacgatgtcacggggtgcccctgaactggtttagccctatcagcgccgcactaccccttgcgactctatcggccttggaggtggaggggaggaggcggcatggtgaatcgtggctggtgatttggggaggagacgagacgagacgagaggagaggtgggggatgtggtggcttggggaagaggaaggaaagggagaggagcacgggttggacgagaaaggataagaaggaagcaaaaggggataagaaggaagtgaacagactgagaagataacgacaagagagcggaagacaggtgtcggttgtattaaaaaccgacatttttatctcatataaaggtgttgttttttaatagaaaccggcacctttctctgacaagaaatataagtgtcggttccatttaaaaaccgacaccaatttgtacagaaatgtgctagcttttgccgctggcgtccacgcggttgcgagtgggcggaaaaagcactataggtgctagttttagctatttcaacacctatagtgccgtctcctttgtggtattctgtagtagtgaaaatttgtagaagccattgttgaagcattgaagaatactgatacgaaatctattttaaactttttctttaaacttctaacttttttatcacattaaaactttcctacacacataaacttccaacttttccgtcacatcgttccaatttcaaccaaacttttaatttttgcgtgaactaaacccactcatatttttacgactcgctgctcaacaagtccttgtatgtacggtacgccgttaggacgttccaaaaatttttccatgaattaattttgttatcaccatgaacaggggaaacgtacataaacgaactttctgcctatcatgagcttatcagctcgtggttagcctcatcgtagacgataataaagcgtcagcagaaccccaagtgtccaagcagcccaaccaagcagtagtactccctccgtttcacaatgtaagtcattttaatatttctcatattaatattattgttaatgaatctatgcatatatatttatctagattcattagcatcaatatgtatgtgggaaatgctagaatgacttacattctgaaatggaggaagtagtaataaggtctagtttagttcctaaaattttttctaaaaacaccacatcaaatctttggacaaatgtatgggacattaaatatagattttaaaaaactaattgcacaattaggagaaaaaatcatgagacaaatcttttgagcctaattagtccatgattaaccataaatgctacagtaacctgtatgtgctgactgattaattaggcttaaaagattcgtctcgtggtttccagaagagttataaaattagttttttcattcatgaacgaaaactacttccgatatccgatcaaacatttgatgtgacactaaaaaaaatttccacgaagtaaacaggccctaagccaagctggccgttgaacattgcagctaaccttgctgctgacaacgtactgtatcgattcctgcgcacgcatcattgatttgcttggctttgctggtggtgtggcgatcttcgatcacttggcgcgaacagaattaaaatgtcaaaaagaatgacaaagacggtggcaaatcatggagcgtcgaacatagctgcgcacgccgccgacccactcgcctctgctcctcgtgcgtccttctgtctcacttctcatcagagagtcacaaaaaacattctcccatgacggacccaccgcgtctaccacaccagtccaccaacaccaccaccaaaggaaggaaaatccggaaaaaaggagcatctcgttgacttgccggtgagtacgtggggtgggcggtacattgtgcccgtcgttttctctcggcgctgtcctgccaagccatatgccattctcacctctccaccatatcgggtccatgcctccatggccactgagccaaacgacggcctgcctaccgcgcgagcatcatctcggcccatccaccagcgcggcaccggccgaaacagcggcaggcctcgccacccaagcggcccacgcatccgcacgcagaaaatcgcgcgcatggaacggagcacacgccacgggccgcgccccagccgcgcgttcagtccccctccctgcctctctatttatacatagggtatgttggtgtttgaaactcgtagataaagattaagattagttaaattttaattattataaacttgaaaaatatatagaaagttttcgcatgaaacacaccgtttagcagtttgaaaagcgtgtaatgaataaccaaattttcatccaactttagttggagaaaataacggggcctttgtatatatattttatatacatatacatatacatataaaccttctatatacatttgtagaaatatgtatacatatacatctacaaacttcgtatatataaaatacaaattttatatgtataagtataaacaatgtatgcatatatgtaagtttgcatgtgaaagtataaatattgtaatgtacatataaattttacacgtataaatttggaaacaaattcaaaataaaaaagttgaaaaaacaaaatgggtcatagtacctagcccatgaaaaaaaatcaagcccaaaaagggaaaaagaaacgtaggctaaaaaccaatcaagattcaaccccaaaaagaaaaatgcaaccggaaaacaagatatatgagatccctcaacttagaaaatcggatcactctgagtccctagatggtattcacctcaattttgtctgacgtgacggccgagtcagtgtgagacccacatgttatggtgaccgtgtcatcaccctctttctctcccctcttccccttcctcctctctctcactcttctcgtcgtctgggctagctgaccggggggcgaggcgggagaggagggtgttggcaaccagcgataggtgatgcagtggcggtggttgcagaggtcgcaggcgtggaggagggtgtcggaggccgacaatgggcgacgcggcggcggcagtgacgtggaagaaggggaagcggcggttgcaggggccgcgtgcgcggaggaaagccgccgtctcgatggcgtagaaattggcagagttccgttggagccccgctgatctcttccccaccctccgtccggcctgcccagtcgagaagagtgagacagaggaggaagggagagaagattggaaagagagagagttatgatgtggtcaccctgacatgtggggctcatgtggatcccatgctaactcgaccgtcacatcagataaaaccgaggtcaatatcatatagggactcagagtgacccgattttataagctgatgatcctatatatatatatatatatatctatttttttagagacgattttataattcaatgatcagttaagagatataagatgtactttttccatgaaaaaaataactaagcccatgtttaatactccaaagtaaagtagatggatcgacaaaacctcatcaaggcaaaaaaaacgaaaaaaagcagggtgatcacgcgcccgggccatcgtcaccggggtagcataatgggcgggtgatcaccttgggcgatcaacacccccgtccctcccctaacacgcacacgtctcctcctttctccccttcctgccacactatatatgaaattcaaaccaattaaaaaatataaaaagaaatctagtacacttaaaaacatattcatgtgaataaactttatacttataaatatatatacagaaatttcgtacatataaactttatgtatagaaatattctatataaaattatatttgaatctaaattcgaatttgaaccgggtatataaacttttaactataaactttggatgtataaactttagataactttgggtatacaagctttagatgtataaactttgatgtgtaaacgtgactttatgtatagaaatattttatacaaaaaaatatatttgaatccaaattcgaattcaaatttgaacctggtatataaacttttaacctataaactttgggtatagaaactttagatgtataaacttaatgtgtaccaactttaggtgtataaacttacaaaaacataaaagtaatgtggtgaaaaaaaaaagaaggaacgtggggagggggctgatcgccgcgcgttagctattccgatcgtcacctgggcaaaaacagaaagagcggccagggtgctcgcgcggcgggtagccgcgcgcgaatttagcgaattcggccggctgctccgcccgcgaagacgacgtgcagtgcagctgccgggggagaagaagcgtcactctcactcacatcggcggagcagtggctgtgggcgctatatatatgctgttacagcgtgttacatcgatcgatctgcgcagatgcatatggaaaagttattcgcagctggagtaactagctgtggcagtgacctatagtgaggggcgaagccaggataaatgatcgcaggggtcattactaaccagggtctatgttttcaaccaaaacggattgaaaacaacgcaatttcgatgttccaacttgggacaaaagtagattttgagtgaaatttggaatagtttttcaagaattcaaattttaaattgtaaaattaaaccaaattaataaaaaaaaacaaattttggtaaaaaaaatagagcgaggttaccacatgattaataaagcattattagcttataaaaaacttaaaagacaatagattaatatggtttttaaaataatttcctatagaaattattttgctagggaatttgaaaagttatgagccgctggccttatgcatagtctcaaatctcaaaaactcaaagtatatgcatattcggctgacgtataatcataaatgctaggtaattttctatttgccgctgctagtatcgtttctagttgtcaattggaatttaacacaacaatcaacaattaatgtcaccggggtctaatatttgttttcaccggggtcatagctggtaaaataaagaggatatgagaggttaaaataaaatcatcggggtctactgacgccggtaattgactgtaccttcgccactgcctatagtggtataaacatatgtgcgctagctatagataattaatagacctttttttttcagattgtgtaacagtggttttgacgtacatatatactcctttagttttaaaatatttgacaccgttgactttttagtacgtgtttgaccattcgtcttattcaaaaaatttaagtaattatttattcttttcatatcatttgattcattgttaaatatactttcacgtatacatatagttttacatatttcacaaattttttaataagacgaacggtcaaacatgtgctaaaaagtcaacggtgtcaaacattttgaaacggagggagtatatatataggcagtgtttagatccagggataaatttttttgccgtgtcacatcggatatacggacacacatttgaagtattaaacgtagtccagtaacaaaacaaattacatatataatcggccggtaaactgcgagacgaatttattaagcctaattaatccatcattagcaaatgtttactatagcaccacattatcaaatcatgaagcaattaggcttaaaagattcgtctcgcaaattagtcacaatctgtgcaattagttatttttttagtctatatttaatacttcatgcaggtgttcaaacatttgattttttttattttttttagagaagggtattttctacccggcctctacatctaaccggatatatacggccattgaaatagggaacttagcccctcaaataacccaaatagggaacttagccccgcaaataacccaatctgaaattcgctccataggagatttaaactcaggaccttgggtactacttaggtcactgtaaccactaggctacatgccctttcgttcaaacgtttgatatgatagggtgaaaaattttagagtggaatctaaaccaggccttagtaaaaaacgggccggggttctgccatgcattgtctctgattagaaatttgcacaaatgtgatcatatgaatcaaagctaggattcaatggtatgtacggtggttacgtacgtcgtcggatatttgctgatttagggcatgttttgtttattagttttcctaatccagctatactaagctacttcctccatcttttaagcacaaccacgtaagtttttcttatccaactttaatcgtcagttttatttgaaaaaaataaaatatataaatcacgcataaagtactattcatgtttatcatctaataacaataaaaaaataatcataaaaaaatttcaaataaaacagatgatcaaagttggaaacaaaaactcatagctacgtttaaaatgggacggagggagtactacatatcctttttaataataaataataccattgacttttggatacacgcttgaccattcattttattaaaaattttgtgtaaatgcataagatataaatcttgcttaaagtactttagtgataaaacaactcacaacaaaattaatgataattacatataacattttttaataaggttgtattatttcccttggtttgaatgaagattttcattacacacgaaacaataaaaactcattagtaaactcattggatgaggacctcactgattcgaatataacaatacttatgttacacatcgacaagctaaaggtgcatatgttcttatatcagatttacttattatatgcttgaagaaatgttattgcaccatgagttttgtaccttctcgtttgcagaaatacacttgtgtgggtgaagaaaagagaccgagcataaggaacacatcgatgatcaaataagttgattgaagactaaaccaaaatatttcttaagtatactcctacatcaccgcatcacttttggcctacacagaatgcaaaagattaagttctgcatattttggatttgattcgaacctcccgatagtattaacttcaaatggatttagttgctgatccagatggattcttgagacccatgaatacttgttgaaaaacttgtggagtctattttcatatggttttggtcccatgtcaaaatttctccttagctattgggaatctacaaaacaaaccacatacatcatctagtctgagtctaatttgagtcttggatcttgtaattatgtcctatgctaagcaaggggtggacgacctagggctaaccctaggatgtccctaatcatatttattcagtagacacctgttaacgactaaatttgtcaacaacaccatagtttagagttggatttgcttagattatttctgctattgcagtttcgtcgcaagtttggtttgtaaaacctcaactttgagatcttaattattcatctgcaaattgagttgcaatataccttgttcttgtttgtgttcttcgatccgtatatagggatttgtcttctcggcgaggtcaatcgggcagcgcacgattgataatcagaggagacatgggttgagtactataggggaaaacttattgctacttggccgggtgcagagtaacacggatgctagggaagcagtgcaacactagggtcaagctaactgctagataaaagaaattgtcttagtggattgcactttgttaatttttccattgatttacacataaggtgcattttgatataaaaagtcaaactttgtagattttaactaacaattagtcaaacaacaaaaacattaatatataaatatgtaccaagatttatatttcaaagtgtgctttcatacaatattggttttatagttatttaaaatatatcttatgagatatctatgatcaaattactactatattgaagattatttaaaaataaaatacgttacaaggaggtaatgatactttaaagcacgtttgggcctctaggtagtctcaagctatcttaagttcttaacaatatgttggaattgctataactatcctcacttttcataaattttttttatcgacgccttttcaaatggctggatataaataacgcattaatttgaaggacattaataagactagtaacatatgcccatatatactttgtaatttggtcatgcagtaaggattggttatatacgtggattgagactggagcaggtccatatatatatatgattgggattggttggttggatggattatgataaattaaagcactggattggttgtgggtacatgaggaggagggggagaggacggaaagaggacaactccgcttttaaattagtggagaaattgccatgcatatatacgctaattaatgactcacaaaatgatgtagaagctgaaaaatcataacatctatttttgttttggcaagcatttcaataatattgacaaacatgtgagaagtgacactttgtaataagacatactaccaaatcaaataatttagtgcctacatatatagcaagaacatgaaaggaataggtgaattcggtgcaccctctgaagcctaaaaggaagcagatccaatgcaacatacaaatcgtagaccaatgaagcgttcataaattcttactcctatctctgtaaagctagctatatattctcgtcattagaaaaagagtatcaaaatcgaggacatcgatatcgatcggaattaaaggtaggttgcgtgcatgcttggatcatctgcaaatatagatcgatgcaaggctggatgttgcattgactacgacgacgattgagcaagaatggaagcaagctggaggctaagctgctgcagagctgatcgatgaacagatcgaaatcgaagcccaaaacacggggccgagcctacgcacgtcgcggtgctctagggttgctccgcagctgttatataggacgccgacacggcacagatatcctccccggccgtactgcctgtgcctgcatgccatcagatcatcagcgggagacctggctttatttatttcatccaacctccctccatctcatgtgtccccaccacctaggaaacgatttattagctactcccggtctcgtaaaaaaccaacttctggcaacgtagttagaagttagttttttatgggatggatggagtagttttcatttcggtatgaaaagggactttaatttggaattgaaaacccatctttcttttcgaattctgaatggattttatttgaaattgttgaaattttggtagacttcaaacaaatttaaagtttgtttggcatggaggcacaccatgcatactggggacatatattgctgacctgaaattttggaaattttgttccgaaattgtgaatactggatcaataattatatactccatttgttgcggataactgacgctacctatatattttctatctctattgtattttgatcgcacattgcttttaaatgattgggtttcattgatcaaataacataacatattttcaagtatttataatttctttttttaaatggtcaaagtatgaaattgaacagtaccagtttcttatgtattagaatacagaggtagtaagattaggtcccctatgaatatatttgtggagggttggaatctcaggaaattttgtctctgaggtcatttggaacaaaggaatatgatgttcaaattctttgttggattgcgcgcctccctatgaagcaacgagataaaacaagtcaagcaaacattaactgattatatattaagatcaatttgatccattagtgaatcaaaaataatactaggtggagtaaccgaaacttcaccaccttgcgttgtgtaactgaaactctgttttcttctaatataatgacgtgtaattttttttatgcgttcgcgaaaaaaaatactattaaagtaataagacgaacatcgaagcaacagctgccaacctagatggagatatatatacatatgtgtagcgtgtctgccagtgttgatcgaagcgcttgatggccggccgcaaagctacagtggcccagatcgcgacgacgacgccgccatggacgacgtgccggccgctgtccatcgatcgaggcatgcagctaaataacgcgctacgatcgatcgatcgatggtaggccgaagcccatactccctctgtcctaaaaagactcaattcctgggtttttatgtacaacgtttgactgttcgtcttatataaaatttttttatgattagtatttttattgttgttagatgataaaacatgattaatactttatgtgtgaattatacttttaaattttttcataatttttttaaataagacggacagtcaaacgttggacacggaaacctagaaattgagtttttgggacggagggagtacgcatgtgtacaagtcttgtcgatccattcatcagtagtaatcagttgtagtagtagtacactagtactgcatgcatggcgaatggccggctatctgtctctagatggagatatatatctgctcatcggtgagagtgtgagacggtgaccgacgtgcacgtactactgacgtacatttcatataaacaatttgcctagctcgatcgatccatcatagagagggcaccacagtactttggcggcaacgtacgggtacgtattacccaatcaaatcaaggatgacggactaaagcaaaccctacatgacgacgtaattaacttcatgctgggctagctgaccattattacttcatccgttcataaatatatgttgtttagcagtaattaaggttacgaattgaagagaaggcttttattgtacccttcatttaaatgaccaaccaacaattgaagcgagataagaaaatgttaggtgtagttcagatagtgaaaaattttatagtccttatatttatcgataaatttaaaatgcttggaaatttgaatgcttctgtttatgtacagagggggcagtatactaaggccttgtttagttaaaaaaattgtccaaaaacgttacatcaaatctttggacacatgcatagaatattaaatatagataaaaaaaactaattgcacagtttgcatggaaatcccgagacgaatcttttgagactaattagtccatgattagctataagtgctacagtaatccatatgtgctaataacggattaattaggcttaacaaattcgtctcgcagtttccaggcgagttatgaaattagttttttcattcgtgtccgaaaaccccttccgacatctagtcaaacgtccgatgtgacacccaaaatttttcttttcgtgaactaaacacaccctaattgatcatgcgatcatcatcacgtgcattaattgtaggtatgacatgggtacgtgttgtgatgtattccctatgtcccataaaaataaacttagtatgagatatgacagttatatagtactgtctagattcatactattagaatgaagggagtatgtactatgtgtgagtacatccttttgtcgaatattaggccttgtttagttctcaaaaactttttcctgaaaaacatcatattgaatctttggacacatgtataaagcattaaatatagataattaaaaaaactaattgcacagttaggggggaaatcgtgagacaaattttttgaacctaattagcccatgattagacataagtgctacaataacccacccacatgtgctaatgatggattaattaggctcaaaagatttgtctcgcggtttccaaacgagttatgaaattagtttttttcattcgtatccgaaaatcccttctgacatccgatcaaacgtccgatgtgacacctaaaaaatttcttttcgcgaactaagcaggtccatataactcaatcttttttgttctattgaagaataacttgggtgatctattaattcatgcagctccatgctcctagctagttagctctccatcgatctctctcacctgtcacgagtttgattaatttgcttcaagtgcatgcgtgctagctacatatgtctcgtcagttcaagggaaacacacacattctgagctatatatgtagtatcatgcacgtatctaactttatatccctctcccagacactcagatcgatgactcacactcacactagagactagacaccttttgtcattattggcaggcaagacagaaatatatcatgtatgagatgatttgcctttggattgctcgctagattcttaatgtgattacttcggccatctttgatcatatgactcaatttgtgtttggaaatcctttattttcactttacttcaaaaggggaacatttgatgatattttaattaactttgtagtagttttcaaacaacgaataatagtactttgaattttttttttcatatgatctcatattttacaattacgaatgacattttatccatagatttttacaaccaaaattcaattttggagactcattgtttgcattaagtacatatggttaaaaaaatcaatgggggaattcttgttaatttttttttaaaaaaatacttataaactttatgtacaaattgaagacagagttcaagctaagaaatatagaacatatagaacaacaccatccatacggaaggtcaaggcaactagactgaggaaacttgattctcaggtatacaacacgtaaaaaattaatgttactagttagtaagatatgtcttgtgataaaataggtcttgactctcaggtatacataatatgtataattttccaacttaattcacatgattgacctatgcccataaataatttcattcaccgtgcaattcaatcttcttttaggaacatgatttttttttcgagaaggaacatgattttatgaacgtagtatttgacaatgtataagccatacattgattttatttacctagctagcttaatttacgaacatatatagctatggtagtagctatggatcttatacattaattgaagttaactcctaaaaatgtacttttgcaactatataattcctttatgaatggggacagaatattgcgatgcatggctagccacgctcaagtatgcatttagaataagtttgtagggaaacgagtgaggttactatataaagaaaaaacttataataaaatagaatgattatatgtctggtgtaaattgagataattaggagttaattgatttctcaataattttcctctacatgcatgaatatatatatatatatatatatatatatatatatatatatatatatatatatatatatatatatatatatatatataactttattattgtttatgattaattatacatcatatgagattatatgtatattcgttacatcaaccaatattataaaactcaagattggtagtcccgcagaattttataacacatcattatatacataatttattttaaataattaatagcttaaagtatacacggcacaaattaactcaaacaaaaaagaggtataacattggagatgatgcattagtttagcactatatattcagttataaaggactcatcaaatagctaattaatcacataaagttgtttaattttaacatgattacccgctaaactctccaaacgcatgcaagaaatatgtgaaacattacttcacattttgttgatttaggtcactgtgacaaaatagtttggccaatttgcatattaatttatatatatgtacagaaaataatttggcttaagctagttagccctaattgagcttgcccaatgtgcagaaaataaaacaaaacatgtatatatatgtggtttcaatctttgttcttactaatatttgcatataactggaaatatggttattaagtataaaataacacaaatatattctaaacaacaactcctttgtcctatatatctgatggaattctaatatacttatgcatattgcagcaaattggaggatattatatgcatggttttgtcattaaaattgctttgccctgatattaagaaatgtcctttatgctaaatttcttcttcgatcgatagtggcagagaaacccagagtctgaacaatgaagttaattaatcccaaggttttgaacaggagtgaatttttaaaattattgtcgtacatattgaagttaaattatattaatatgtgaattttctcttctttcctttatagtgacggattttgagttcatggaaggatcgaaacaagactcatttgcctatcacctcacaacccacaagaagcatatatagtttcaaattgtccattttggtttaatttcatcacttgtatggataattggatacttttcaagtactgttactcttacctgaataatacatgtacgccatgctgtcacatcatatccttgctgaaccaaatcttggaatcatttaactaaacgattatcttcacacgcaatcagttgtcatctcatgagagatccgtatgcagtcaacacgaccaagtcaacaactctctagctatagctagctaattaaccatatatatgacgactacttcaagacaaaattaattaagcttactaatctctcctaaattgaaaacaccaaacaaacaaatcaagccaaatcttacaaagcttagacagataagcaaaagcgagaaattaaaattaaagagctgcatgaaaccataagattagtcgacatagtactaagtacacatgcaaattaattaacaactagaagcgctgaaatgctgggcagagtagcagatcaagacctaatcaatcaatcaagctgcttataagctagctaattaagctgctactagctagaggagaaaccatgcaagcaagcaagctaagctagctgaagctaatattgcataccgtccaagaaatcgccgtcgtcgtcgtagtcgccgtcgtcgtctccttctcctccggtgttgttgctcatcatctcggcgagctcgtagtagtactcgccgagcaccggcgccggcacgaggcggccgagctcgcagccgagctccatgggcgccgatctaccacctctggggcccctcgccttgtccgcgtctcctttccctgatccggcggcgccgaccgcgaccatgtggtgatcgccgccgcgctcggccgacgacatgcgggtgtcgccggcggcgcggtgggaggaggaggaggggtcggcggcgaggcggtcgatggccggcttggactgggtgagcagccagtccaccgtcttgctggccttgtcgaagccgaggcggtcctgcagcgcgaagaagtcgcgcgcgacgtcgagcgacagccgcatccggcggtcgcgcaccccctgcgccgtccggatcttgctgtgccggtccgtcctgaacggccgcttcctcgccctgccatggccgccgccaccgtttcttgccgccgtcagaacagccgccgccgccgccgccgccggaacagcaggatccgcggcggcgccgcgcggcggcctgcagagcacggcctccagcgtctcggagttgaactggccgtggccggagaagaagtggtcgtactgatgctgctgctgctgctgctgctgatccagctgctgctgcatggtggtcgtagggtttggaggcggtggcggctgggcttcttgggagatgcagaaatggtgaaggttaggaaagtaaggcaacattttgtgtatcactactttgcactcactttgtgtactatagcttcctactgggagtgagatctatagttctagtactactgttgcaggcttgcagccacagccactatcttcttcttcttcttcttcttcttcttcttcttcttcttcttcttcttcttcctctcgatctcctcctctgttcttcctctcttcacatgagaactatagctactagcactactagctagtgatcaggtgatgatgagatcgatcaagatggtgatgtgtgcatcgaagcttaaggagaggggaaagaaaaggttggagaggaaaggggaaaggaaaggagctaagcagcacaggaagctgaaagatgagtactgagagagtgagctttaggtattactagtactagacatcaccatctctctctctctctctctgaccacaagggtttgtttgtttttggcagtgatttttttgcttcagagatcgatatatcagtgatcgatgaggagcaatggccggagtcgacgccggacaaaccaactgtttgcgtcactgcagcttaattgggggggttacaagctacgagagatcgatcgagctatggagtaaactagtggagtagctatatattagcaccagctgctgctggtagctggtgtgtgtacatgtgtgtgttggtgtgttcgtggtatggagagttaggaatggaatgatgaaggcattattgtggatcgaccgagggctacagcgatgcactgttgggacacgtggtcacgcaggcgtggacgtatgtttgctcttgcagttacatgtatatacgtatatgtgtataaacgtacgtggaagtgtacgtacgtatatacaccgtgatatatataagaaggcatatatatcacactttttcatatcatttccatgactggagagcttatgattatgagaaataactggttgatatcagtttttgagaatatgaaaaggttagattttcaagcttctggtttctaattaatttcctgaattatgtatatcgctatagattcttagaatctagttgggaatatggctatttggggagctaaagatcttgaagaaactgtaactgctagaaattaaactccccaaacatagtttagaagacatacgagagatggttagggtatgttcaaaggtagaccttgatatgagttcttagacaatacacgattatttagagaacgcgccattacaatagttaaaacaatagtgaccctaagcattaacccataaaacttctattactactcttttttttccacccgcatacatcaaagttttcattttatagaagctgagagtcgctgttaagccattgttaaccgtgataacaatgtctgtctcttctctttctgccatgtcagcaaacctaactagcatgactaagggcccactactattaatgactattgtatatgccggcctttagtatatactccctccttccctagatgtttgacgccgttgacttttttaaacatgtttgaccgttcgtcttattcaaaaacttttgtgaaatatgtaaaactatatgtatgcataaaagtatatttaacaataaatcaagcgatagaaaaagaattaataattacttaaattttttgaataagactaacggtcaaacatttttaaaaaagttaatggcgtcaaacattttgggatggagggagtacttgtataccctagagtttgtgttggaacataatttattactagcttgcaactaatagtctgatgcacaatatatctagtcaagtgtggtctgcaaatacttgaattgaggattaatttaaaattttcagatttgaaacaccgttctcaagaatcttattgacagaacaaaattaatttagttgtggtttacaagagctctcaagcgagacagcaaattaaatagattattgtgctttgaagtgttggtctcacattttaaaaagtttctttctaacaaaggtatattgttttccactttggcctcatcatgtcgttaggtgagacacagtatatatcttaagctagctacatatacttatatatatctagcttccagtgtgattgtgtatatataccaccgcaaatcccggtatatatatatatatatatgtatgcagttcatatatttgcatgcatgtccaagttgtagtacgtactaaaaggaccagactttgtacttctaaatatatagatatatgaccacaggcatgcatgtgacattttttaatttcttcctacgacgcactgcactgcccctgcaagcatgcctgctaaacaggaagctgtgcatgcatgtaatagttgaaatggcaggcgcgcagaaacctagttattcattttatacaagaaaataatatgctatataggcattttttagtttattattttttacgaaacaatgtagattatattaaataagaaaataaaatacaacatgttgttataagttataagaaagagatgataaaacctgccaatgcaactcgaataggctccacatctacgacataatgtgcgatgaaaaagtatatgaataagcatccgctatatattagtttctctaggaaatcattaagccggccggtatcactgaacaaagttgagagccatggaatctgcaatcggtgccgccaattagatcatcggtaactccatatatagataatctttatcgttgatctcaccaacacaagaatatcttctgatgaacatatggatttttttttaaaaaaaatcaagacactagaagaatctaactctataaactagcaaatatagttaatcctccaaagactttgttcgaaaaaagaaaccctaaaatcttaatagagcatatcagatgagtcatttcgcctcatcatcaccgagaactctaaagatggagaaggccggagaggggcccagagagctatatatgttcatgtatagtttgagttgcaaggtaacattttggcgagccctcttttcacgatgaacttttaccttatattttatcttatttcttcaatttattgttagatagtcaatctaatggtacaaatttgtctcagtaatatacttatacatcattgtcttctacctcttgaaaagacccaccaaactcctcatccacctccaatcatctaccgtctgtgcccatgccgcgacttctcctaacaatgttgcctcatcactagagggccccatgccctgctacatttgctacccctctcatcaacactattgcctataattcttcgctcctctggccctctgctatgttcctctcatctagtgctttaacttcattttttagttcttcatcaacaccgatcactatgcatgctcctaaagtgtttaaagcaggggctattatacaattatgttttacactagagggataatgcatagaattagaggactccaatgtaatttgtcaaaagctgggggcataatcctgtttggtctccaataagctccagatctaccctcataggtagggatgattatggactgacatacaggtaatcattacctataccttggttaaggattgttgtactcatgggttgtcaagcagggcttgttgaagttgcatggcgatagatcgagtcgaaggagaccatgcgcaaaaatattaaagaaactcaattgagtgttgaaatattaattttttgtagatttcatccaataattttctctcaagtagtaatacttaattcttcagccctccgccatcttcctctcatctagtgcttcaaccccacttttcaattcttcatcaacgacgatcactatacatgctcctccaatcccttttacccgatcactatacatcctcctcaaccttaaaacctaaccactggggactgccacctcatgatcaccttcctatagtggttgaggctcaaataatataatcctgagggagggctggaggctaatgtgtgtaagttctaagagactcgatctgatgtaatttctctaataccgggagacgaggaggggggataacccaatttggtcttgaataagctccaattctaccctcatatatagggatgagtgtggtagaccgacctacggtaatccttacctaccttggttaaggattgttgtacccatgggtcgacctcgcttgtagggtctgccgaagttgcgtgggtgttagagatggacaagatgaggtgaaaaaagtataaggcaacttacatcgaatactcaaatactaatttgtaaattttctctagcaatcgtttcgttgagtttgtgcggatgtgcttgccctaggcatgcagttgtcttgttgttcactccgttgaggttttttttttaccgatttccatttaaataactgtgtagttgtaaagtttttagcgcttggttttctcttattaaactggggcaatatatactcttatttttataataaaaaaaggatttccctacttttcggactttctcttccaaattttttcctctagtaagtatcaattttctatcaagtgaatgctacctccatcccataatataagaagttttagagttagatacgatttttaagaaagtagttagaattaagtggtggaagattgtgattggttgagaagtgaaggtgggtggaaaaattgaatagtggagggttgtgataggttgagaagaaaatgttggtgaaaaagttattatattttcggacaaattctaaaggctaaaagttgttatattttgggatggagggagtagttaattaagcactccgaaatatatacttattgagtacatgttattcaatgagattcgatcgaccctctgcgtaattttccggtgagattaatttccatccctgacatctcgatcaatcaacttaaccggcatcatcgtttggcatcagctaggctgcacacgtcgtcgtgcaataatcagctcgcccatatggtcaggggatcgatcgaaaggacgagtcggccgccggccggcgagaccgccgccgccgccggccccttctcccctgcagctctcacgcgcggtccatgtggggccccacgcgaccaatcccaccgggcaggtggtttcatggcgttggaccggtcgatctctgctgattgtgcagggtcacgcatgcatgcagttgcagatgcagatgcaggcggctgtgtgcatggcctgtggcccgagagatcgacgacgtacgacgacatggccgtacgctgcgcccatttgacggccgcggccggggcctccctctcccccggccggagacgagattctagacgtcagctgcgacccatgcatgtatggcctccgaccaaggcgcattagtttatgcatatctatgtttttgggtgtccctgtagattggatctgatcaatctgtggtctctctctcgtcgtcgtgatctcgctgtcatcttctgcatatgcacaagcgtctctagctctagcttcagtgcacatatatgcatttgtgtgcatcttattcgatccatatatagctcacgtacaccaggtagctggcttaattaattaatcaaccacttcaaattaatgtgcatcgtcgtccttcgtatatacgtacacgtacgtacgtacgcatatatactagtgtgcatataattaaatatatacgtagagaacactctacgtataaataccccacgtgcttcgatcgtgcactcgattatatgcgtgatgatgatactccttccatgcaaaagtttaaggtgtatttcttttagagatttgagaaacgcccggatcttccagctagctccacaaggtggtaggctatacgacctgggtttgaagcctcaccccttctaattatttaatatattatgtcattctctaatattcgcgtcttttagagatttgctccggtttagcaaaaaccaaaaagtatctcgaggtatcggttacctcacggtactaaatcgtacctcgagatatattttattggtccggagcaaatctctttcttttgtcatcaagaccaagaaaaaataattcattttgtatgtaacgaagcttatgactatatgcatgcatgtaatatatgagtattaagatggctgtttaggttccggtcaataatttaatctaaaattttaaatcaaaataacaacattttcatttaagtattggatgtatgaagattataaatatatctatcttgaaattaactaaacaaaagaaaaaaataatgattaagacttttggatgaaggaagtatatatgcaaacgagtagcaatgtatatgtagccaaaaaaaagtactctatccgttttatattatgagtcgtttaatcaaaattattttgatttaaccaagtttatagaaaaattgagcaacatttacaacatcaaactagtttcattaaatttaaattgaatatattttgataatatgtttattttgtattaaaaatattaatatttttctacaaaactaatcaaattttacaaagtttgacttaaaaaaacacaaacaacttataatatgaaacgaagggagtagcaaacagcaaaaagagatatatagaacatgcatgatgataacatcgacgatgtatagtactagctatatagtgagtgagtgacgacctttcggccgggtgatggtcgttgcttctcgaccttgtctttccgtttctgcatgccgccattgctgccttcttcttcaacctctcgccactacacacacctctctcaaacgtttagagctagagctagcagcagctggctacctagctacacctacaggcctactaagaccagagagaggctactagctactcctagctaagctatacatctctctctctctctcgtccacataatcttggcctgcatcaaacgtgcgtaaagcgagatgcatgcgtatgaacagtacacgcaccataccttgtgtgcgtgcttacacacatatatatagatatatagatatatccgcggctagctaggcttctgcaagtgtgtggagaagatcatcatcagcccaaaaagtggctaatatattatgatgcatgagttcatgcgtgccggccgccacgtgtgcgatcgatcgtacgtgcggccaccagtgtgtgcacacgtgccaccatcgacgatatcgatcattgataaattgttcatcttttctcatcggtcttaattttagatttagtactagttgttataaagagtatatttcagagttgctgggtagcatatgtgtatagaaacatgcatttctaaaaaaaataaaataaaactaggacttaattagttgctattcccttcgtctcataatataagggattttgggtggatgttacacattctagtacaatagatctgggcagacggtctcatcaaactcaatattataggacggatggagtaggatttaggaagtgcaaagtacagaaattacctaatggagttggatttggtcagtgaccacttcttaatgggtcgatcgcctcttgatttgtgacctgctcgatcgatctccaccgtcgatcggtcacacgcctgcctgaagctgcctacagtttgatctccaaattaaaatggcagctggttcatcgatctagctaacacagtagctggctagttaattaaagaaggatactgttgctagtttgggagagttcatgcatgatatctatagctagctgatcttcattttccctttaaaaaggatgcgaggatatatcaacttaactaccatcaactccacacaaactctgatatatatctgaagttttctccagacactacgcatgcgctcattcgatctccagacatcatttctatatggaattttttttcagctcagtgatcctctcctatttgatccactcacgggcaaacacgcggtgagggcgtagtaccgtcttgtagctttcgcattttttgcatgatatatgatgtgaaatcgtaactacatgcgatgcatcgtctctgcaacgacgacacacgcaatgtagcaaaatgcagtgcacgatctcgttctctgaatccgtcttcgacgcgtccgatccccataaaagggaagaatcgaaatctgtatacacctgtcgtctatgagcaaatctgatggctacctaattaagcttttcatccaccacgcctggacgatttgggcatttttctccgacacaaactgtcgaaatgttaggtgctgatcacagggatctgttcagcagatagctaggaaatgacgggctgaataattttccctttcatttggataagatatctatacaggatcaaatagttcagacaaaataaaatcgatggcctctaaaatatagcgtaatttgatactaatatactagatttctattatcgttgctaggaaacaggagttacttaagagaattacaatatcacatagaagtctatcttctagcgcacatatttacgtcgttactatctctgtttctaagtagtagatgacgtcacatatatgtgatacatgtagtcgaacattaaaatcttaaattattaatatatgtaaaaatatcaaggttttatttaaaaacgatggtaataaatttaccataaaaatattttcacattgttagaaaaagtatggagtggaacatagcacatgtatctatgtctaaaacgtccttaagtaaagaaaagtatggagcattttatgaccaattaatgtggatataattaacgaagagactgttgatgaaagtaaaattgtctattgcgctgtgcacatgttcttgagcgacatttgctgatgattggagagactttcgcataggagaaaataacaacacatctgtgtcaactgtcaaacgagatgagcaaacagtgaaggctgattagatcattcacctcctttccttgtcggtcgccaatgggttgctcacccccaaaatgtattaatcagatttgtctcagaaaagacaggagtttgacttttcagacaagagattgtcaagcttgacacagcgcagaagcagctgaatagatttaggatatcctctacatagccagatttatcaattgattaattcaagaataacatatattcactgggctggggcatcttgagaatattttcccaaaacaaatttctcttgcctaaacaaaaatggacatgtgtggctgaatgctcagcagaacagatcagtccacaggttgatcgatgctgccaaaattcttgccgtcacaattctgtatatgatccattacacaaaggatagccaaaaggcaaaagcaaaggtctacagcaacgaagaaaggaggcctacacatacatgaaagcaacatggataaggactaaaaaagaggggaaaaaaatgggggggtgacatcttgtgtcacccggagcaagcacgcatgcacctggcaacttcttggcaagcattttgcaccatgcatacaggtattggattggatgtccatgtgatgtgaggcagcatgccctccacaagaggtagatcattgcaggccacagggcatggcaaatcatagcaacgtgaccaaagaaacgaaaaggctgtagccacaaatgttgaccttgtaagctgaatcctcgtacggcaagggtgatctttccagtatatacagcataaaagtgcacatatggtgtatttgacatgcgcaaccggtagttgccctcatcatttgacaagaccaggagaaacctcatgcttcaacttaatcattggagatacgattgagcagataagagcatattgtcctttttctaagtatgcgcactgatgcagattcagaacatttggtctctgagctgcacaaatttatatacccatgaatcatgaaactggagcaatctgaagttcctgctgcacaagatttttcttaactgtgccctcagttggtaagattccttacatgggaaaccaaacatccgaactagcgaattgtgcctcagaattcaatgatttaagtggattttcatgttggcaccatatgcaagaaaagattccaagaactcgcacgcttcttttgcttcctttgtgtcatatcactcagggttatgtgtgggttagcgagcaagccttctgattttcttgtaccctactctgacacaaaagacttattctagcattcctttgaattccatagccaaaacaatttgtcttcctctctgtggtcatcttcgctggctcgagaagtaggtaacataaattcctagaactgtggtcgacatgtgaacatctagactgtatcacttattgaatcagctgaactcatagcatcacaaacaggtagcttgttctcaatactcactcgacaaattgggcatgaccggcacttatcagagcacgctctgcagggccaacaaaaagaactttagaattccacttgcagttaaacagaaacacacccaacatgtagcaacttgcaataatacataaatatatacaccttgcaagcttcagacgacataacatgtgaaacatacatgaatcagtgattgccaaagaagcttactcgcaaagaacataatggcggcatggaagcagaactatgcaaatgtctctctcaaagcatatccgacataggatctgttcctgtatttatatagaaaaaggttcttgttaaaagtaattgaaatcgaaaaagcacatcaactcttttatggatgagatttaacagcctaccactcatgataatgattcaatattaaaagaaaataaactccaaactgcaatactagaaataatattatataggtgcagcacagaaccaaatcaacctagagccttgtgtatcactctatttgaaattggacattgtagaatgctttgtctgagaagtgagaatggaaat

SEQ ID NO: 24772 - DNA, 4045 bp, Oryza sativa
ttatcaagagcctgacgggtcccatttcttttattagaaataaaacatcgagctacagtagtcttcaaaaagaaacaggaaataaaaacggaaccttccacagagaaatgggggttaagaattcaaaagctagccctattacaaggggttcctgactcttttcagaagttttgcctgaacagatatctaacagcaaaaaagaaggagagggaattacaaaacatcatcacttatatctatctcatccctcaatccttttattgttgattctccatccgaactgcgagttgtagacttcatttgccgccctatcttatgagtctggatcccagtagcagtcttcttcgacttgcctcctccttttgcagtagtgcccaggaatcaactcaatggcaagccaaaaagatcacatcagtggggtcttttggataaactttttcaaaacaagctttatttctagatttccagatggcccaaattatagcagccattcctaccataactaagtctttcatgttcttatcaagtttttccaaccaatctccaaaaatgttttgactatcaagggctgggttcagattcaggacacaaattgcagtgttccacattaatcttgccaggggacggtcaaaaaacaagtgttgcacagtctcctctctatcacagagctgacattttttatccccttttctccagcctctcttgtataaattgtcttttgttaagatcctatttttggtgaagagccacaaaaaaaccttaatcttcaaaggagttctgaacttccaaatttttttctgtgggaaatgcacttgttgtagcttcaaagctttgtagaaagagttcacggttccatccttagttaaattccatcgtagtttgttattgcagttatcttttaattgcacatcaccccaactagtacaaattttgtgccaatctctcaatctccctccactcaggtctctcgtaaacttgatgcaatttatccctttttgtttcagttttgccacagttatatgttttgtcaaagtgatgttgtaaaggttggggaattgttcatttaaaggtttgccccctatccagctgtcctcccagaaaagtgtcttttcaccattgcctatcaccttggagcagaatttcagaaagatgtttttgatctccatgagcccatgccagaaatgggagtctccatttttaaatttcaataaagatatgggtttgcaacccatgtatttactggtcaaaaagctttaccaccaaccttcctcattttccaatctccagatccatttccttaacaaagctttgttcattgtttccaaatctaggatccccaggcccctttgatctttgggtgaacataccaccggccattgtaccagatgataaccttgtatatatgatatgacacattttagtgctatgaatctgggcatgactcgattggtatattttacaaacgaggtagtaaaagcagtaccacatgaaggcaagaaacagcgatgactgttcagatgggcctctcaagctcattcattcaaatccattttctctatgggtttccggaccagtatatttcttccaattgggctcgcagggaaaccactactctcataagagaaaaaaagaaaaaaaagaaggccacagcccacagcaacacatcgtattccttcccccgttacacttacacaggaagaaaattttctgttaggagtaaattgcatcgccggtacacgaacttgttaggtggggcaatctagtgcacgaatttgtaaaacacttgttttggtgcatgaacttatctggtgcgtgcggaggaaggcaaaaaggacattacatggctaatcttattgatttaggggatgattaggatactatgtaaacatatatctgagaaggttactattagatatacacctcttcaataaaaaaaatagaataggatatagtgatagtagaaaaattttaaaaaagcaagcaataatataaatgttagaaatatatgaaattcatcatttccataatgagggataaagtagataccaaatttataaatatggcatgtcttatgcatgcttactacacgtatacacgtcacatcctaatcaacatcaacttcgtaaaattaacatttataagttattttggtccttgtccgcatgaagtagacaagttcatgtaatgaaacgagcgttttacaagtttatgtactaaattgtacccacctaacaagtttgtgtatcaccaatacaatttactctttctgttagtatataaaattaatataagccctccaagtcacaaaagctagcttaatggatacgattttttttcttttctttttgcgaaacatggcaggttatattaaaaagcaaataccttttgttttactaccaggaatgccattgttgagtaagccatattcaattacccgccagcaaaggagagggattgctgaagcgtacagtatcagccaatgaaccaattgggtagtagtatatcaatccatagatacagtagaatatcaaaataagacataggcactgtactcaacaatggcatccctggtgttgaagtccacaaaataggttgtaaaatcaaaggtgtttttgattattattctgtgatgaacaattgggcattggagattattggttttgttatttagaatttattcacgaagtggttttggagatgattggatttcacaggtgaatctataggatactgctgttatttcatgttaccgatcagaccgggcagtgtgtgccggtcagaccggtggtgatcgagcggtcggaccggccagcccgcggtctgaccggccgatgctgtgtcggtttcggtttctggttgtttatttggatatccgtgattatttcatgattatgacttctagatggatactatacgtatgtaatactgttgtttgctactaatgagtcaagttggagatagcttggtctcggaatatggtttctttgtttatttcatgtgtaggtgacttgatgtctcgggagagtatttgcggtgatggaccgggagtcggcttggggataagacgacatccgtggtggtcagagatcatgcgggatacttaggctagagttgatgcacgtggttgatagggattccatatggcatacgatggaggtattgtgtgcgtatgggatgcagagtcgaatttggaaggagtccaaatttgatacgattggttatgtaaagtttcttcttatactatagggtttctaatgtgtttaggactcttagtatgagttttgttcgtggttttaggctacctacctcatgtataaatagagggggagcgtgaggcttcccggtatcgcttttgagagcaattgagttgagttttgagtaaggtttcgagtttagttgaaatttttgtaaggagtgttgttggtgcactttgtaaacacagagagaatcaataaagtcatcatctactttaagagttcttcgatttgtgtttcaccgggtttcggcggtctaactggcaactcaccggcggtcagaccggcggcattgcggcggtcagaccggcgggagcacggcggtcagactggcggcggcgacaggcgcagcaggcgatctcggcggtcagaccggagattcaacaccggtcagaccggtggcatccactcggtcagaccggcagaacaacttcggtcaggccgacttccgtcgatttcgagggtaacttttatttccgctaaaagttttcggttttagggtataccaaccattcaccccctctcttgttggcttagttcttgtgatttgatcctacataggtgtgtgcctgcacatatcctcgagcaaagcgaaaggcgccggtgccttcgacgatcggcatctcacggacatcgtccactatgtggttgctgccgagcacggtaatcacgctgccgttgtacggcccggtggtgttaggcccagaaattcccgaatagaattccaagcagaatgtgcattaaaatccccgtccaggaccggccggggtacacaaacgacaatgttgaca

SEQ ID NO: 24773 - DNA, 10182 bp, Oryza sativa
ctcacctgtgccgagataccaaaggaagggctcgggaatgtgccgctcaaccttgacctcgcctgcgccaagctgccggagagtgaggcgtagttcgttctgctccagtagagagaaggaagaaaggaaaaatgacaggtggtcctaggttgactggattgcctcctaagaaaaaaccagagcggtttggatgaggggtataaattgcatggttttaagagatgaggggcgtctaatacccgattttaaagttaagggtgtattttagataaatataatagttgaggggtgtaaaatggacttatcccgatttgaacggactattataccatggattgtctacaaattaattatttttataaatagaattttcagaaatagcttagaacaaatgctctaaatagtgcagtagaataatgatttcgaggaaatgttattttctgtgagtttttgaagttaccagcttttagtgttttttaagataaggggaagagttttgttaaaaataaaattaaatccgacccaactagggatgcacaaaagtctagaaaaataaaatagaaaaaaacactaagacaaacctaaacatatcatgttgtcttgtagcagctcactcaaatagaaccaagacaagaggttaatcctagttatttactccgaaacaacgccctcgagaaatacatgacattttgtctgccgctgctattggaacacaaggctagattgttattcgaagcctgacatcacaccttcaacaaaggaataacacacaagcagcgatgttgtggaatcattaggttttcactctggagtgattgctagtactctgtgccatcatctggatggacttagcacaatccactcacaatctgatcataaccacaattccacaaaaccgcctttagcattcgctgaccaagcaaccaatatatcagattgctaactatacagaccaagcagtaccaatgtgtagccaccaaggacaaagtactagcctactggatctgccaccaccaagcgaatgaaagaagccatcatcgaaccggactaccgaaaacatgaataaaattatcgctgaacagatcagtatggaacttattggcacaaccggataagagggtgccattgcgcccttcatcagctagaccaatatcccttcttggatcacgttcggattgatgtgatgtcctccgcattgcatgtttatcgacccaaacaaagcggattgccggttggaagagaggatcagcggtgaaggggtgtccttgctaactaccgattcaactcctccgacatccatggcgagcacggtcacaacagcgatcgaccgatcttcctgctaattcgcacatggtgttgatctctccgatctacttcatcgtggtgttgggcggtaaaaaaaactaccaccatcgtcaccaacggcggcggcggaggcagaacaggcgttgaggcagctggcgacgactagggctgctgaggctcctttggagtcacccacgggaggcaacctgagaggtccgcgtgtgccagattttactgtgacaggggtattaaggatatgttaaactagggaattttaatgtgccagatttagaccagtgcgtgtttttcgcgtcaacacatgggaattttaagagctctaatccaatgtttaaaatagcgggtctaataatttaagtaaaaattcaaggttggatggttttctttttttactctaaatttctaggatttctctaattttattagagcgtcacgcgataatgtagtagtgtttacaagacatttaatagaattttagtatataatagatttctagggtttctctaatttatttgagagaaagtttaatgtaattttagtatataacagatagatttagaagatggtttaaaagaacattgattggatatttcttatagttcttaatttaactaaatatatttatatttgggaagtaatatattttatctttatattgtagaaattcatatttgaatgtatgttttttctgtctgttttatgtacatgtatatgttttttcttccagcgaagattaggaaaattttgttttcaatcatgtacaacgtttgtacgtacggaaagaaagcagtggcatttgtaacgtgcaaactcattcgtacatgaggaagttattattttttaatctaatgatgtaaaataatggatccatcaatttaagtgaaaattaacgatgagattagatagtgcatgtggtgacttaggagcgttcgtaggagtgccatgtagcggcttaagatcgtttgtaagaagtttaatggatttttagtatataaaagattataggggaggttcattactttcgattggtcaacaacgcaagcaactaactaacaaactaacaatagagtcataacatgcaatgcaaattaatgtatggatcacctgattaattgggtcgtcgttccattcccagccgatcgatcgcttcaaccattcgatatatatagctgccctaagcaggatcggttatttatcgatcgattgattgatgtgtggttatggccagcggtgtggtgatggtgatggtagtggtgacggcgacagcgatggcgatggcggtgcaggggagccgtcactcggatttcttcgtggagggcgaggtgtactgcgacacgtgccgtgccgggttcgtgacgaacgtgacgacggcgatccaggccgcgcgggtgcggctggagtgccggcactacatgagcgcgagcgggtcggtggagagatcggcggaggggacaacggacgcgacggggcactaccgcatggagctggtggaggtggacaaccgcggtgccgagttggtgtgcgcggtggcgctgctcagcagcccggtgaccgaatgccacgagatggaggtgggtcgcgaccgcgcgccggtcaccctcgttcaggacgtcggcctcgccaccatggtccgccgcgccaatcctctcggcttcctccagactatgttagctagatacgctgatacggatacgcgatacgtggatacgaagatgtggcatttgtgaaaaactaaggatacggggatacgtctatatatatattaacaatataaaaatttaatatataaatttatgaactcttgcatggaaataagctcgtataatgtcatggaaatattttctaataattgtaattgactaaggttggtgaagcgatttaaccccgagaatgatgatgcagactgaagactgccaacttgccaataacttgccaacaggtttattccaagagtgtaatgaacatacacgtcgagagtgttagatgcattagcacttgatattccaatccgaaatttcatccgatctaaaagtagcactttgtaccaagaaaatagaaagagggacaagaagttaaaaaagaaaaagaaaatcattgctaacactagcatagctgcatgggagaggccaacaactgaatcgaccgatggaacttgcttgcctcactgctgaagtaagtggttgcctggttggagatggcgccggcggcggacggcggtgctatgcctggcggcggcagcactgcattcagcatccggtgttacgcccgcatatggcgacggcgcacaactctgcgattggcgtccgtcagcggcagcggcgctaggagtcgcgagccgcgtggggtgtcgggccatatgcgagaaccacggaagcgacgaacggcgtggagttgcaggataaagcgatgtttagttctctcgatcgtatccagaaggtatctcaacgtatcgggggagtatccagattttttttttgatttttctgaaaatcaccaatatcgccgatacacatgggatacgtatccgatacgtatccgtatccttccacgtatcagatacggatacgtagcttttgggaagtatccaggtaatgtagcctccagacccgcccactccccatctgcggtgaccttctcaagagctacgcgctcggcaccgcaccaagctactagctacctcatacagtgctccctttattattatttcctcttcttgcttttatatttatattatatccgtgcgttgtaatgggtgaaaagattctaatgataatatatgtttttcatgtataatcatgttaatgacaatgtttgtattttaatgagtggtttgtttttttataaacggtgttttttttcttgcgtgattttctcaaaccatttttttagaaatggcgtatttctttcaaatatttttttcatagcatgtttttttttgcattttttactgacgacaaaaaccatattttttctccctttttttcttttatttttttgtgttttttgcctgttttttcaaacaattattttctcgcgctttttttttgcttgttttttcaaatgtccttttttgcttttttttttcaatacaggagaatatatgacgaaataaaagccgtatagtagatggcaaaaaatcgatggatcctatccgagtcaagcatccatcaatttagtattttctctgacagttttttcaaagcgatttgttttttaatagacggtgttttttttgcacggttttttcaaaccattttttagaaatggcacgttttttctgaccgtttttttctcgcgcatttttttatttgttttatggaagatggaaaacattttttagcgtttttttgcgctttttctgacttttttctcacacgttttattgaacggtttttattttctcgtgcattttctatttttaaatagttagattagattagagatagagaagagatatatagtaattagaaatcgcaccactatgtttcgcactttccatttttttctcgcgtgcattttttattttatacgaaccaacttcttattttttaggaaccatttttgtcgtcacatttttcgcctttaaaggaatcacattttttttctctttttttctgttttaaaggaattggatctagtgttttttgcaccactttttttttgccgacaaaaaaaaccaggcgaaaaaaatttgtccgatccaaaacaaaacgggcgaaaaaccgggcgaaaaaagaaaagaaaaatcaaatctgtctgatcaaaaaacgggcgaaaaaaagaaaaggaaaacaaatccgattccacggtaaaaaagggcgaaaagaaataaaaaaggaatctgtctgattcctaaaaaaacgggcgcaaaaaaaaaccaggtgaaaaaaaagtccggccaaaaaaacgaatccgcgtggacgcagtaaaaaaagagcaaaaatattaaaaaaacaaatctgtcggagtaaaaaaaaagaattatatgcgacgtggtaaaaaaaaaatcgaatcctaatatatttgacgcggtactatatatctctatcttctctatctctgctacttaaaaaattaaaaacatttcctatgtccataataacaaaaaaagggcgaaaaaaacattaaaacaaaaaaaaagttcgattcaatttacttccgttgtccgtgaaaatcttatcttatcttaatctcaatactacttatatatatatatatatactacttaaaaaataaaagaaatttccgtcgtccgttgggaaaaaaactgataaaaacaaaagatcggaaaaaaaaagtccgactcctccaatggaaaaaaaaggagagaaaaaacaaaaaacgaagagaaaaaaacttccatcgcaaaaaaaagatgtccgactctaaaaaaaatccgactcctcggcggagaaaaataaaggcgagaaaaaacaaaataagagaaaaaaacttctactataaaaaagaaaaaaaaggtcctccgtccccgcctgtgcgatgaaacgccagcaaaaaaaaaagaaattgaggaaagggataaactagattgaagttcccaaaattaaaagaggataaacgatattgaaactcccataactcgaaaagagggaataaaatatattgaaatttctcgacaaaattctctaaattcgaagaaccctaatttcgggtaagaaccataagagtcaaatccaaatcaattatgctaagggttcgggttacttaccggatttgaagcccgtgagctcaccggagctttctgggaagcggcatcgccgcaccttcacctcctcgcagtcgtgtcgggttccctgcgcgcgcgctgtcctggagcacccctccaccgtcctttgccgaagacgggaagcgtcggcttggcatcgcccctaccgccgacgaggtccaggccgcttggcgctcgtcgccgtttgcacgcccacctagccggaccgccgacgtcgtggcacggctttgcgccgcccttgggtgcgcctcctagccggcgaagcaggagccgctcagtggtcgtcgctgcacgcgcgcaccagcttgccggaccaccgtcgttccgctcactcgtcgccggagagaaatgggatcaagagagatggatttgggacctagggttttgcccctctccccggtcgatgcttcattcgtcgcggggatgattggagccgtccattagattggacggctcagattcgcccagcattaggccgtcgccgccgttgattacgctgcgcccaatgggccgcagaagtgtatcggtccgtccccgcatatgtgggccgcgctcagttgctcagcttgcgggccgtcgaattgactcaactcaccaaagatgggctagcccaagtttgggccggcttgggaagacctgggccgaaagcaaatttgatcaaacaatgtggctcacatttttcaaattaaagtccattggataaactcttaagtaggctcgaaaaataaatctaaaactaaatcctaaatccatgctaattgataaaattagactcggttctacctatttgttaatatatcaaattagacttgatttttacagaattgaggttttcaaggtgtcacactatcaaacggtgtttttcctgtagcaacgcacgggcactattgctagttagaaataatgtgtaagatagctagacgacgatataaacttacataaggtgatgtggtttatcataatttaaatagtatatagaatgatgatccaaatgtaaaagtaatatgatgtggctttatgagagaagataatgagggagataattgcgaccatagattaataatttgatggctagaaacaatttgaggtgatatggcttaatgagaaaagagagaaataacattaactaagtgaggatgaattgtctaggtatatagatattatacaaaatgatggggagatatattgaaatattttgagaattatgtggaatgatgatttaacatgctcggatttttaaagctctaaaattttagtgagggtgaactatataggcatataggatattataaaaagtgatggagaaatatattgaaatattatgtgaattatgtgtgatgataatttaattatcatgcttgtattttaaagctctaaaacttaataaattagcatgcttacatgaggtttgagatgtaataattgttagtggataatgtggcatctttgcatgttgagctttagaatttagaagaccttaactttatagaaagataggatattaagataatggaaaatgtatttcatctccagactccggttatatctaccctatagttcaacaaatactttcactcatcactcatcactcattctttcatctaccctaaagtttaacaaatactttcactcatcactcaccactcattctttcatgcctcactcaacggtctagattatccgattgagatctgacggccggaatagctcccgcgtaatctcgcccatgcgccccaaaatttcgcccttttttcatcccgatcgattctagatcgcgaaaaaatccggcccctatcagttcgctttttttctaatataagtcaaaacggtaataagccaaaacggtttattagggaataaaaataaatttgtaggtaaaacttatatatatatatatatatatatatatatatatatatatatatatgttctttgtaacttaaaagccaatgctgaaaaagaaactacgtagaaaatatcttaaaatcaatcttaaaattaagtttgaaaatttaaaatttggcttattgggccgccctcggcgccgccgctccctcgcagcctcgcccttcacctctccgctgacgccgcccgtgcctcaccacctctgtcgttccaccgcgccactacggctcctccctccccatcgtccccatcgccccctcgccgcgccacttccccatcggccgccccgatgcacgccgcgtccccccgcgccactacgacgcctccctccccggtgtccccatcccccccccctcgccgcaccacttccccatccgccgccccgatgcacgccgtcgcgtcgcccgcgcctcaccgcccccggcgtcccccgcaccagcggcagaatggcgcaggccacttcatgttccccaggtacttcgaatctgaggcctcctggttgtggaacaaggaatcactagcaccctcctccctctctgctctactcttcttcttgcaaatggctgcttctggattcctgtgtcctgcctgatgcttgcttgcttgtgctttgcaaaggattaacgcctagacgtcgtgcattggatctggcaggagtgcaattgaattcctcatgctactcatttcagatgattcagccacctgtagaaaatgttgagtgcatgataaaaaaaaactaaattttcctgttgtttacttgtaaattgggatttgcactacagcaatctacaaaatctacatttttcttatctgttggaatggggcggtgtggatttttggttaatttttccaacggcaggattttagctcgatgatacatcacggcagatgcacttggttctgttcaggaaagattaactatgcattctttatttactgattaatattagtatgctttacattctagcgtgtgaaactgttaatgttagtactgcatttcctttacttggttgtaggattcatgtggtctcacttgtgttgatgttttagcaattataattcagattgccctggatggcatagcatatgaatgatctgagatgtcttatacccctaatatttacatgcaggattatcattacttatttgcgtttgttgcaccgtcatttcatttatgtaggtattgcctcgtgatgaagcaacatttcggtttgtcaatgaagccaacaagaccaagagcggtagttctctgtgtcacaaggtagctgaccattattagatcgaacaatggttttatcaggacctagcatacatattcagacaggtggtctacggcgtggcagcggtgcggtcacaagttccaccacggtgagtgcctttctgcgttcatatctctctgtactgaattgatcttgactagcataattatatgctatcatgtttgtacacactgcaattatttctcatatttttacctccaatcgtatggcagcaggttcatggtagcacatgggtttggtaaatctattccaacgaaaaatggtagtgtttgatcattcccttcgttttgtatagctttggttaaccttctgggtgaggtgcactacaattccttgtatgccattgaagttgagtgcttctgcttttttgtgatatatgggagtgaagaaaaggtttcctacaattcctctacttggcctcagatcaaatgatttgaggggcagaaaacgaaacatgatggtattcagtatcaaagctaagtttttttattctttttgcagtcataaaatttgatggaatactaatgcctgttgcagggtaatttgccctcaatctgaggtattgccatgagtattatcattttctccctgcaaattgcaacaaggtaatttgctgctagaaactttgcgcatctatttttttaggaaaaagtacgaattaccccatcgaactatcgtggtcgtccgaattacccccttgaaccacaaaacaagacattcttcacccccaactatacaaaccggacgaattacccccctcgacctaatccgcggtggttttggtctacgcggcgtacgcgtggcagtccagtcagcattttatttattaaaaaaagtgggacccacatgttatagtctctcatctctctctcctctgtctctctcactctccgtctctctcacacatcctctctctcgcgcgcgggt

SEQ ID NO: 24774 - DNA, 13370 bp, Oryza sativa
acccgcgcggcgcgcgcccctgcccaccgcccgtcccgcgccatcccgcgccgccgcccgccgtgtgagagagatagagatagagagtgagagtgagagtgagagagagaggagagagaggagagactatgacaggtgggtcccacattttttaaataaataaaatgttaactggactgccacgtgtacgctacgtagaccaaaaccaccgcggattggatcgaggggggtaattcgtccggtttgcatagttaggggtgaagaatgtccggttttgtggttcaggggggtaatttggacgaccgcgatagttcggatgggtaattcgtactttttccatttttttaacaccataccagagtttcctgtagtatatattacaaattgatcaataatttctggttataacatttacaaggtgtttttttaaatggctacttcgttataacatggtgttctgttcatgtgaacttgtgaagtggctgagaaagtctttttagctaaaatgcagtgtgctatgttgtgaagagtgaaatgaagaaatggcaaaagggtgagacatgggcttatagttccagtgatatgaaatcgttcatccctgtcttgattcctagaagatgatatttttttccaagtagctttgatgaaatgtagcaatgagtcaatgaccaaatttgtaataatctttgtatggatctgaacaccatcgatatgattttttaatgaacctcttgtattataaatggttgtttgcggctttttgtggtttactgctattttgatggatgtctttgtctcctatgtcacttgtacttgtgaatttgtggttatccgtagcattagtatggacatgctattattacgttgacatatgtttcatatcaaactgttatttgggtttatattcacgccctcgtgctatgtgctcaaaggatagcggccaacgtgtgccttatctatcccgttaccactcgccgctcatcttcctgcacataaaatttctaatccactttttaagttcaaattatttactccaattatgaaaatttgtacttgaaaattttaaattttcatttcaatttttaaaactttcaaccttttgatttttgtttggcaaatatttaaattagaggcctgaaaatgcatcttttaaataaatattggcgatagtccattctattaaacccgcccagtatattattcttgccaagaatatgtctgacatatgacatatattgaattaagactcaattgcacagatcatacaagaaatagtttttgctaacattatattttaaaattctttaaagagaaataaacttgcaccgtagcgtttagcacgggcatattactagtggtacaataatggaaaaggctctctaccttcttgaggtcatgttaaatggatttaacccaaatatgttttaactttgcagtgactcaattgtgaaaagaaaaattggcacgtcacacagatttatgactgctaaattcttatgaataagtgtaggcgtgtagcaactttttctagattgactgctaaatcaatttaccatcttttattggattgtcaatttttctagattttttttagatcaattcaatttttgtttggattataccatccacacagtgtatctcatatgtttgggaattggttatgcgtgttaataaaaaaaattaaggaactattttttaggggcttccactatatattgggctctttggcttagtagaaatgatatgatttttttgataaaaacactctcaaaaacttatttgtaggtacttttcaagacaacatattggctccagggttgggctcaactacaaagacatgatgatgatataaagctaataaatgatgcatgtcgtaaacttgaatcgacgattatgcacctttttaccaacttcggagggagattctcaaatactataattcagtaattgtggattcttttatcttgtgttggtgtttattagtttgtgtttattttatgttatgtcagtgcgtgctatgtgtgtttatctgtggattttgtaataattgattatagcttattgagcaaaggtcggattgtttattctattattttaaaaaaaagtatagcaaattggctagaaaataagatgcatgtgatggacaaaccagctagtaaaacgtgctttgtctcagtcgtaggcttgtagccttacgtaacaaactctaatgattggattttggatcctcttacttgcatggtaaagtcaaatgagcacagtatctatgactctggggattttgtagctgtccaattgtgcaacgaatggacaaaatatgtgctatattatccgatagaaaatttgagccgctacaggatatgtatacttctctgcaccataactacagtgaatcactttagataattgtagcaacatactcgtgctaccattcctctgccttaatttgtacctgcaaggctagtactccctccgtcccacaatataagggattttaagtttttacatgtaacgtttaatcactcgttttattcaattttttttgcaaatataaaaaacaaaaagttgtgcttaaaatactgtggataataaagtaagtcacaaataaaataaataatattttttaaaaaaattaaataaaacgagtgatcaaacgttgtaagcaaaaactcaaaatcccttatattatgggatgtgatggagggagtacaagttacgggatccttttcttgagctatattgtttaaattatgaaattctagattttgactttaacgaccaaaaccaaactgacgatagccttccagaaggcgacatttagtgttggggttgtcaacgatgggagcaccgatatcagtgatgcttatgggcgtcacacatctttttggagacgatgttagctgatgccttcttccccaacttcgtatctcggggttgactctctaagtgaaaatctagttataaatgttcagaacaatgatggcaatatctacaatgtcgtgatcttcttggaaacatacattggagatagtgtgctggtgaggcattattggcatcggattggctttgatggctatgacgttgggtaaatgactgatttacttagttaccttcaatgttattttctgctttggtttaacgttagtcactcatggtgatgtatgccaaattcgattatagaaataattgacgttgggaaaaactaaggactacatataacttgtacactgttgggcaaaacaatggttatgcagatagaagtattctttaatctttaaagtgatattcattttttaatcaaactgtgaatttttttttcatttgtagtcatttgccctgtaatttttatgacaattgattgtagtttctttaaagaaaaaccgaaataaattatattgtgttaaaaatgaaagaaacagatggcagcgttaaactccaccggggcttgcaaaaacagacggatcttgtgcaggagcatgaatccggtgcaaatctaatggtgaaagttcaaatgattcacaagaaaaaaaaatgggttgagtattgcactttcaggaaaagaaagatggcacacagcgtctctcctcaagcaagaaatggacttatttagtgatttgcaattgcacacgagatgcagtgaaaagagatgtgtaattttaacatcgagcccgtgtttaatctctgtctggaggacgtctttccctccgaatctccctttttttatttacaattgcacaccctaaagttatcgatcggagcacacgcgtgacgacgtgagcagcctctgctttctctaccggttgtatacatacatgctcaacgagctatatgtatataattggatggttagtacttcatatatactaacgtggaggatctcatcctggccggcgtcgtggcttcttggccggtgaagggctctccgcctcatcgtcgtcgtcggcctcctcgccgcaccgtcgttgctcgccggcgatctccttgatgggcgccacgtttaggtcgaaagcggcgcccacgctcgccgccgtcgctgcactggagaccgtcgccgacaccgatgggccatgcaagtagtggaacctcttgtgcccgcccagcgcctgcccggtggcgaatcctcgccggcacagcgagcagacgtgccgccgccgccgcccgtccgcctccgaggcggcgtcggcgtcggcggcgacgcggcctgatgatgccggagcagcagcaacgacgacgtctctgtgcgcgggcggcgccgccgccgccgccgatggcttgcggtggctcgccttgtgtccgccgagcgcctggtacgacgcgaacgccttgccgcagagcgagcaccggaagtggagctccggcggcggcggcgccagcgccagcgccagcgcggtgctctccccgcgcgccgcggcggcgagcgccatgaggcacagggagatgaggtcgccgccgtcggcggcgccgccgccttgctccatcacgtcacgctatccaacacacacagctcgtgtcgtgaaaattgaaggcgatacgtttgcatgcgattgcgtctgtccgtggtgtgtgctcttatttatgcgtgtaaaaaaacacgaattggaaaactctatttatactctcgttttgcatgtaaattaaaacgttatcaacttttttaaaaaaaatagtatgatagatcaatatgttatactccctccgtcccataatagaagagattttgactttttttttcactatttaaccattcgtcttattaaaaaaaatttagaattattatttattttatttgtgacttactttattatccaaagtattttaatcacaacttttcttgtttatatttgcacaaatttttttaataagacgagtaatcaaacagtgcaagcaaaagtcaaaatcataagatggagggagtatgtcacttcatgcctattcaaattcaacttatacatgtaaaaattctttttatagtcaaatttattatttttttcgaattatataagtcaaagttcaatttgtatgtttgtgaaaagatatatcatatattaatctatcttgatattttttttaaaaaattataactttttaaacgctacgtacaaaacgaggacaaaaatctacttgcgaatcatagtcgtcgcaaatggcacgaagaaatcgcgcgcgtcaaatcaaagcagcgcacaatggctgacgacgcgaacaaactcccgaggtaagaagcttggaatttgatctgaaccataaaaaaaaaaagatacatggcgatcgatatgtcgtaatttccagttttccaccaacccacacgtgcacttttctgtatataattctcgacgtcattttcatctcattatgagtttacaaattacaaccggtccaagttcgatctcaacttgcgaattttacatatgcaacttgtggatttatgcataccctgaatagtgaatactctgaaaccggtgccttttctacggaagagggatgggccactgtctcctgaagcaatgcatatgattctcgacgtcattttcatctcatgatgagtttacacccggtccaaattcgatctcaacttgcgaattttatatgtgcaacttgcggatttatgcataccctgaatactctgaaaccggtgtcttttctacggaagaaggatggaccactgtctcctgaagcaacaaacacagctgcgtgctctttgactagttcaaaatttgtccaaaggaaaactcgattctgaaaccagcagggataaagttctagaacgatcattttatcagtccccttgtgcggcatgacctgcttttgttttaccttcaccaggtagaataaacatgcatatgacgagtgcaatgaagagcacacggagcgccaatcttgaaagatgaaaatcatagcctcataggcgagtaattgtatatgtactactctataagctctttaaaaaatattttgtaacgaataaattcatttcatcattattaaaaaatataggaatgagtgtattttgcacacatctacacactatcgcaaaggtcaaaataacaccatcaacaccgagaaattggacattctaccacttctaagattgggttttgccacaatgccattccgcggaatggcgtcgttaaaatgccactttcaacctatgccaaaccgttgctttgccatattcgccatttcacaagatttttaccattttttgcacttcaactgaccaaaatgcccctctctcctacagtttctttctcttctccggtgaacatgtgggatggggaggagaccacgacggcagggtggcgctaacctcaggctcggtgccaccaccgccggagctctcctcctcgtcgtcctcctcttgctctgcaaattcaagaacacaatctttgagctcaaaccacacacaatctccacaatccggagagctagcgagggcgagggcgagcgcgagggctgcggctcacctcccgccgccttggtcgctggcgagggtttcggctcacctcctgccgccttggtcgccggctcgtcggtctccatccccgccgcagttaccgtgccgaccgagcccgagacgacgatgcaggtcccgtcctaccacgagctcctcctggagctagccttcttgggccatggtggcgtgcagcctccggcgcgcggcggagacgctggcggaggagatggtgacgagcggcgcacggtggtcagcgggaggaagcagcgcgttggccggcgggcgcgacgacggaggagattgtggcgcgtgacgcggtggccggcttagggtttccttctctttctccgatgtgcgggcggcgggcttcggccatgggggcgggacgtcgccggcggtgagcttgggcagtgcgggcgtcggcagcacgaacgactcacttgtgacagccggaggggtattttagtcagctcgggtggaaaattaggtggaaatagagagaattggcccaaatggcaaaacaaatgtttggcatctcttgtgagtggcattttaacgacgccattccgcggaatggcattgtggcgaaacccactattggcagtggcctaatgtccaatttctcatcaacaccagtacaccacaccatgacacaaaactgtctcaaattccaaaaagattaatgcatagaatttggagagaaaccggatttggtgataatgggacctcctggatgacatcttcaaggagaaacgcaacacacggagcgatgctgatgtctgtccagatctcaaggggatactatacaaggttttcacccgatggtctcatcaaagagggaaagagacacttccaagagggaaaacgacgcccaaaggcatcgccattgtctgccacaagactgggctagacttttgccttccacccaccccggttgttctacagctactgctccaaagccccgataccaagtagcgactatcaacgtgtagacaccgctgtaccaacgtccccctcccccgttagccagcccctacatgccttcatgtgccaatgctgcaactataactgtatcacgctatcatcgttgcaagcctccaccttagggcgtcatcattgccggtcaccatccccgagcatctagacctcagggggcctggaacttccgacattctttgacagcacaccagaaaaacggtcataactctttgctccggagtccgttttcaacaaagttgggctctgcggaaggcttattgagagggttattgtcgacgggggatacccgtaggccggatatagagggtactggggtacgctggtacgaagatttacgtaatacaacatcaagcagacagaaaacaaagattatactggttcaggccccttgataggtaatagccctaatccagttgatatgggattatatgatggaaaccacagattacagagggaaaaacagaactcgatgataccgacgagatcgtaatcaaacaggttcgattagatctctcgtcgacttggctcctgtaggcttcaactccgtaggctgtggtggatgtgctgactatgagatttgatgccttaggtcctcccggggggtcccttttatatcgcaggtcaactggtctccaagtaggactcggagacatcagacccggcatgatacaatgacgacccagttttgtccgagtaggactccttccatctgtgaactccatgatgaatttccttaacgtataccgaaaacgtccgtatacacgcaagtatatcatatcgatatgtgacgtatatcgtagggtagagggtataccttacccgtaaccctgacagtagcccccgacttctgcataactgaactcgtgtaaccgatcgtgacttctgatgttgaggttgttgtcgttctcggtgtgaggaccgagagacaaggagtaattgacaacgccaagtgaaactcaacagtcatgagtgaatttaaattaaagtccgaaaaactgccgcgcgtaacggacccagaaatttccggcggccatctctctcctttccttggaatccgcaccatcggaagtgcgactatttaagggagttttggggatccattttgaagtccgcctgttgtgaaaaaactctccagcctccaagcgtacctcgtcttctccgctcccgcaaaaaccctagctagctcatctcggtcctttctccggcgatccccggcggcaatagacctcgacaagtctacctccaccagcgcgtcgctgaagaaactacaggaggatggcacccttcccggtcgcgggaccatggagagagaagcaggaggtattgaaccccagcctgtcctgggtcgcatggttgcgatcgaggactatattctctgtggttttcttctcttggtcttgaacttctacggcctttctttgctccatttgaaccccaattccatcgccttcctcagtattttttcgcatctttgtgaggcctacattggggtagagccgtttcttgacctctttcgtttctactacgagttgcgttggatggaatccaacaaggtatctggatgcgtcggtttccgactccgggatggcctgaagtcgcgctatatccttttccagtgcccttcttctcgtagcaaatggcgggcgaggtggttctatcttcagatagaaaattcggattcagtcttcgttgttcctgaggaacaaccagacaagatttcgtctcggaccgcaaaacccgccttaaccccttctcttcagtccttcatcaatgccatcgatgacctccgagtacgaggtttgtcagggtatgaagtcgctgtcgacttcattggtaggcggatcaagccgctccaggctcgagcccacccagcctttgactattctgggccggaggacgcaacccgggtttctcctcggggtatttttcttgtatttaaattgacttccttatgtgcgtgttcctcctgacttatcgaattctggttctcgatctacatgtttgaacagcgaaaccgtggagcgccgcgtcggccaattgatgatcagcggcccgacaacggcgagcaaagtccccgtccccctttgcgagaagggggcagccgaacacgaagctgccatcaatgtaagtgtactcggcggccctttcgcatttttcttcggggatcgcattgtgacttcatgaagtgtaggctctccctctgactgatatcatcgggccgctcgtggatcatcaagcagcggcgtcgctgaaggaggacgtcaccaaggaggcgcccgatgttgctgtcgccgctgccacaacgagtggcggcaacgttccgaaaagggggaggaaattctcctccgtgatcagaaattgtcggaagacacccaccccctcggtaagctctcttggtccttcatcgcgtagtcggaaaacttccacctcacatcatgcccgttatactccagggctcggatgcgtctcccccgcctccacgacggcagcggcttgtgacgcttggcgagaagtaagtggatgaatttgaggttttgtcgcttcgtcaaactcttgtagcctttcacagggtagcacgggcgaaggcggcgcaagacggatctggagggacttccagcgcgtctcctgccgtggcctcgacggatgttgtggtcgtgcccaggagccgcgaggcaatgcctagcggcccagccagcgatctcgtggctggtcggggtctgccggctgtcgtcctcacctgggaggagctctaggtcgagatggggcgcctccttgaggctggtgctcgcagcattagccgcgagatcgcggaggcgagggcggcgtcagcgtcgtcgacgaatgagtgcgccgaccggctgacacgcgatttggcagaggttcgcgaggacctccagaagatgagggagctggtggccggcaatgagcgacaacgacaagggctcgagcatcgtatgtcggagcttgagaacaacttgtcggaaaactgtggctcgctgcgggtcacctacactggtctgcaccagctcgccggggagtgtggcgttaagactaccatcccggcgaatcccaacgagttctcgctgacgtcttcgcttgcagaactggcgacagcgatggaggcgatcccctccaagcacgcggccaggatcggagaggagacgtccaacgggacttataccggggcgtgccatgtcctcgcgtgtgtgaggctggcgcaccctgaactcgatctccagaagatcttggatcaaggggcggctagcgacgcgcgcaaggatgtgatggaagaagtgggcgatctgggggagtccgtccccccgctttttgaagaatagaatttcggctcccttgtactccttagtcatgctttgtaaaactctaattggttccaaccgcctttgtgcgtgcagtcatcaccttagttttctttagcattttgatctcgagtactttgttgtcattgtagagacgttgatgtcgagaatgtccagcagagcgggcagctgagttgccagtgttatttttgttggcgacgacttccttaggtgggttatttttgttttcatctcatttactctttcgtctggatcgacttgctttgctgtgttctcgggagaaaagagcagtttgccttagtcgtttccatgctaagcagacctcgagagtgcgcttgctgaccaagatcgccgcatccagtattggaggacgaaatttgaggtcgcggaactcgagaggactatgctggaggtgaagaaggaccaggccgtgcaaacactccgaggtcgcaaggtgtggttcagctcatatctgaagagttgctgcacgtccatgactagggtctgtagagagctccgagtaccccgtggagatcccgaggaatcagcggccggatacatctcgtggctgaatggggcctacgcccagctcaaaggcatcggccagcgtatcgatgaggccctgaagcaggagtgccgtcgatcgagccgatatgccggggggcatgtactggcttgcatacgagatcttcgtccgcagctgcacctcgagttcctccacgaagggttttctcgttctcggagaactcctacggagatagatggcctggcgaagtcgatggcgccgctggcggagaaggtcttccaatccatgaactggcgttggccttcctggtagtctccgtgtcctgtgacaaatgtcttagggaaaagtgtaatataattttggatttttatggaattgtaagaagtacttgtgaaatagaaaagaaatatatctaactaagctttcttactctagacgtagtgtgtaagagtgtcttctcacttcgcgacttcgatcagttgtttgagctatacactctccctagcccccagccttgccatcggaaaattcttctcgaaagataaagctcttggacctttgacctgcctcggttgaacaagcactgatcctagcccccagccgtgaagttggaaaattaatttccgattacatggcttggttaatacacacggcgagaactcttacacgaccagatcttacatggtctttcgtctctacaggatccgacaaggccttatcggctctgggcgtccccagccgaagttcccttaggttcctcggaggccttgtcaagacggcgtaaagggatatgaggataggtttcaacgctaggtgtcatctgggtaagggatcatcgggaaggaacactttgattgtaatttgtacctgaaaataggctttattgaagctgtaagatatcttacaagtatggatactattgtcttatacatagaatttacataattgatcaatgttccaggaatttgccaactcgcgaccatcgccgtctgcaatcttgaatgcgcctggcctcaagacttgtgtgatcgtgtacggtccttcccatttgggtgagagcttgtttcgccctgcttggctttgaacctgtcggaggacatagtcgccgatcgacaacgtgcgtgctcggatgcgcttcttgtggtaacagcgaagggcctgttggtagcttggctgctcgaacggcaactcgttcgtgatgttcctcgagtagattcacatcgtcgtttcgctgctcctcctgatcctcatcggagtacttctgtactcgtgtactttgatgtcgtagctcggtggggagcatggcctctgagccgtacacgaggaagaatggtgtctccttgttagacgttgtcggtgtggtacgcacggcccatagtactgatgggagttcttcgacccacttcttgtcgtgtgacatgagcctgtcgtagacgcgggtcttgattccttgtagtactatgctgtttgccctctcgacctgtccattgctctgagggtgagaaaccgaggcgaagcagatcttgactcccagcctaatgcagtgatcctggaaatcggcactgataaactgggagccgttgtccgttatgatacggtgaggcaatccgaatctgcaaaatatgcctttgatgaatttgattgcgtcgtcggccttgatttcccccgtgggtgtcgcttcaatccacttagtgaatttgtcgatcgccacgaataggaacctgtagccgccctatcctcgtgggaatggcccgagtatatctagcccccagcacgagaacggccaagtaagagggatagtttggagtgcttgcactggtagctttgtgtgtttacctgtggaattgacaggcttcacaccgctgaaccatgtcgcatgcatctttgagggcggttggccagaaaaacccttgtcgaaaagcttttccgactaatgtccgaccggcggcatgtgacccacagatctcttcatgtatgtcgaggaggagatgtctgccgtcgtcggacgagacgcattttaggagtaccccgtttagcgccttcttgtatagat

SEQ ID NO: 24775 - DNA, 21644 bp, Oryza sativa
actagttccgaatcccctttcacgaccagtcgcctaactccgagtgcagctgcagctcttatcccggcgagtattccttcgtactcggctgtgttattggtcgccctgaagttgaggtgaattgcatgcttgaattgatctcccgaagatgatgtcaagatgaatcctgtccctgctccttggctgttgagtgcgccgtcgaacgccattgtccacgtttcgttgtcgatttggttgtctgacctgttattaggcatggtccaatcggctacgaagtcggcgagtacctgggacttgatggatgttcgtggcacaaagtggacatcaaattggcttagctcgactacccattttgcaatgcggccgacaacgtctttgtttctcacgacttcaccgagagggaaggaggatacaactgtgaccctatgggcttggaagtagtggcgtagctttcttgatgtcatgattaccgcgtagagcagtttttgaatctgtggatatcttgtctttgcgtcgtggagagcttcgctgacgtagtagactggttgttgcaccttctctctctcaacaacaatgataatgctaacggaatatggcgtggcggcgatatagagaaataattcttcattaggttggggggcaacaagtacagggggatttgataggtagcgcttgagtgcaatgaatgcctcttcggcttcctgtgtccatacaaatttgtcttgcttcttcagcggagcgaagaaaggttgtcctcgctctcccatcctagcgacgaacctgcttagtgccgccatgcattcggttagcttttgtacttccttgagtcttgtaggtgacttcatgttctcgattgccttgatcttctcgggatttgcttctattcctctgccagagatgaggaaaccgagcagcttgcccgatggtactccgaacgtgcacttctctggattgagcatgaggcgatatcgtcagaggttgtcgaacgtttctcgcagatcgtcaatcaatgagtcgcttgtcttggtcttgacaacaatttcatcgacgtaggcctcgacattgtttccaagttggtcgctaagtgcgccctgaaccgtgcgctggaaagtgtttcctgcggttattagtccaaacggcatcttcacgtagcagaataccctaaacggtatgatgaatgctgtcttctcctcgtcctctttcaccatgctgatttggtggtagccagagtaagcgtcgaggaagctcaacaactcacaaccggttgttgagtccaccagttggtctattcgaggaagaggaaagtgatccttgggacacgccttgttgaggtcggtgaaatcgacacacattctccatttcccgttggccttccgcaccatgactgggttggctagccactctggatggaatacctctttgatgaaaccagctttgagaagcttgtcgagctcttctcgtatggcttgttttcgatctggtgcaaatctccgcagtttttgctttactggtttggcgtcgggtcgcaccatgagtttgtgctcaatcacctccctgggtacccccggcatgtcggacggctgccaagcgaacacgtcagcattgtcgcggaggaaggtgatgagcgcgagttcctatttctcgcctagtgatgccccaatcttgacagtcttgtcggggttggcactggagagtggaacgatgttgattgcatcgtccggtttcggcgtcttgtttgtcttgctcactttattgggtggctcagctgtggcaagtggactgggcgtgtgctcgaccatgtcgaggctccgcttgtcgcattgcactgctagcttagcattcccttgaatagtgattgttcctttcggtcccgacatcttgagcacttgatacgcgtagtgagatgcggtcatgaacttcgcgagtgcagttctcccaatgatggcattgtatgttgtattgaattcagcgacatcaaaggtgatctgcttcattcggaagttatttgcttggccgaaagttacaggcaacgtaattttacccaatggtttggacgatgactgaggagtgattccatggaagggttgatcggtgggtgtcaactcgcttcgtgggatccccatcgcgtccaaggtgctgccgaagaggaggttaattgagctgccgccgtcgatcagaactcgcgcgaccttgatattctgaatagtgggttcgaccacgatcggatatcgccctgggatgacagcagtcttggggtggtcctcttctgagaattctatcttctgttcagaccacttcatcttgggtgcagctccctgccacgtcgaacagacttcacgttccactttcttgtattctcgctttgaggagtatgtcgtggaacctccgaagatgtgcaagacatggagatcagagtctgggtatgctgagtccgattcctgagtagccgcctcagcgtccttctcgaccacacgtactcgcttgcctttttccaatgccatgtgttttgcgagcgactttttgaagacgaggcaatcttctagagagtgtttgtccgacttgtgtatagggcaccatgttttcttcatgtcgctgccttgtgggtctgggcgcttgggagggtctgcgtattcagttgtgagaacttccgcttgagctttccttttcccactcttgcgatttttcttcttgcttgactcaggtgcgtccttggctagtttcttctctcctccggtcttcagtttgtcgttcttgcgtctcagtgcgtcgtccgcgtgagcgcattgattgacaattttgaataatcttcgagtagtcgtgacacacctcgttgccaactcctaggtagtatagcgatctctgacaccggacttgaaggcgcggattacagaagcgtcggtgatttcggggattgtatttctgcactcactaaagcgccgaacataatccctcaaggattcacccgggttctgtgtcaacgcatgtaggtcgtcttcgatcgcgtgacgcttgtaagctccttggaagttggcgacgaactgctgccacaggtctgcccacgaagaaatcgagtagggcgggagatgcatcagccatgaacgtgcagagcctttcaatgcagttggcaaataattcgccaatgcgttgttgtctgctccagcagcgtagagtactgtggagtaaacctgaaggaattcttctgggtcggtactcccatcgtacttctctattgctcctggtcggaatctctcaggccatcggacatcacgcagcgaacgactgaaagctctacacccagcactgggggcagtgggttgtcggcgatcgtacgtccttcgtggatgtctatctgatgatgaggatgaggaagatgacgacgatgacgatgggtcacttggtttcggtgtacgattacgagggcgtcggccaggttctcgagaatcctgtcgtcgtctcctgttgctgtcccggcgccgatctccatcgtcgtcgtcattatggcggcatcctcgactagtatcgcccagcacccgtcgttcgcgatcatcgtgatcgtggcggttatcatggtctcggtcttcgctcgaacggcctcctcgttcttcgttatcgtgacgtcgtgaagagacgcgatgtcgggaatggttctcgttgtctcgtgcgcgtcgcgcctctcggtggccattcaggtgatcgcggagatcgccggtgccacgaggtgaaggggtggctcgatgaggcgattcccgctgttcagggttttcgccatcagcaccgccagttggtggccattccgggtgcgctgcagcagcggcctcttcgaacgcgttgctgaggttagtcactgattcccgtagccgttctgtccaccgtgcgagatcgtcattctgaacgggatcgtagggggtttccctcagtattgcgttgacggccctgatgtgctgggccggtgtagtcacttgattttccgcttccgcgttagcgcgcgctgacgtgccggtcccatcgatagccaatacctcgcgtggcgtacttgtcgagatgagccatagtcttcgagcaggtgcaggactgacggttcgtggggatcgatgtcgattacccccaacgaatcgatctgatatcagcgttgctccttgttccttgtcctcatccctgagggggatacgtgactgctggaccttaggaggtgacgtcttcatggcactgagaaagaccttgcagctcgagaggtcgtgattctttgtcttgtgaataggacaatagacatcacgagttggagaagtacgctgaattccacgctctttgcaggcatgaatttcagcgtggacgttgagaaaaacccagcaggcttgcaaggtgtgttttctggttttgtggataggacaccaggaccttgtcacctcggaagtcatcctcgccggctcgtgattcttgtcggaaagacaaggtttggccgcactaggatccttctcgggctcggatgtcgtcgacgttccgttctccgcttcggcgggaggatccttcgacatggagtcgtcttgggttctagccactgcgttcttgcttccggtcattgatggaccagacgagatcggcaccgtggtgtaaaccgggaagacgatttcgccgacttgagtccacaccagcattgttgaagcaggaactcctttgttgaggttggtgttgacgctgttgtcgacgaagctggatgacatagtagtagaaccttgagcaccaagtccccctacctggcgtgccactatcgacgggggatacccgtagaccggatatagagggtactggggtacgctggtacgaggatctacgtaatacgacatcaagcagacaaaaaacaaagattatactggttcaggccccttgataggtaatagccctaatccagttgatatgggattatatgatggaaaccacagattacagagagaaaagcagaactcgatgataccgatgagatcgtaatcgaacaggttcgattagatctcctggcgacttggctcctgtaggcttcaactccgtaggatgtggtggatgtgctgactatgagattcgatgccttaggtcctcccgaggggtcccttttatatcgcaggtcaactagtctccaagtaggactcggagacatcggacccggcacgatacaatgacgacccagttctgtccgagtaggactccttccatctgtgaactccatgatgaatttccttaacgtatgctgaaaacgtccttatacgcgcaagtataccatatcgatatgtgacgtatatcgaagggtagagggtataccttacccgtaaccctgacagttatccaacccaaccaagctctgaaccactcataggttagtttaaggctctggtttctctcaaggtaacacttgcatgggtcactttgagtaccgagagataaacaaacacatcaacaatgcatcactcttaatagtacggaattcgtatactcaaatgcaaataggaaatctataccactaggaatgttttcttgtcatcttcttgctttaccttgacagttgccaacaccaacgccatctcactactaggactattctcacctataactcattaagcacattaatccaaaattgactatatatttgtcttgatcaatgaccactttggcttttggcttgatgttcatcaacgaattacatcctattgatcttcggcattccatcttgcgctcttcaaataattgatgtggattactcatggcttcaaatggcctcgcacgatccatcgtgacaaagtctttgctcgcccttcaccaccagattgagtccatcggcgccaagcctcttgctttcccttcacctcctcatgatccattgtagccgagtcttgattgcccttcacgatcttgccatatatagccactcataccccgtgtccccgtatcgtcaatatctttacttgctcctcatcaagctgtaatgtccatcttctaccttcaatctttcagcttgatgtcggaactcaacctaatatcttccaacatgtgttgtcataaatcaccaaaataatcaccacactcttagggtaatagatcttccaatctcctcttacaaaggcaattctagggaatagatctttcaggctgcaccccctcctctatagccgcatcttgccgcctcgcctccatatggaccaagccgagtcacgacgcatccaagctctcgttgttatgttgtagtttgctctcctcaacctctgtggaatccactatcggggtgtcagatctagccacattgatatcggatatggcaacctactattgttgtcattgtcgccaccttgcgccacctccgccccagccatcgacccagtacacctcagctctcaaaaagcaccagatctagtcgtcgagttcaatagtgaagccaccacgccgcttgtcatcgtcactgccacctaatctccatggcggagctaggaggcaaacgggatatgttgccaccgtatcgttccgtgcgtggtttctggtggcatcgagacggaggagggagggtggtggtgatgacgactagggttgaagcccccccccccccttccccggtgcggttgtctacacggggggcgatgtgagaggccaagtcagtataaaataaagtctttgtaggatagaggttgtactgatatgtgttcttgcttgcgggtgtttggattatcacagagaaaactcaccatgtgcagtagaacttattggtaagtattgaagcggctccgatttaaagctaatggaggtatatgcggtaagcgggacacatgcaccgtatgtctatgtcatgaggactcacgtagaccaacaatttcaagcaccaactttggatgattggatccatatatatgactatatgagtcatgacatatttctaaaatgctttgtccaaaccagtcaaaccttgaaagtttttaccagaagaaattagcgacgtcgagactaagcacattcgccattgatgaaacgtttcgtccttgagttctcgttaattttttacccaatgtttaaccattcgtcttattcaaaaaatttatgtaattattatttattttattgtgacttgattcatcatcaaatgttctttaagcatgacataaatattttcatatttacacaaaatttttaaataaaacgaatgatcaaacgttggtcgaaaagtcaacggtgtcatacattaaaatacggagggagcactacttactagattgagttttgacgtcatatgtccatattgctcattcgggcttccgtcattctcagccgccaaccatctcccccaaaccagaataattgctacctctgatatgggttgacatgttcccagcccagtttcacaaacccaacatgaaatcgaaaaagtctaatttagttccctttgtaaatgtcagatctaattcatatctttcaaccacaaacctggttatatcgatttttccaactattaaaaccgtgcaaaatgactctctcaactattttgaacgtgacgtccacatagtatcccaatcatcggagaaataaaaaatagacatgagccccacatgtaagtggtgagtgaaagaaatatgaaaattatggggtccacattgccacatgttagcactcaacacccactcattcttttttcgctgtttcgcacggacaggtgcaagaactacagtaggcaagccggcgcaggtccgctcaacactgcttcccactgaggaagcggttttgtagttgagggataaaaaaataaaaatcatatccaacctatatttttgagggtgttaaattagactttattcggtatgcaattgtttgcttcaaatgggcctcactttgaaccttgtttgattttaatggcccatgattggcactgcttatgggctcagaatctgcccaatcaaaaattcataaggcttattcctgatgcattccctgagcaatacagcaaaaactagcaacaaaacaaactggatccttcgttggcagtaggaccgtaggacggtaggagtagtagaagtagttggcagttggtacagtacagccgcctgcaactgcaatgcaatgaactgagcttgtgaaacagtgaaactgcacactttttgcactgcatctcaccagtcaccagaccaggtaactgctattgcagcagctgcaacaagagcagtcaaaggacgacatgaatacagctaaagagccgagctctcgattatgaggtcacgggcgcaaaggagcttgagctgaaactgcagctgctggatgcccaattaatgaagtgatttgcaactcctaaccatcaactaatccgcaacgatcgtgatttgctaggattaatccctttcctgcaggtctcttcgcggcataattaggtgacgttaacgctgaccggcttccccctttttcctgggacagttgcagaggtgccgttcagacgacggtaaaaatatactaaaacgacagattttccctgatttcgtcaccgcgaatcgcgtcaccgtgatgtcgatgcgtttgattcggcgcagttatgcaacagatttgaggttttgtacgtaatcatggctcatttactcgagtaaattacgccgatacagggcgcaattggtaagctctggtcgtgaaatttttactgagttctgacgcaatgggcttggactgggacggtgaaacgtattcgttgttgtgccaggacaaagagatgcgagatgcgtcatgggttattctgaattgttgctgttgttgattcggaggaaacgaagatggaattgcgtgttgaggccagatggaagggtcagagcaagcaggacaacattttcatttttgggctgattggtttaggtatggaggaaaggacttgttctgttgttggattgcaggagcattttaatatgaccagtggacgaatcttctgaattttaaatggggatgggtgtaatcaggcaggatcatggtagttatggtagtgaagagtgaaatgccatctctacaataaatgttgtttctagcgaaatgtacgttctcttggaaaaatttctgaccaaaatatatgaccttgtttttcctctataaatcaaacaatttcacatgaaaattctatgcattttttcacataaattaagctctctatctctctgttatgagataggagtaatgttttttttaagaatctgtttgctcatataaactctactggcttgattctaaacttgggtgggtggtttccgttaccacatcctgttgataagcccgttaccgtgataactgacctttagggagaccttgtttcaactatcactctggttatggaattgtgtttttttaagaatcggtttgctatgtaagttaatgaatttcatgcaaactctactagcatgattctaaacttggataggcggttaccgttatcgcacctcattgataagcctggttaccgcggtaactgatgttaagggagaccttgatttagactctctcttattacgcaattatgctttttaagaatctatgtgcttatataagcttgtgaattccatgcaaactttactagcatgattctaaacttggtccatacgttacacggtttccgttaccgtatcccgttgataagtccggttaccgcgataaccgacaataatgaagacctttgacttggatttgagctaatgagacaagcattagtagcttccaatccagatgatatccttccatgtttgtaccaacattgaccaatgatggctaccaagtgtactaatgtactgacattttcttagggccccaacaacataaaattgaccggagtagaccacctcatcagtgtgggcccagcggcgcagccaccacaaaatcccctgcgtgtcttccgagttttaaaaccgaacagccaaaaagaagaccaaagggaaaaaaaatctgaccatttcttgatttcttcttctcccttctctctctccatcactccatggaccaagagaagcatcaagccatggccggcgctgccgacgccgccgccggcggtggctctgttgcgaaggacacgggcgacgattttgagttctgtgtactgtcgtccggtgggctcgtctctgccggcgccggcgccgcggcggccgacatgtgcgtggccgacgaggtgttctcccaggggaagctgctgcctctaaggctctcgtcggcggcggctggcgatgcggccgggcttggtgttctgccgcggtcggagtcggtggcgtccaccgtggggttcggctcgcggtccgacagccggagcgcgagctccagcggcagcagcagcggctgcgtcagccggagcgagtcgtccaagagcgcctcctccgaccactccgccgcgcatccgccgccgcagcagcagcagcagccgcggcggtctctgtcgagcagcctgttctacgcgcacccgagcccgtcgccgcagctgcgcacccggccgccgcgccgcagcaccgggtcggctcccccgccgccgccggccaccgcgtggggcatcttccgcctcggcgtcgtcggcgccccggacgtgtaccctccacgctccacagattccaagaacgccgccgccgcagcaaaagtcggcagcagcaggagcgcacggttcgagccggcgagcaccgccgccgacaagaagcatccggtggtgggtctcttcggcgacagcttcgggtgcaagtgctcccccgacgtggtggagccagtcaccttgccggcggcggcgaagagggccaaggccaagaacaagaacaaggccggcgacaagaaagctcagagtgttcgtcgcagcaggatcctggactggttcgaggaactaaccatcaccaagaagtagtaaatctttcgcgtaaaagatcgtgtaatttttttttctccgagttactctgtgatcaaggtaacatcatcattttagttcttaaatttcgatcattagaatttcattcctctgattaaccggccgcagtccttaagacataagttttctttcaacttgttttgtacagattacccttaatccgtatattaattaccttcggaattgtcgcgatgacacctgcagaggtcgcagtatatattcttgtttcagatgtcgtttacttttcttttttgtttctagaaccttacacattatctcatcagtcatcaccgttcgcgtgttgacgcttgtcgaattgtctatacggcgcgagataccactggtgtcacgtcgaagcgaaataaccgcgtcgggttcgggttcgggttcttgtcctcctcaaataaccaatttacgaacccactacttatatcaagtaataactcataataattttttatgttatggttagatttatcgtatctatagatacatgtgagacgattcataaacctatttacagattaaattgataggtaacttatgaatcaatctgctaattacctatttattttacatgtaagcgagttctcataggttgatccgcttgcattcctatcgcgagtggagacggggacagccacgcgtgcacagcgtaacgtacaattacgtggtgttgccgcctaccaccgagcacacggcagcagcgagcagccgaaccgaacgcgtggttccaccgcgcgtcgccggaatttgcgtgccgacggcgaccgcccgcgggtcggtgcggtgcagcagaatccgctctcccgacggcgacgtacacacggcgtccatccctttcccaaaatctcacctggaacgcgaaaaaacaaaacgagaaaaaggccactgtagctggctggctggagctcatgtgcaacgcatgcattgtctcgccggttggttcgtgctgcactgcgtattcactcttcagatacttgtggttttttttgttcctttttcctgcgtagatcgagattaggtgaggtgagcgtgagcgattcttggagcggttcgtgagcttttctttcgacgattaggattagctcatccaacctcacctaatctcatatccttttgcacggcattttgggtcgctactttctgaaaaaaaaaggttgttgttgccacatactacagcttggtggtcgatctcatggcttgcttgccggatccaaactttagtggaaagagagatgcccaaatgtgcacgtcgtttctcacctgatgccttttcgtttgccactttgccgggccagtgaaaaggcatactccctccgtcccaatatattaagacctaggatcggatgagatattttctaatactacaaatctggacaggcttcctaatatattaaaacctaggatcggatgagacatttcctagtactacggactgtctagattcgtagtactaggaaatgtcccatccgattctatgttttaatatattggaacggagggagtacattatgggatagagcaatcgagtgaaatgcacggtaatcaaatcagtagagcgtgaggtgagtgaggtcagtgtacatagaggttaaagagaaaaaattaaagtaagaaagctacgcctacactagattactagttgctgtaaaagaatttttgtgtaggagaaagtttggaaagcattggcgtgcatgtctctgggaatgggagacgtatgatgtgcactgcaccccgctgcttaaacaaagaagttaatcatggctgctacgcgagaaaggctgcaccggtgttttgtttgcacaattcccgaggccactaaaagtgttactactccactactacacaaaactaatcaatccaatctatactagcctaatccaattgtgcaggattacgtacaagtaggaccggccgacaggcattgcttccagggttacattgcatgcctctcaactgcacacaaggttatgtactgtcacgaaatgtttggatctcgtcgtccccatagccaacctggtagtactttcagtatcagtacatgacacagcaacagaaaatgaaaaaaaagggtcaaaaactgttgctggcagctgcgtcctgaaaacaacattcactaacagaggatctgagggttgccttgacggtgaaatggtagacactctagacttaaaatctcgtgctaattaaagagcgtggatgttttactgcaaacagaactgaatgtttgctgtacgattcaccagtagtcaccacgcttcatcgctgtggctgtgcagtgtaggacgtgcccgtcttttcgctggcataatcgatagcctgtgttagcctgtggtgtgacaagccagtgtggaggtaaaaaagtaccgggttgtttgggctttggacaccaacacgtgctctatgagcatcgtgctgttacttgcgtaggggccgtcggctgttacaccgaagagcaacggccaatctgtggcaggttgagttgacttaagcgagtgatttctaatccagctttctgtagcatggagtatttctgcagcaacctagcagggtcggtccatttccaacaccatgttgaagctatgtcatggcacaatcatcgatcttaataaaacgttactccctcagtctatagcctcattgtttattagtaaaaaaataatttataagtacatattttctatgcgtgttcttagtgactaaaaacaaatattgtaaaataaacttctttaaaaaattaaaattaagttctaaattttaaattttgacttataagtataaacataaacaaaacaatgaggcttctaatgtggaatggtaggttgctatattttgaaatggagggaatataacctaaataaatattattatatcatgtttttgctataaactttgtgcttttaaatcatcaaaaaacattcaaattcattgcgtggttttcatggtttgccgggtgacaaggcaacttgggctgcatccctactccttagcttaaatagccattgaaaatgcatttcaaagcttcaaaaacaaaaagataacaaagataaaattgtgccctacggttggaaaaaattctggctccaccatggctggaggtggatccacccatgctatggcaaaatacgcttcccacattcaaaacggatgcaagtgagacagggttgcgatttgcatatacaccgtacaagtttttccttgttttagtacggagtagaaaataaactagcatgcagggtttttgatgtgggataatgtgctgctcgcttgcatccctagctactcaaaacaattgattaggccataaatcagtacacggactgatcaaatattatagattatgaagttagatagcttagaaagaagttatctgtagcgcccgttccgtcgtggcgcctagcgggaaaattatctcttaaaaaccctaattgcgaaatttatttctttgcttgttgtctagtgtccatgccatctcaagatctcaaatccccgatctatcgtcgagttcaattccgaatccaaaaccttccaaatcaaatccctccgcaaaagtctattttgcctcccccggggtcgatgggctgaattttctctcggcccatctccccctccctcccccggcgctctccctctctctctctccccctccgctccgcccgcgcgccgcgcgcgcgtgcgcgcgagcaccgcgccgagcgcccctcctcccctcctcgctctccttctccccatccctggcgagctccccgcccgcgaagccggcccccgcgcgccgtagttcgcgcgcgcgcccgcggggttgccgcccgtgccgcgccgtatgcgccgtccgcgtcacccggtcccgctgccctgccgcctgcagccgcgcagccgctcggccccgcagccagcgcgcgtgcccgagccgcgccactcaaaccgccgcgcctcccgttgcatcccgcgcgcgcgtgccgtggtggccgaccgcctggtcgccgccgtcgtcagcgcctgcccacgcctgtcgcccgtgtcgccgctccgctccaaaccgccccaccgtcatcgccgtcgtcatcgcctcggccccgccactccgagcgcaagccgccaagggacggaggcagagcccctcctccctctgccgcgacgcccccgctcccctcctccttttccccaaagcggcaaggaggcgagccccctttctctccctctttttccctttcctcttccccgccggcgtcatccgcctctgtcgccgttttggccgcaagcgccgagcgccagctcgcgccttgaccgcccaaagtcggtttccaaaccgacattgccgccccctttaaacccaggcgccctcccttcctcttttcccctcccaatcttccctgtttttcgcctccacgccattgccgccgccccccgtgctctgttcgccgtcgccgttcgtcgttgcgcgtgtcggacgagccggcacgagcaaggacgcggaaggggactccgggcgcgccctctccttcctcttccccggcccgaggccggagagattactcccgcgccgtcggcctctcgtcacagcgccccacctcatctcggtagtgcctccctccgttcttcctcctcgttccatctcctccccttagactcgggtagtagcacaagtagcctccccgtagctagccggcgccgccccgactgctgccgtcgctcgccgtgtgctcgccgccgtcgccgcccgagctcggaagcgcctctcgtcgccggcctccctcgatgcgttttcgcccaatccaacgctagcatcgaattcccgtagccgcgtagatgctctcgccgccgggaatcggcccctcgtgacctcgtcgccgtttcccccttctcccgccgccggttgccgccgccgcaattcgccgccgtcaagctccctccggcgaatccgagccgttggctcgtctcccctcgtctcgtgcaaccacccggtgtgctcgccttcgcctgtatcgccgtggttcgctccgccgctcgccgctgtcgtccgccgtccattccggccggcgtcgtcgtctacctcccgccggcccgcgtggcagccacgtaggcgccacgtcggcgccagctcggccaagaccgggtcgagccgaccccggtcagtccctccccgtgcgcgtgttccaccgcgagccgtgaggctgcgcgtgggcccgccgcatccgcgtccaccgcgaaccgcgcgcgtacaccgcgtccctcccccgcccgtgcgcgtgcgccgcgtgctcgctccgcacggtgaaccgtgtcaccgacaagcgggtcccacccgggaccgcgcgaggtgagcccggtccaccggccctctctctcctcccctcccgcgcgcgcacgcttgggccgccttgggccggccggcccatttagctcggccggaacgctccgtttctctcgggccgcgccctagccgcccgaggaaaagtctatttcccctccctcttttctttcttttcttttatttttcaaaaaggatttaattcaatccttttcctttagaccaaaaatccaataatcttagaaattcaatatcttcccaaccgcaaatccgtttgactccgttcaacttccaaaattcctcaaatctcgagatctatctaatggcacgcttagaggtcattaatagggctttattttcgccgtttgttgagttgtcccgtttcgcgtgtagtttcggagcccgaagacccgcagtgcgaggatttcgaggatcaagctcaagatctcgagcaaggcaagccacctttgaacatcttgagcctatatttgaacttaattatgttgcttgaaaaatattatgcattgataggactgcacttactctgcttgtcccgtctgcaaggctcgcgtgacctcgtcgccgtttcccccttctcccgccgccggttgccgccgccgcaattcgccgccgtcaagctccctccggcgaatccgagccgttggctcgtctcccctcgtctcgtgcaaccacccggtgtgctcgccttcgcctgtatcgccgtggttcgctccgccgctcgccgctgtcgtccgccgtccgttccggccggcgtcgtcgtctacctcccgccggcccgcgtggcagctacgtaggcgccacgtcggcgccagctcggccaagaccgggtcgagccgaccccggtcagtccctccccgtgcgcgtgttccaccgcgagccgtgaggctgcgcgtggtcccgccgcatccgcgtccaccgcgaaccgcgcgcgtacaccgcgtccctcccccgcccgtgcgcgtgcgccgcgtgctcgctccgcacggtgaaccgtgtcaccgacaagcgggtcccacccgggaccgcgcgaggtgagcccggtccaccggccctctctctcacttactctgcttgtcccgtctgcaaggcagattggcggacctacctaatttgttgcatttgatccttcctttgttaattgtgataccatgtccccttgtaaccatctagttgcgtctcgatattcgtgcaccctgcgcgagtatcgacggacgccttcaaacttaaaattttgagtaacaacttgggtaaaacttgggttttacaaaagacttggaaaacccgacacctgggtcggtgcttgcgaactaaatgaatttccaaaaccgcggaccggggaacgtaccgggtgtacgatttcccgctcttgcacctaaggaccgtttccttggaatttcatccgaacataagacaagtacgaccacatgggtggaatgggacacccctggctgagtaactagcttatcaggggagccttgatgccgagagacatgtggattcgccggggtggtgtcggggaggacccctgggcttcctggcacagtatggtctgggacctaacctgttgttggtctgggacccctctcgttggcatatggtaaacctgtgtcggctttcaaaatgccttgtcatgaaagcttggaggtctcctgacgtggctgatccccacgggctgggtgatccgagttagtaatgtcgtgtgggtaaagtgtaccccctctacagaggttaacaaactgttcgaacagccgtgcccacggtcatgggtggatgtgaggtgattcctagcgtagttttgtttgactactgcttgtgaaattgctgttgtggaaaggggttcgatgtttgaaaaatccgtagctgatggaatcagctaggcccgggtggccgtttgaaagttgttggcccgggtggccgtttgaaaagctgttggccgggtgccaaccttgtttcaattctaaagactgatacattgcacatactccgaccggacgagacgcactgtctcatccgtgtcgtttgagaagcactcacttagtcgtttttagaaaagagttcaaataaaatcaattgcaaaaacaacagcctccccttgaagcctgcattaaacacttatttcccatggcttgctgagtactcccgtactcacccttgctctatataaataatcccccccccagttgctgaagaagatgaagcggatcctgctgatgaggaattcttccaggagcaagccggctacgatgagttttagggtttcggcctagttcccaagtcgcgcctgtgatgtttggtcctagtcctggcttccactttccttttgtaatgcagttgtgagctcggggtctgtccgcagcccaacatgactgtacctctactctataataaagagacctctgttgctgtgataatctgtcttcctgtgataccagcactgtttcctgggactggtatcgattaacatgttaatttggagcgtcacgggctagttccggtcggtactagttcggggcgtgacattatcgaagcaacaaccaatatgttttttaaagtaaatttcaagaaaatacagataatttcaccaaattatcataaaactatacatttaaggtgatgtatcacaaagctatagatttaaaactaagtatcataaatctacatatttaaacaataaaattaccccgaaactatccttttggccttttggggtttaatctttaccaataatattaatattatgtttgagttatatacgtttaagatttgtgattaaattaatgttaaatctatagttttgtaataactttgttactaaatatgtagttttgcaatactctatccaaaatttataattttgtaacaaatttgatattaaatctgtagttttgggatatatctataattgtgtgaaattcattcttttttgagaaattatatttttaaaagcgtggcacgaataatccacttctcttttgtttaaaaaacaaaagccttgtgaagtgagtataacttaaccgataaggtttcttatgttgtaacaagctcactcgagttcaagtttcaagtttgacatggacgctctgtattatggctaattattttttcagtggcacggaacatattcgtcgatagtgaggtgtcctcggtgattttgtcaattttatggtagcctacactatcgaagtttgatacttttaaaatcttccacccatgaaaaattaggaacggtaacaaaccaaaatttggtcgaatggattagtgggcggggtggctaggtggctcaccaacgcaggcccgtctatactgcgtaggccacgggtgacaggttgaggtttgttctggctgtggacgtactagcgacagagctagggttggtgcaataagggcagtagcaacgcaagctgcacgtacgaggaacctaaaaaagccacataggctttagacatgggtccaaaattagtttccacacagtgcaaatggcctcatgagtgaatttaatttttcgctttaggccctaccacttttgatttcaaccctcatatttttctcaatttacaaagaagtgtaaattttacactaacccccctaaaattgagaaaagaatataaatcaccactatcaccgggtccacccccacaaccctctccccttctcacgcacaccatctcgacaagttcattggcaacaaactccgccgccaacgcgctctccccagttaccctacctgggcaacgaactttgcaccggcgacctctccaccctagcgatgagctctgccaccgctagcacctctctcatccccggtgacaagaacaatatcgcgacggccactacctccggtgtctcccaacttccccacctcagcaacgaactatgtccgcggcggcctctccccatcatgcccctccactttcggacgccgctcgagaccacaaggaaaccgtatccagcaccgccgcctgatgtcatggcctgatctggcctcaagctcaatagccatggtcggatttggcctctcttatcccttgccaacaagtgccgatcgagcatagtgcatcgttgtcggccatcgccttcgtcgacaacctcactcctgtcacctctctactgctgccgccatgcctccatcgttgttggcttgttgctgccaagctcgggtggagagagagagagaagggcttttgagctcgagtgggaccgctactaagctcaggtgaagagagagaagggtttttgaacttgtaactcacaagtaagaccgatcttccaagtgaagacatggtccccacccaactctctcttccacggcaagaggcgtcctatgtggcgggctagagccacacaccacgtagacgcactgtgaacggcctaacataacagggatatagctcattccctcctcggccttgccaacccgtgatcacccaacgacacgacaactatgggcttttttcgtttattgccaaaaaaacccttaccatttgtaggtaaagccaaaatttggcaagatcaagatatgcagatggcccggactaggttgacccgaggcttgacccactgcagctcagatttttacctaacattgtcattttgcaaacagctagaacaaaggcctgagcatacacaaacaacaactcgtaccattcgaattacttactaacagtaaaggatcccagcttagatagatcagggacccaacaagacagttccgaagatgcagtcaagaacatcaaagatcctggagcccatctaattagcggtggctcactatctgtgcttccccagcgagcaacctgcatgtccgaccatattatcatctctttcaaacaactacgatctccgtcctaaaatatagctacttccggttatacatggagaagtgcagtagctatattttgggacaaagggagtacaaaaactatatttgacatacctttccactcctaacattccaagcatatacactgccatcaccagagcctgcatgaaaaataaatattaggtaatgaaagaggatgtgccaaataatcacaaaggatgttagagaaaagtgggtcaccagatattatatggtttccatcagggctgaatgatgcttccagcgtcgaattgcttaccactggcttcacgttgtatgttgctatctgaaaaaggaaaaggtcaaagtctccacataacaagtctgcaaaatataaattaccaaagatagtttgcatgcttacattattgccatgaaatgaatctagcacatgaacacgcccagctttggtggttaaaagaagccgcctgccatcactgctgaactttatgacattggcttctgaatcatcattaccgacagagaaaatatcaaaaggcccctgtggatgtaagaagttaaatgggttgggtaattaagatcaaacaacatactcattcccattaccttctcaa

SEQ ID NO: 24776 - DNA, 3794 bp, Oryza sativa
gctcaataaaggtacagaacctcagagaaataaatggatgcatacatatatgacttgtttaggattgtgaggaacccaatttccgttttcagaaaaaaagatgatgtacgtaattaaaggggcttgtaagtatttagttgcaaaaatcatacatctgggcttcagaatgatatttcaccatcagatggactgatggaggacaataagaagtctttttaaccgataatcagaaataagataaactaaatctgtaaaagccttaattgactgtaaactgcaggttgccaaattgacgggaaagtagtcaagcagtcaaacagtaaacttattgaggagaaatgtacctgtgctttttcaacccttgaatcccataggagaactgttcgatcaagtgaaccagagagaatgttcccgttctcagagcacaatgagatagaaacaaccctgattaagacagatagtatcctctgttggtattggctaaccgacatattttattggaatttatatttattataaagtttggcaaacctgtctagatggcctttgaaatatctcaaaaaacagttattgaccagtgagagtagacggagagaatctgcacagttaattattttaagtatttgtatacatgacttatatcactctgaagctatgacaatataggacttaccatcccatccattttttgaagaatgcaagacataagttgggttttcagtgaagcacacaagctcaaccccatattttttgctattaatcgtcttcaaacacctgaaagtaggtaagtgattcaaatacatataactgaatattgaccgccaaaataaaatcactacttgacaaaatttagatataaatcaaatactttgaaaacagatacagtattgaaagaaaaaaaatacaagcactagaataggtaagcccttgcccttcagaataaaatgtatgtagtactgcagtacagtaaaacaggagctgaaattgttgtacaaaaaaaatcaagactgagtgactgacaactaaatgcaaaaagggcaattactaccttctttgatttttataaggcttattctaattttaaagagtcctcaagattaaattttgaccgttgttttctcataaaatatattctaggtatccataaaaaatattgagcaaaagagctttgaaatgtgtctatattggcttttacactaaatgtacttgtaacttgataaatccttgatcaaaatcaacaaacttgagttttgaaataaaaatacaccttataaaaatcaacagaggggatgaaagtaagagctgttcaaactgtttacacaattggagacacaaaaaagaacattgagattaattgtttatactcacacagcattttgaatgtcatataggcgaattgattcatcatcacatgctgtcacgaggtaatttgtagccttgctgtggaaatccatagaactgattcttccattctgaaatacaaataagccccataagaagaatgaaatggccagtgcagagaatattttaactaagtcagtagatactaggcaacattctaatgtaaagtgaaatatgtacaaatggttcatcaaagaatatgtactgaatatacattaattttcagagtacacattgagattgctaattgacatcccgaccaacatacccgcaaggaattattgaagaaagagcagccaagaaactgacaggtgtgattgtacatgatgggtgaaaggcccgaattaaacaacagtagcatgctctacagttagactagatgaatttctttgttcttcacattctctgtttagtttcactcacactttatgaattgctaatatctcacgatatgaaatgtaaatatattaagtacaccaagagataaactgatatcttttcgattggttaacattgtttacaggacttattacatgcaaaaaaagtttccagtccaagctaccacttagctgtcagggttgatctacttagccctctgactgcgaaagtgtctagataaccccatgaactatctaataccatctaaataaacccgataaggttttacacatgccttttgccaccatagcagctaatgtgtcaatgcttcaacaaatctatactccatttgaaagatgcgatggtggttgtggcaatgaatctgccaccacacctcttcatattgcagcaatgttattgggttgccacataaataatcaaggcgagcactacatatagtaaaaaacaaattaatgttgtttatttcaggaaataatattatgtaacattttgttttatccctaaaaagctaggatttagctagtaagttgtaatcaaattctaaagctgctatatcagagagaaaaggggtgaatagaaaagtaggataagagaaggcaaatgaaagaaaaaaaaaagagagaattgtttcagttccgtggtgttccacgtaagcaccttagggggttatttagtttttttttctaattcaggatttcaggggttaagtaagcgaacaccattatggctatttctttatttagtttctgttcctcttaagatggaaccaactagagggttgcactgttttgtatcaaaggtagaatgtatggcaaactatttgaactagtataattcacaaataccaacatgccatctctaaatatggcatcttcatatttagttcaaaataattgcccgtaatagcatatattgttcaagaacatgtcctctaccaccacaagtgtccatggagtgacatcgattatgaatgaactcactaggcactccaatccaatgaaaccttaagccccttctattaaaattcatccactaaactaaactaaagttgatatattcgacaagcaacgcctttcgattcatcgatacatcacctaagagccatgacagcaatgataacccatgtaacacttagaagaaaatggcacaagcaaagcaaaagggaaacaccaattccagtagtcgatagaagcaaaaaacaccgtgtaacagcagaatcttacatagtcccggaaggccagcccaacctccatgcacttgaacatctcatcggtgacctccatgctcaccatggtcacccgctcctccctctcccgccctagaaaaatcaacagcaaggggcggaccccccaatttttttggggggaaaaaactgttattagtcctaaggttaagacaaagagaaaacctagcttccagatcgagaagagaagatcaaagttaaggcaaagagaggaggtgtggggtagagaaggatgagaatgagagaggatgcgcgtcggcgccggtgctcaccggaggcggaagcagcaggaacaccgcaccgccgctcgcgggatggatggagatcggccgcaggcgacggggcgaactcctcgaggagacgggagtcgaggccgaggcgacgccgggacggggagatggactcggggtcagaggcgagagtatgcgatggaagcagcagggcgcccggcgacggagaccggcgcgacgacggcgcaggcggcgagccaaggagatgacgcgggccgcggcggcgtcgtcgggtagcggaggccgcgacgcacgcagcctcagcgtccgcggagtcggtggataaatggaccgagcccagccgtgctgtcccgggcacgatggcgcgtgggccgtgccgtgcctggaccggcccgcggtacggcacggcctgctcggcacaccggcccacgtgccaccatcgtgcccgttccggcacggcacgggacggctcgataagcagccgtgactaacgggccgcc

SEQ ID NO: 24777 - DNA, 13285 bp, Oryza sativa
gcagctcctctccccaccgccattgcgtcgcccgtcgtcggccgccgacgccctcctcctcttccgcctcgcactgctggcctcgcagagaagggagagagagagagatgagaagggtgagaagaggggaaaagagagaggaagctgatgtggcaatgctgacacgtgggtcccacactgactcagccgccacataggataaaaccggcggtcaaaaccaccgaaggatctaaaatgaacggttttgtaagttgagggacgccggatatctggttttgtggttgggggacaattttgtaactcgatgacaagttaagggaccttcggtgtactttttcctatattatgtatgggtttggcccaagtttgttgcttgggtcacaatgggctccgatccattttggcccaagaaaatgaccccgagtcgagcgaagcatcgaggaattcccaggcagccgccagccggccgatcccccgtcgctcgcctcacttcgtcggctcgtcgtcgtcgtcgatgccgttcaccggaggactgggggcggcggccagccgttcgttgcagcgcggcggcgagatacttcttctccatccaccggccgcccgtcgatcgcacattcgcacgtacgcgacgctcctcccgcactggccggctacaccatgctgaatcgggtcaggactctccacacccttcatacaatttgcttcgatatatatccaactatattcaggagaactaggggtttcgattgatcgtctgaattcatttttgtcaaatcgtaatgcgttagtagttggggatagaaattggggtactaggctactagtaattacgaatcggaattaatatcgaatgacctagattgccatttcaccaatgtgcatacactgatatgcgcagagccacatatcgatttgctggggtgaattagaactttctaaaaaaaaaaagaactcgagacaatctggagtatacatggattctgcgtctctagttcagtacgcgatccatggctagctatgcgtgctcgaaagtcgaaaccagctgaatcaggccctgtttttttcagtttgggattattataatctagattattgagtcagattactataagctagattgtaataatctgtagtagaataagcagttagttgtttcttttctagattattagagtctagattattgggtttgcaagtctaaagaggaagtggggtggcatggtgggtaatttttcactcaataatctggaaaaagctcacctaaatgagcttatcagattataataagttagctccagattataataagctacttcaataagttgtctgtttctttcattttactcccaataatctggattataataatcccaagctaaaagaaacaaggcctcggtgactttattttcaccatatttattcagttttctctccaagtagtacttctcttcaatttctacctacattatattgacacactagctagtttatgcgcggatattctcgatcggttggcaacatatttaaaatggatatttgtttttccacattatcgtatcttggattaattttggtagttcaacacacaccatacatcaactataacatacaccctttgtccggctggttgttcatagagtatcaattacacagtagcaaaccgaaaaaaaaaatcgtttagtttacaggaaactttgtaaatcttgaaagagaaacacttatatgtatctgtttcttgatgcactcttggaagtgagacgtacgtactgatcaaatacccgtacgagaagttttttttttctttctgtggctgccgatgaagctcatagaagatatctaatagcacaactgcatcaaatgaaagtaaatattcgattagagtactagctagcttgttccagacagctgaaattgatcgcctttcgatcgaacatatatagaataggaaggatatcttgataagcatagatgcatgggggataattaaacatgctaagtctcttttgggatcgatttgagttttgcttttcaaaccgcagcaaaaatgaaagtaattattgctaattctctagatttgatctaaagttgctactacttccattaattggtcatgacaaattggcatttggacattctaatttacacggtatttgagatgaaactttgaccactattttctatcaaaatatatttgtaaagttcaataaaattataataccttctgaagaaaatttatacacacatatatatgatgatttctattatttatacaactaagtatacagaggataatgattcttaaaattataaaagtacaaattaagtccaaaacaacatgttattatgacatgagggaatttaattctttaattactagttgttttaagaggactacaaattaaagtaaaccatatacgaacttattttttagataatggattatattaaacacggcctctacaagtcacaagcacgagtatataagactctcctgttatatgggtaaagcataaataagttttaaaggcggacaacaagcaagaggaacttatgattagtctcagtactaacttacatgcatgcattctaatcagtctagctaaacatatatagtttgataactatatgctccatctgctagctaactttgttgctcatagcaaagttatggaataatatgaggtaaacatgatttttatatatattgagaaatggagtgataattgaatattcaatatatgcatgaagcactcagaaatggtttgcagttttgttttgccacttgccatgcatatatgtgctagaatgggtagatgtctgcttaatttgcaccagatttgtggatacttgttcaaattattgtagaaatatggaagatcaattatatccccatatatgcagttttgccagactagctagcaaagtcacaactcacaacgaagctgagaatgcactttcttgctacatcttaatttgtctgagtagatatatattcctatgcatcatcacgtggtctctcaaaacaggagagcataaattcaagcataggctgatcaactctttaatttgtgttagtagctactaccactgcgcttatgctaataagggctaggggtaccgtacgtaccacgggcatttcttacttgtttctgaaggagtatactataccttcgtcctaaatatagttgattctggactagacaaacaattgttcacatatatatagccataagttttatatttgggatggaggtaatagaagcaccaattgcaacaagagatagcatgaaaaaaaaaccattagcaagagcttttagaaaatttcttttgagagcattgatgaattcatgaattgtttgaagagaacatatcgaattggacaaagccatccaaagattatcttccaagctgtacattatagtgacatgatctgaaaagttgtcctcgaccatataaaaaaaatgacatatatttcttatcaaattttcaggagcatgcatgattgcaagttttttttcttcattcattcattctagagtaagaactagagagagattctcattacatgatcaaaacgacgaatcgtctaagcaaaatcaacaggtaaaagccaacttaacaagaccatctttccacaatgagcatacacaaaaacaaaccctaaatccaaatatccatgcaaaagtaggcacgcacacacgcctacacggccactcaccttgtcgccggccgtacacatgcggcatgccgtccacgcgcgcggcgtcccgagctgatcaggacggcgcccatgccgaggcgaacacgacgttgtgccccttccacgtgagcacgaggtcgtcgtcctcccgcttcatcccccacccggccgcgtggtcgttcagcatcgccttcacctcgccggcggcctcctcgccgaacgccgccgcgcggaacccggcggcgcgcatccgctggccccacctcgtcctgtcctcctgccgctccaccctctccaccccttcctgcgccagcacgttctccaccttccaccccacctccgcctcataccaccgccgctgctcgctccccttggggaggaacgtgtccacggcgtcgtacgggatccacaggaagttgaacgccgcacgcagccgccccaccacgtcgcccgcggtgaagtcggcgtcctcgtccaccaccaccaccagcgtcgggtcgagcgcccggagagatttgaggagcatggtacggagggacaccggcggctgcgccgtcgtcaggctgaccgagccggccgtctcgtccgggacggtgtggaggagcatgtggcagttcacgaccagcgcctcgccgccgtcggagacgagctgctgcacccggagctggtcgacgagggacgtgagcgcgtcggccggcgaggtgggcaccacccggaagtccatggacatgttgcgggaccgcgcgaagttgaccagcttcgcgcccagctcctcgtagggcatgtcgagcgccggcggcggcgcgctgggcgcgacgtcggcgacggtgaggcggaggatcgggggcccctcggcgcggccggcgagcatgtcgatgagcgtcgggatctgcatgcagtgcgtcgtgctgaggtcgacgatgtgcacgacggggaacccctcgacggcctcgacgatggcggcgttggccgccgtgtacccgaaccggtgccacggcgtgaggtcgatgaagctggcgagctcgacggccgtgaaccggtgcacgtggagcgccgccgactcgacggcgtccgctaccgccgcggtcaccgccttgcacgccccggtcctggacgcccgcgacacgagcgcgcacaggaacgccgctgtgagccgctggttggagtccccgtccgccggcgcgatgttgttgagcacccacaggatctgctgcgtcagcgtggcgtcgttggcctcgatggcgttggcgcagtgcaccagcagctgctccatgcagcccgtgctgttgaggttccccaacgagatcttcgacgccgccgccgacgacgggaagtagccgctcccacccaacgtcgtcgtcgacgacgacgacgaccacggccgcgctcctcctcctcccctcgtcgcgccgacgtcaaggtacaaccctaaccctagtccatgcccattagggtgcagaggcggtggaggtggcgcggtgtgcgtgaactgcatcatgtagtggtggcaccagcgcggcgcaagcagtgcagagacgcgattagaaaacagcggagacgcagagctagtacactttgagcggtttgaggcacggatttggtgcttgtacaaggcatatatagagggctgtgcacttgttgctcggaggcgccacacgtggtctcatactctcatcccaagctgccgctgctagctatatactgctacctagctaagccaaattccattagaactttgggaacaacatggatccaagggagggaatggagagaaagagaagctggccagtgatctagtacaaggaatatttcagtgaaggatcgatcgagcagagatgcaactgtagatggtttgtactatctagctggggaaaaaatggcaagaaactaatgaattcttcgatctcccatgtacttaccatctacaaagaaggatatatcgagatctgagagcactgttatggtagctaattaaccagaagctaggaataattagccgatcgagatggcatgcggttctagctagctaggagccagcttgaattcaagattcaagctgcggagatttctgcttgattgtctacaagagaattttatctaggatcgatgaactagcagatcagggagcagttgggaaagcgaggagaggatagatggggaatgctaggggaggggaaggggaagggaagaagaggttacaagtcactaattatagagggaattatgtagtggtttcttggattgttctggatggccagctattcatatatttgtctatatagtaactagtaattatcaagatcgctagcatgtcacattatgaacaatattttataattactctgcttggtaaaaatatataatgcctgtaaaataatgtataattgtcaacacgccaaattaaaggttaaaatgacatctagtggcccccgttttttacaagtctgatagcccattcggacttcaaaatcattcttattacctcatctgaattatctctcattttttctgcaatgatttaagctgtctatgatagagtaattttgcttctctctaaaagatagctttgtcgtatttacaaaaggagacatgggttgtcgtgattgtaatttattcgattttctttggaaaaaaaacttaattcagagaacgataaaaaatatatgagttaaatataacaacatactgatcctagcctcctacaaaacacacatgctcgtgtgagtgtacatctacctgtattgtgttgcacatagctagctagtataaaattgtgaatataaaaaacttttctatagattaccttttaaagaaagaaagtatggaggcaaaacaggagttcgatcataattaagtatcataacctcatggaggatgacgcagatcgacgtacggttgaaccggtgcactgtacagttgcgtgtaaatatgtacgctaaggaattttatgcacatattaaatttttgtaatccgttttcaaaaaagaaaatgtaacccgattattttagagagagggagagagagatagagagatcacggggcatatcatggtgaaatgatttggtcagttcgcgttgggccctacatggaacaaagctacaactagtttagtaattagagagagggtccattctatttaatatcctcattgttgcaactggaaaacgactctttgtatggatctaaacttacgcgtccaagcactggaaactattcagctgaagaattttatagaccaggtatgctgctctgcagcgcgtagacacacacacacacacactaacaattcgaccaaattgattgatagatggcacttgtgacatataagttgcttataatagaatagtaggcttacacttcgaatatttccatttgttcttaatttgccatagaataagagtgcatttgtttaaagttaatcaagcaaatcatcttcttagttaattacccaatgtcgttatgattttttaaggctatctacataaccatatcctcgatatgcctttagttaagtgcatgttaatttgcgtgccaatgtcggtctgtgtcattgctagttgttggaaaccatcgggataaaattccaatagttatacattactacatctgtctcatagctaaaaatagatacattttagaatgaaggtaataagatttcttcactacctgtgttaatatcggtggtgctgccactactttatagcaattagatccaaaacaagaattcagatataggatcataaagtggtagaactactgcagaaacttttattggttctgcttattaaccagttgtaggcgttggtttctcagtcggaaccaatttaagagtactaatgcctaatagcataggtgccggtttaaaatacgatacttataaaactataagtaccggttattatactacaaccatcacctataaatccgaactgtgccggttatgctatccacccagcacctataaattagaatgtgtcgggtatttacttaaaaccggcacctattaagttttataaatatcggtttttcaataaccggtaccaacactcataaaatcagcacctatacctattaaaaccggtacctattatctgggaggtatttgggtaaatactatagatatcggtttttttttaagaactggcatactctagtgaaccaatgttgcgctataattaatctcagttaggacgatccattattaccacagttgtaatgacagaggatgtttttggtagatttcaaacatacaattccaagggaggtgtgagcctatcatcacgcaagcttgaagtagggatcagaagaatttatagtacgacttataaatatacttcctttgtttcaaaatatttgacgccgttgacttttttagtacatgtttgatcattcgtcttatttaaaaactttaagtaattattaattcttttcatatcatttgatttattgttaaatatactttcatgtacacatatagttttacatatttcataaatttttctgaataagacgaacggtcaaacatgtgcttaaaaaatcaacggtgttaaacattttaaaacgagggagtatctacgtacggatgtctgcatgcatacacacacatacatgcatgcatgatgtgtgtgtatttatgcctctctgtagcagtaaaaggaagaaagaaagaaagaaagaaagatgccaattggcagaccccacccaaaaacacattgttgtacgtgtattctgtacaccaaaacagaagcagatcgaagcattcatttccggccctactgatcacacaacactactactcgctacagcgatcgatcagctgtgatctgtcccccgcgcgcacggctcgcgttcaatgcgtcacacacatgatatgatgcgcggtgcacacaccggcatcagctgcgcgtagtacacgcccacctacagtggtatacggctccgctcccatgtatcatggggagatttcagttcggctcccgcgcatgacggcactgtaattttctttttacattttagctattttaatattttatcttataaataaccctttgaaaaaacttattttagaaataaattgttttttcttgatacccacggctgagaacctatctataagaaaaaatatttacaatttaaactatttttgaaacaatattttttgaatagatcctcggtgccagttttgttgacattgaccactctatacatcttgactgtttgggacgtgatgatgttggctgccagtgtcattagcgctgagtgctgagatgttaagatctcgacctcgacgctacagtcatcgagtcattccaagatcaagttagtttaagaatctatttgtaaaataaatttatagaacaatcaaaatataggggaaaaaaccagcatgactgcacggacgatctgcggtccgcgacgcgagcgattaaatgcacggagtttacgtgacaccggccgtggcgggccggaggagtacgtacgcgctgcaacgcgcgtacgatctcccgtgaaccgcggggctcgtacgtacgtactcaccggccgttggagagaggcccccgcggccgcgcgcggcgcccccaccgaccggatcgtctccactcacgtttgtccaccgtaccacgcccgatcacgaacaaacggatggatggatcgatgcatctgcgcgcgcgacgagagcgagagtgaatgagctcatgtgcgcacgcatggctagctgcctgcctgccctgcatctgcgtgacactgttgagagtagtaacaacccggagattcctcgtgactgctgctgcatgtcagcagttttgccgtcgtacgtagcagatgcaggcaaaagctcaaaccgggaccacatgtcagcttcatgaggtcattctcaacccaatgactaggatggtgtacatagcattaaataagttgtcacctaggatgaaaaatgatgtgacaagtgaataaataaggaaagagaaggaaaccatgtcttgcatgagacgtggtttctacacaacatccaatacattatgtgagataaatagcattaaatttaggtatggaatagtggtgtttgcattgggagagtggtgtctagtactaatttcttgatgatgtggagtttatgtaaactatgtttagtgtctggggttgggaatggccttattagtttagctgtaggtaagctctatagctacgtacaacttactactagtctactaccgctgagtacgaacaggaagctagctgccgggcttgagctttgttcctttgtctgaaatatctagcttatctgatatgcagttgggcgtagtatatgtgcggtaaacaccatttgattcgtgggaagaattggcacgaactggaccacggactcacggaattagtactgatcagcgtgcacttagcttgctagccatgtagcacatatgtacatgcaggctgcagcgaaagaatctgatgatgctctgtgtcacaagatcaagacggtgtttgacgtgcaccgtggatcttattattatcaatgcctgaattcaccctagttaattatgtgttccagaattctgatacctacctccatctctcttaactcttgcagagtgtgtctgactgaaagtgatggcctcttgcatgcacgtggtataattcacatatatatcgatataagatgcatatttttttcccaagcgaaaatggggggaaaaagttggaaaaaaagatgtttaattttcagtcacctgaaaatatataaccacaaattccgttcacttttaaatggcttagattgtgcaaagattcgtacaatgcaacaaccttatcttctcccccttgcggcacgcttctccaacccatcgcgagctcatgcaagcgtacgtgtaaggccacctagatatgtctcctcggttctgccactcttctgtaagacgaacgacgatgagctatccttggcatgccttctttatcttctgtggctctcccgttcctagtcactccagatattccacgacccaaccaccaatcaagtgacttaaccctatttgattcatcttagaattattataatctgtattataaggagtaagttcaaacaaacaaatagattattatgatagattatcgtaatctataagccagattagtgtaatctaataatctcctttggaggagcctttttttgattattggttggctaaagacccactatccttagatgcctccaataatccagagaaacaaacagctcacagcttattctatgtcatcttattataatccatcttagagtaatctaaatttaataatttatattacaataatcttaagctgaaacaaacaaggccttaggtggtgccaccgtgccttgccactcgctcgtttcgctgtcaccccttccatccctctaatgtcgagtaaacctccttccccctccatcaacccctaccataaaatcctaacctacaacaccatttgctctcgtgccgtcattgaagcacggatcttgatatatgtgcatcttatgttgagcaaatttgaccagaattttgaagattttaggcgagaagaaatcttgtgatccccccttccaaaaaaaaggaaataatataaaacccaatcgaggtgagcactatcgtttgcccttcagcttagctgtacctaaaatttaaattttaaatcttaattttagagttgattttgatgttttttcatcatagtttattttttaatgttagtttttaagtcgctaaaatacatataaaatttattttctgtccaataagaattatggtttacaatcaattttaggtaaaacaatgtaagcggtaacgatgcgatagagtattatggtttataattagttttaggtgaaatgatatgtaattgctgcttaattactcttctgcctcaactgatatggacggtactttcaagttctccgaacgtgcatatataccatgtttttgctggctttcatatatagatttgcaattgtcatcatcttatctttactattagtgttttttcacaccctgatacttttagactcggatggaatcgaaagtaccaaaattgacactttgaatgtagtatcaagcgataacttctgtgtaaccgtaaatatcaatcactactgggaaaaccattttactggacaatactccctccttcccataaaaaactaacttagtactggatgtaacacatcctaatacaacgaatctggacatacatctgtccatatttgttatactagaatatgccacatctagttctagattcacttttttttgggacggagggagtagcaaataatttttctaggcagatagacctctcggagctaaacgtccgtctacgaaaaatccatcatagtttgaataatcattttctccttttccttaactagcctaagagcttgtgcgttgcaatgaaaaacaaattgagtttctaacattaaatcaattagtccaagtaatacaacaatttttcgtattgaataagtaggtgattttaaaatttagagggaaccaataatgaaatggaggactcgttaaaaggttgtgtaatagtgtagattgtgagatccaaatatcagcaataggggtggtgtgagaatagacacatcactactaacattttaagtagtatagatttgcagttgtcatcatcttatattatacatacaacaatagatagtaagtgctgatatatttttttttcttttgacatatgttcatgcatctctagtctctacatagtttcgccaaaggtaattgaagcttatccattcagaatcttgacgtgtatatttacttctgcatattcttacacatccacactagttaagaattgtgatattgaaatttactcggcagataacaacgacgtttatcggcacgcaacgcatacgtacgtacataattccagcaaacgctagctagctagtagcttagttcaacccagagaattaattaaattactgatgtcgtgatcgtctgaaaaggtgatgttgttggttacttgtcgaaattttcctacatcaattacgttacaatatagcattcacacgtgtcgacccttagtctaattaagcgtacgcttttgattatacgacgcacctaacaagtatcaggcattggcaggaccgagctacgaatgctgcatcgtcaaaacaccagaatccatcaaccgaaaaaggcagatcgatttcagagattaggttgatgatgacttaaacaacatcaaaattatggtcacatcagaacaacagcttgtgatccatggcatcccaaatgtcccggtcaaacgtggcaaaagttgggtcctgcctgttccttcttggacttaaccaaatgcaagtatatatgcttgctgcaatgaccactactacacagtcccagaaaaggcgattgaaacaatcttgattttgcacgcatggaaaggtgaccaactttgtcagtagaagaatctgatggaaagcacatagggcgaagaagatagggttaagcatgtctattatactagtccccattatgatcagccactaactaaacaggattttgtttaaggctacaagggcaagatgacaagtagct

SEQ ID NO: 24778 - DNA, 9498 bp, Oryza sativa
ctgtgtgtttttctgatcattccatggcactcattcagtcactactgatctgttactctgatctgttattcctgtctctgcttgcatggtagtttgaagctagtacttgtactggcttcattccaatcattgtttagggtatatgtcactaaattccatgtgtcctgtgcatgagctagcatagctgtcatgctcggagaaagaggggcttatactgctaatttgtttttcttatccttggagtcttgtagtatttttgtaacaccaaattgggatcagaaatactccattcaactaactaaggtactctgtatgcagcaggctaaacaaatactagtgccttgtactcgcccgttgggcactaatattggtgatactttgccgacaagtacgatacaagtacaatgcattttattccggattcaggtttcagacactagataatagatacataagccgtgatactgacatagtgccatatccaaatctccctgtttaaggtatatttagacttgaaacatacacgcatcggagtttggattaggccgtaatccattccgattatattcgagagcataataatttatttattcataacttcgtttcgctatgaggttagactgtaaatctgtagtaattcatagatttagttcggaccaagcaagatgcctgagccacaagtatttgggctgccacggcccagtttctcctgacatgataagggcctagcagtaaggctcacaccacttgggcatctcaattcggcctggtaactgtgtggccgtgtggaccacacagttaccacgggtggcgatatgggctgcagcgatcggagcaacggcgacttggcgggatcacaaatcacaatcgaaacgtgataaacagcccactggaaccgtggcccggcacgtcgcacgcgtgacgcgtgggggggtgctcgtctcgcctcctccgccgttcgccgcggccgcgccgcgggagggttgggtatcatggccgcgcggtcccacgggccacgagccacggccacggagctggggctcacccggcctctcctgtaccggttttttcccggctgccgcgggcccgcggctacgtcctgtgcctacgaggccacgatacgtgacagcgtaagttctttggtacgtggcaccaaagggcctatttggatggctaccatgtcaatttttctgttagtaccaaaacttaggtaaatttttagcactaccaatttttttggtagggcaagattatatctggtttgctaccaatataaagccaacatatgaattgtagtgaaaattgttctagagtgatccgaaatctagcataggcattaccaataaattggtttcaatccaaaccaagcatgaattatctatttatttgtcgtgtgatttctaacaacaaatcacctagattttttatacccttagaattacatccgacggactacaaagggcctgttcactttgatgccattttcaccttaccaaattttggtaaagttaccaaaaaagtggctacatttagtttgctaccaaattttggtaactatataagaatcatgccaaaattttggcaagttaccaaaattttggtaactttgccatattttggcaatgataaggttttttttgcatcaaagtgaacaggctcaaaagaaaataaaaaaacacatatttaattacacattatttttattaaaattatagtgtacttacatatcatatcaactgaatttacaaatgtaattttagttatataggactgtaattttatattttaaaaaaaataagaaatacatatttacttacataatatttttatcaaaattacagtacacttagagcaggtacaatagcaggctataaactagctataaacatatttttaaagagataaaagaggagagagaagtgcagcgggctataaatttatatccagttgtagcatggactctaatatacaataagtgtatgacatgtgggaccatatattaatagcgtaatatataactattgtatgaattagctattaaattaactataaatgatttagagctggtagttggctatactattaaacttgctcttacatatcatatcaactgaatttacaaatgtaattttagttatataggactgtaattttatatttatatttttattttagtttcaaacatcaaacgatcgagaacatgtgtgaccgttccctgcatttgtcaccctgcgtttgctgtctacagttacacacaggagccacgccccacgaatgtcaaataaacgaaagcacacagggttctcgaggtcaatttagcggttgaaaaatcgacaaatatcaagtgaaaaatttgtcgacagatttacagcaaaaactgaaccaagtataagtactatttaaactaccaatattaatatttgtagggctacgttttggtagcaattcaaaacggccccaaatcaccaaccaggtaattaaccagtaaccaaccaattgactagtattttctccgttctaaaataaatcaattatatgatactataatactatgaatttaaataaaaatctaagttcgtagtattataatatattgatattgttgtattataacaatttattttgagatgaatagagtaagtgcttgcaaatactcccaccgttcaaaaaacgaatctagaactggatatgacatattatattctagtacgataaatctagatatatatatccagattcatattcctagaatacgtgagatccggtaactagattattttttttggactcaggagtactcaaccactggtccacgcctctctgcttaatcatcaactgtacttctcatagctagcgcgacgagctaggacgtactagtgcacaggggctatactacattagtaccagcatctacgagggtcgtcgacgcactgcttcctccgttgattcaccagtgctacgtgaactatatacgacgtagagaggcgttgtcaccagtgctttcgattgtgattcatttagagcaggtacagtagaatgatttagcatgctccaaaaagttacacatcatcgtattcctacgtggaggaaagagaaaccagaaaaaggaaggaaacgggcaactaatctagcgccgacgatagcacggctccatatgcgcatgcaactagtactagcaattaaaaatacattttttgggccccacaccaccccatccgatcacatgtggtttgctctccttctccttccgcccaattagtatttcccatctccgagcagtgcagctgtgcaacacaggttcagatcaagcacgcggaatcgctctcctcttcctcctccatatcttctccaacgcagcgacgcttcttcctagcatcgtcgtcggtgccaccgttcgccgcggcgtgcagatgaaggccatctgaaagcgtcggcactcccttccgttcattaaaagactgatcccagtttccagcctttgggcgacaccgctgtgtgctagatctgcgccggtcgcttgatcgacgcctaccgcatgaagctggcgttgtctccacgctaaatcttgctgtcttgcgggtgatttcgttgattaaaacaaacaatcggctagggagtggttcagtagttctgatgtactctgtaccggtggatttggctttttttttcttggttttttctctatttctgcctgatctcagatgtatgcgtatcttgtttacaaaaggcggattttgtttccatgtatttttttcgccgctgagtgtattttttttacctcgctccatctgattttcgatagcttccattcaattatattcatgtagacataagaactcatatctcaaaacatgaatggccacaaatatgaagttcacttttgatcatacacagtaagtactcataaagtatgtgtatgtataattaaatatttctttcatgagatgtagtaagtacaatagctagtctattgtattagttgtttgtaatattagctataaaatgacatggagataatggagccagcagcagactatactattaaccttgctcttactccagtatatactcgctggcgttgtcagaataaagaacaccggaacgagttgcatgtgtatcatgtgcccagccgtccaagaacgattcggctcttcaaattggccactatcaagccagcacgctctcgaagggacagcataaatgaatcgatctagcgaaatctaaagttgaattcttttcccagttcaagcaagcgcaagagcgaacaaacggaagtggctctcgtcggtgatccacgcgcgttaagggtggggagaggaagagagtacacgcgcgaatgaagaatcaacaccgtaccagcggggattccgatgcgattgacgatttttgttgatatatgttcccatacatgttttctccgtgggaatcaatgtttatatcctattcgatactcccatttcttttacttcgcgggacaagaacccaaggccgtaatagttgtaactttgtttagtgggttttctttgctagaaattctagtcataaatcggtatattttaatccaatagcataacataataaacatgatatatacaataaagaatggtttttccacggtgataaacataaatatgctagcaagaacagtagcaactaaaaatatgtttaacactgaaataagaaaaacataacagagaaagctccggatatagaagaggaattgttggtgttgttatccccgctccgttgtcgtcgctccgtcctcctccgttggcgccgttctcggtagtggttgacttgattcgagttgttggtgcagaggaagaagattgtgacgtacgtgctcccaaaaggtgcattagcttgactcacagaagtagaggtcgtagtagtaatatctttttgctccggttaggtcatacacaatgcacctacatggtgaaactgtagaagcctttagctcaccccataagagccgcgctgctagagcgagtgggttcatcaggctccccgtgtcttctacaagacatggtggtctcaggtaggaaatgttgaatatataagcacatatagatttaatttattatataaataaatcatgacattgaacatgtatactagcagatccacatcatacgatctagacatgtaaactatatagtaaaccatgagcaggtcaaatagatgaaacatcatgaacacgtaccaagggttctggttatactgtagatcaagttgatgaggagcaacgcgcgctgcaggaacaacgtgcagtgccgaatgttatcgttggtgcacagccctcgagcatagaggaagacgagctgtcgtagaagaccagcaagcagttgcgcaaggcactttccaaaaaccttattgccgccttctcccgatataggacgtcgaaggcgaaggttccggagatctgctctcccgattgctagtgcacgcaggcaaatgggatggagtagactacaagcgacggcgcagtacagaggaggagtcaaactctagattgatttcccgtatattgcgggagtcggcggctcggtttatatagagatatcgggatacgtgatcaggacgcctacatgatcttcacaccacataaccaaactggataagtcacgcgtaacttaatcgaattccacatcgttccacacatgcattggattattcggtttattttcaaaaacaaaactgaattttgtagcaaaacaaaactgcaaaaggaaattgcatttgcacaagggtgaggaaccaatgttggcaggccattcatgcagatgtcgcgtacgcaagccatctagccgggcgaggtgagcgagcatgtgcgtgtgttccacttgttctctctatcacatatgtccatgcatgctatctcatgaggtggacttttatgattttttaaaaaattaatctttaaaggcaaattttgctacaggacatcgcaattgtgtggttttaacccagggacaccgcaaaaacaaaggtttgggcaaaaacaaagctttgccgatggacaccgtgccgtctaaatgaaacttgccgtgctgacatggcaagcggagcccttttttgacgtggtcggaccgaaatgcccctgcgccttatctccgccaccgctgctggcacgagcggcgtgaggtcctcccggtcaaccgagacgtcggcggtgaaggagagcttcttcttcttcttgccgttgctgctgctccactgcacgcgggtggataggcggaggcggaggatgctgccggctcggtgcgttcttggggaggtggaaggggatagtgatgggtgggtggcatggtggttgcagtggtcgcagctccactggtagtcgccaagcttgatgcggaacgcgacctgcgtgtcgttcttctcctcgaggaggatcaagtaccgcgtcgagaggaccggccgtttgccggcggcgcggcgccaaccgcagaggcacaacggcgagcgggtcggcttcttggcggacacgacaccgatgatcaccaccacggggaaccgcgtctgctcatgctcggacgcttggaacgccgtgccgcgcaggaggtcggtgtcgacggcgtcggcgtcgcagcgatacacggcgtggatcctatcgacgcactggtggtcggggacgaggcgggcgcggctgtcgctaagcgcgaacgagcaacggcactcatcagccttggtgtccacagacgacgccggggacggtctcccacatcatcgcgccaccgccactgcccccgccaccaccactacccccatggcgaggagccagtgacaccgtcccgccgagggacgggtcccagcggaggaggaagtgggggccgacgaggaagtcgtgggtgctgtgggcgagaggcgagaaggagagcggcggcgcggcatcccggtgccggagggaggacgacggcacggctatcgaggaatgggttgttgaggcggacgtggtcctccttggtagtctgagttaacgagagaaaagaggctaggggtaggggaggaaataggaataaatatgtgggctacgtgggctgggacatcctgttgtgggctggagtgtctccacccggttacttcggattttgaagagcccagctacgagtatcccccattggaaaatgggtgtctcatgaaggcggtgtttagttccacatcaaaattgaaagtttgactaaaattgaaagtttgaaaaaaaatgaaagtttatgtgtgtaggaaagttttgatatgatggaaaagtttaagggtgtgtttagttgactctaaaattaaaaatttggttgaaattggaacgatgtgatggaaaagttgaaaatttatgtgtgtagaaaatttttgatgtgatagaaaaattaaaagtttaaagaaaaattttgcaactaaacacggcctaaagtttaaagaaaaagtttaaaactaaaagggtgaagtgttttcagttagtgagagcactaatgtagctagtgactctcatggtacatgccctaaccaaacaaccacggagtattgtcttcagcacacatgctgacatgcattgtgacttttgtgacgcggatactactcatctcgccctgcacgagccgtgccgccgtgggatggtgtaccacggacgttcgtacggatgccgcatgcctcgctaccgctgcccgcccggcccagcgtcgtacgtgcagacgtacatgagcctgcggaccaacgcggccgtgctcccgagacacgaggccgcgaccaccggcacggcagaaaaggccgcgccgcgcagcggggggcggccgtccgcgggtcgcgtcaagtcgtcgcctcgcccaggcgcccacgcacgcgtgcgcccaccccgaaacgcggcgccgcggaactatcgccctgcgcaaagctgaaccgccgtatccaatccaaccccacccccacaccccacttgccacctcccacgcttcgtccccccctcttttttcttctaccccacctagagtttcaatactacccacttggattagttattatacgcaatatggagtactatatatagctgttctgttgtctttaaccatggcgatgaagcagctggccaacactaagagcaaggctaatactactaactttaattcatctaagtcaatctaataactaattcatacaatagttacttagagctggtacaatagcatgctataagctatctataaatatattttaaagagataaaggaagagagagaagagcagctggctatagatctgtaaccagctacagcacggactctaagacgtgatgtgtgtatgataggactctaagacgtgatgtgtgtatgataggtgggaccagatattaatagtacagtaagtagctattgtatgaattggctattatgttggttatagatgatttggagctagtagtggactatagtgttaaacctgctcttattatactattaatatatggtctcatctgttatacacacactacgtcttggagtccgtgctgcagctagctacagatctatagtccgctgttcttctctctcatcttttatctcattaaaatacgtttacaactggctaataacttgctattgtacctgctctaatcatgtactatacgctatacgctttcgataattaagttgaggataagatcgatcacgacgcgaggttaatctgttcgcttttattcgacgttttgatgctaacaaagtagggggagaaaaaaacataaggtactgtaaagagtcaagtagaagcagtgcacgcgcaccgtcgacttttacacggccaaaaaatggctaagggatacctcgccggcgagaggctaccaaagagttcgccgggatgcagcaaagaaagcatatgagaattgagcaggttaattagctagctagcctagacaaaaagattcagcagctcgggctccctctcgccgtcgccgacgacgccgcacgtcgtgacggatccctcggagttcatcgacggcgtgtcggcccgcctgccgccggatcgccggtccccgggcgccggcggggagccggggctgagccacaggccgaggtcgcacgacggttccggctggggcgccgcggcggcggcgtcatgcggagtaccggggttcttggtcgtcgtcgtcgtcgtcgaccgcttcgccgtcgagaacgtggagcacccgcccatggcgcgcctcgccgtggaggcgaacacgtcgcggccaccggcggcggcggcgtcgacctggtccggcagcggttggatgcctccgccgcgcagcacggtgtcgaccgccgcctggcagaggtgccagctcccgccggagagcagcccgaccgcgccgcccaccgggttgatcgtcctccccgccgcctcgtacagcagcgactggaacaccgtgcaaccaaccacgccatcccatcagccaagaacacgcgcgcgcactcaccggtaaaccatccatcgtagtacggatccccacccttacctgctcgctgcggctcgggga

SEQ ID NO: 24779 - DNA, 11222 bp, Oryza sativa
atagctacaacggatgattaggaccacacctcaaaaaacatatacaagagatttgcggctaccaatacagccaaatagtacaacttcacaattttaattttgatatatagattatcacatctctaattcttcccacggttgtgggtttgtcgcttcccatcctagaatttgcagctacaaacctacaacggatgattagtactacaccttgaaaaaaatgtgtacaagagatttgtgattaccggtacagttaaaaagtacaaactcacaatttaaattttgataaataacttatcacacctctaattcttttcaccaaggcgggcttgtcgcttttggccccttttgggggaataagaaaaaaaaattttccctgaagcacacagtacagctgccattaattttgacaattcgaccatttacaaaaactaattttacaaataaaccgtcatcaaaacttatttcaaaatgaccattttgttcagcattaaatcatatggacgctgaatttagacacctcggcgccaaacagcgtgacgctgaatgtacgttggcacgctgattcagcctaccatctacggtgacggcgatttatttataaaattagtttttataaaggatcaaattgtcaaaattagtggtacagctgcagcctcagcgcaagtggccaaaggcatcttggctttctgtttccgccgcactctctcaaaaggctccaacgcgccccggtgcttcccctcgtctcggcgtcctggcaggtcgccatccaggggacgcgaggaatcacaatcttcttctccctctcatcctcctctggtagtccggtggccctggcgtttagcgactcctaaaaaaatctgatacgagagtactggggaaaccgatcttctgtgacgtttctagacgactagaccgggtttgcgggcttggcttcatggttgacatgctgcgagctaattgggtgttcgatgctgtcgaagtttgattggcaggtgatcagattcggctttggatttggagtgcggcatgccgttttcatcctcaaaatcactttagggcctgattgggaaacaggacttattcacatcggatgtttgacactaatttagagtattaaacatacattaattataaaactcattccataaccttggactaattcgcgagacaagtcttttgagtctaattacgccatgatttgacaatgtgatgctatagtaaactttttataattatggattaattaggtttaaaaaattcgtctcgcagattagctctcatttataaaattagtttttttattagtctatatttaatactccaaattaacgtccaaacatttgatgtgacatggactaaaaagtagttttagccccatctaaacacccactaagccacctcttgtcatgctttctccttcttggaagcataacacaggtacttggggtaaggctggatctctgctcgtggacctgtggtaacaattttattggaaaaagtatacccaaggtccctcaacttgtcattggtttatcgtatacgaggtcatccgaggtccctaggtggttttgaccccggttttgatctacgtggcggctgagtcagcgtgggacccacatgggccccacctgtcagctggccacgtcatcactctctcccctcctctcctcctctctcactcttctcctgtttgggtaggcagctggggaggacgtcggtgggttgctgccttcggtggggagaggagggagaggacgagggcgtcggcggccggcgacgggcgacacgacgacggcggctggcgactggcgacgcgccgccgccattgctctcgtccgccattgcagaagccacaggcacggaggcggaccgccatcgagggatgaggtaggcaagcaaggggggcggggaggccggcgtcgacctcctcaccggccgtgacgtcgccatcaagtccttccccaaccggcgacgtggcggccagcgaggggagcaaggcatcggcgggggagcaaggcgtcggcggcggtgaggcggttcttggccgcggccagcttgacccggagtttgaggttagaaatcaacacgaagaatcaatcaagaagcattcagattagcacattccaattggcaacctataaacgaaagagtgctcctaataatcaagcaaaaaatgagagaggttcaacctctgaggttaattagaaatcaacatgaagaaagaagcattcggattagcacattccaatttgcaacctaaatgaaacagtactaataatcaagcaaaaaaaaaggaagtgagaaaccaaatgggatggatggatggagtactgactcggtctggcggatcttgtcgaagaaatgggcgtcgtagacaccggcggcgtcggcgaagtggacgacgccggggaagtagtgcttctcgacgtgggcgagcgcggcgttgcgccgccgccgctcccggccgcccgaccgcgtcgtcgtcaccactatcagcatccacctcgacccgctgccctcctcctcctcgtcgcccacgtccaccaccgcgccgttcccgaccccggccgccttcgccgccgccgcatccggcacaaggctcacctgctggttcacggcgacgtgggacgcggcaagctggtggtgcggctggaataggagaagaacaagtagtgcgaagaagaacagcgggcagcgtgacgcggcgacgaggacgacggcgcccaagcccgctcgccccgcgggcgccgcgaagaacttcatggtgccgacgatctccgcggcggcggcaagccaggcgcatcgtcgggaggcacgaatcctacggggacgacggcttcccaatcttcaccgagaccaagtgcacatcggcgccgcgtcgtcgccgccgccgccgccttgctcccctgctctcgcgtcgtcgccgtcgccgccgccgccggccgccggacctcctctcccgtctcgccccgtcggtctcctccccacccgtcggccggcggcgccggcctacccacagcaccagagagaagagtgagaaagagaagaggaagggagaggaggggaaagagagaggaactgacgtggacaggctgacatgtggggcttacgtgggtcccacgctgactcagcgccacgtagaccaaaaccgggtcaaaaccaccgaaggacctcgggtgactggttttgtatagttaagggactccgcatatctggttttgcggttcgaggacgttttttatcccgataacaagttgagggaccttcagtgtagggtttagggttgtgcgcaccggatcgtcgagagactgcacaggcccaccaaacatgggctgtgtttagatccaaagtttggatccaaacttcagtcattttctatcacatcaacctgtcatacacatacaacttttcagtcacatcatctccaatttcaaccaaaatccaaactttgcgctgaactaaacacaaccatgaaaactatcgctaatattgatggtaaacgagggtggttttatagttctagcaccgtgcgataaagtttggttcacgctaaaattaaaattttggttaaaattggaacgatgtgatggaaaagttagaagaggcaagcacccactcaactagatgctaaacatttcattaggtcgttctgaggtggaatcgaaccactctgttgcgattattaaggcagggtgctactgtaccagtagtagagtggtcaagtttgtatgtgtagaaaaattttgatgtgatgaaaaagttaaaagtttgaagaaaaaatttataactaaacttggccttactttattattactaatccaactaggattgtactgatatggatcggcttataacctgctaactacgagtaagttttattatacctgttcttaccaaagtcttgtgcactgtagcatgataatacttgcacgtagtaatatttggggcttttaactatagatttggcaaataactatttgccacccctatcttaatgacatatgggtccatatgtgtctatgacatatgagtctagtggtaaaaagttaattgccacatcaaaatttgataaatggttaaatatctcagtaatatttggtcgacgtgcaagtggaattgtttcggaacaggatcgatcatgcaggcaggatcagcgagaatctgtagaatctggcagccgtggcatggtgctccgtgcacgcaggcttagcctcgctagccgccctgcagccgtcggcgagtttctctgctccctgctgtgctgtctgcgagcgctgcgcccgaggccgccccgacaccgctgagtcgctgacacctcgcgacaagcctggaccaaagcaccggctgcacgagccgaacgtatccagggctttggctcgtactcgtactacgcccagtgcatcatttaactcgtcacagctttgacaggaatgttaaaaaaaaaaagctttgacagggagcaggcaacaggagtatgtgaatgttcatcgatctgcagaattcatctaacctggacaaagctcacctgttacagctagtacctcttcttgctacagtagcaatttcctgatgaactttgcagttgttgagtttgagaataacacagtactctacagaatggtttggcaagatcaatgaaaaacacagtactctacagaatggttctgaattctagtccaagtgcatccaattgcacaccctactacaccctacaggtcaactggaaactttgagctgttctaaagatttcttgtctcagaatctggacgaaccaacaagtctacaatagcgtgcacttttgtgcactcccaagagggacaaaaattcagtagctatagcagctactagtagtagagagttgctggaacaatacactggacggagggggcgcccagcagcagctgctggctctcagtaatatattgagagggtgcggtgatgtgacaacgccatgttctgaacgccacatgaccagagccatagatcgatgtcaatgctcagaagctgccaagaacaccaagagcaagagcaacgttagttcctatagttaaataaaatagccgcattgactgctttatagtatgcctcaaacttagagttacatggataaggtgagaaaactcctactagatgaatgtcttgaccgtaaactaaagcagaatggtcaattttgctctttttcaatacttaagagtaaatataatataaccttttctgattgctcatcaatgtagcggagcgtgcagtgactaggggtgtgtttgttgctggccacactttaccacaactaacgttaggcaaattgtgatagccacaaaagtgtggtggacaaattgttagtctctgacatgtggggcatatgctattgaaaaagtgtggcaaaccacaactgtggcagtaaaccaaacacatgcctaacaaactgcggcagacaaaaaatgtggtgtggcaaagtgtggccatgaaccaaacaccccctctttgtatctaccaagaaatggtatgaaagtattaggtgatagtgattcagatgtgcctacctgctttccaaacttcttgttgatgagctctctcattttttccacggcatatacagaacaagcacgaatctccacttcctcttcacttccaggcacaatctcactgctcgaatcaattgagcaagataagttggagccatatttcagtatgccaagctccctcaagacagcaggaacaatatagtctgcaaatatggtgatggacttgatgtcgtggaactcgccatagttttgtcccttaaaagcaccccacagatcagcaacaaatatctgagctctcttatacaagaaaacctggtgtcctttgtaaagtgaatgatcccgaaaacctgccaaaattatatcttagaacaatttatatcgctgtacagatgtgcttactgcccattgaaaatagcaaaatgaaacaacgcagtatgaacaggtgaaaagaatggtggaaatgtaaacatgctaagctggactgcctctagcaaagaattccctattaggctaaggtgagaggtggaacttggaagctggaagcagacaatttaatgcattagtccttattttcaaatagacattaaaaaggaaataatcataatcatgataaaccggccaggtaatataaacataaatcttcaattctactcaagcttctgcaccaagcgaaatgaaccaagaatcaaggaatcaatgagcaaattactcaaataagttctaaccacttgctggaacaatttcattttaaagattccaatcatcaggcattcaagtaaactaataaaaaaagaatgtcaagaacaaaatggctgtagtcagaacaaagatttgcttgacgagggacttttctaaaagggaaatcaaaatgacttttaaaacaatcaattggacatggcatcagatgacatgtttgaaacacagcctatgcaggggtgcatggcccacacaagattaagctacatgcctggaatgctgcaagtgcaacctgaccacaccaactcattactgtgtcctcccagatccacagtagcgggccaaatctggatgcacaaccagtggttgtacggccatttctctagtcctgtttcactaccatacatctcattggcccattggacaaatggcccatctacagaacaatgctataatcctctcagtaaatacagctcccctcgtcagggatatggtgtcttcaggggcatctaaaagcctacaagaagttctcaaaaaccaagcttgcaacagtttagatcagacagatcaactggggtcagatagtatcttcaatttttgttttctctctctgtaatatagctggacaaatcctggttgggactcttggactagttaaaactagtgctaccaagtagaggataagtgtaacggaagatttaccaggaaaatgacgggtaataagttcgattagagtagcagcagagtttccagcagacttcactagatttgcagcttcacctccaaagcttctttcaagttccataccaacctaaatgcatccaccagaataagagataatttacaaataagagattcttggatgtagccatgtagcctatgcaattgcttggcaacaaacctatggcaaaaataataactattataggagcataattagatcctatcaacaatctcaagatgattccagaaacaactagatgactaaattcatcataatagagatggtgagtgtctttatgcttttaggtgatgacactgacaaatttcaaaatgcatgaagcagaatacagggttctagagatcaacttttcaatgaaccaattaagtgcgacagaacagtacctcatgaagaagccgtactctttcctcctcaattggcagtgggcgtggccagttcagcagttggcggagctgaggccctacattttaaaaacgttttttttagtttaagagatacttacagagtattcaaaatgcatctcagctaataaaaaaagaatacctcccactgtcccaaaatataagcacttctagagtctttcagtgagattaaggagaggtgaaactaaatgatatattgttgtgattagttgagatgaggaagtaggtggagaagttgctatattttgagatagagggcataacttttttatgatagaaggatgtagagcgtgaataaggggcctgagaagatctaaagttgcaccatatgcaggctatcataatgtataactattgattccatgtcaccacaactggtacaataatcccatatttcagtatactgatgtcaataaaaaccataaaatatacttgttatataatgcaagatgtccgtatagaagaaaagttaccagtgtaactctggagacgatctgcatcaagggctgtcttatctttctctaaggctaactttagtccagaagccaaatggtcatagctcagatccttatctgtttcagttacaaacattatgatattactgatcatggttctacaagaaacaaacatagaaatgaaaaaggctatactgcagcttaatagtaagaacatcaatttcaggtcactggaagctagtagtagcctagtacacctataattcatggagattacagaaccactagtacacaatctggaaaggctatagttgatacaggagtaaaagaattgaaatcagataattacagtggttgatacttgatacctgttggtcctattttgtatatccttaggtacgagtacgactaacttttacatgttcgaaacgatgcagcattgctagaacttatacctggccagaagcagaagttcagagcatccaggacgaagaggtactggacagtgagggggccatcgtcaaaatagtgaattccttcgaagtcccattcaacttttggaacatttccttggattttgtccaccaccttctcgacctctgtaagggaaaaattaataaaaatacatgaggattgtacatgcgctttcctttgcaaaacaaaggaaacattagcgtcaatttgtaggcactaatcaaaagcatttgcttcccacaaaatctcaagttcttctctcaaaagaaatacttggaaactatttgaaacaacaaacacccagaaaaggataaatagccaacaaggaatttcaggcacagaactctgaatcaatcagagatcgttgcaaggctaactaaactactagagtcaactactcattatctaaaataaatctagaacaactatggcatgcattccagaccagaaatcatactgctacatagacagacaacatcgagcaatcccctattttctttacaaaaataaaacgttgggggtaatcctaaaccctatcacctgagaaacatccggaagccgcgagcaaaaagagagagagagagagagagagagcatacctaacatgtcgaccttgacgtgggaggagcggctggccacccacgccgccgacgcgcgcacggcctccatggcgagacggagacggcgaggcgattcggataaggcaatgaggggagcgcggggttgggggaggcggctggagggcgggggacggggggcgcgtggttttagcggtttccggtggtggtggggttttggggtggtttggttggggtatggctcctgtggtcgctgtcggctcgggctctcgtttccaagggcctcggagaaattgccgttcgcgcggcccagcgactggctgtggtggtgcgccgtgcggtcggtcggtcggtcggtcggtctatctggtttgacccaacggccgccccagcgaaatgaccgaactgccccccaatttaaggggtacgatggagaaggtggtgaggtgacaggtccctggcccaactgagcccatgacccatttagagcatgcccaacatgggattataagtttaagattcatcgtagaacttgttttttaaagtccatttaaagataggaacgggcatcggttgtagcaacaagctcaaattagagtgataatctggacccactcgtcaaacactcaatgaccataagcttataagctttgattctcttttgctttattatttaactagaaaaaatacctgtgtgttgcaacggaataaaaataaattatattaaacaacaaatttgcaaggttccaatttcttcatgatttaaacaaagcatatcctttgcgtggaattaccaattaacctgttcaaaatagtctaaatcggctatgatattagcacgacacctacgtggtatcttcagtaagctgacacataatacagtcgcaaattaaagtctgcatcaaatactacaaaacatgatacatcaaagaaattatagttagttcactttaattctaacatacgccatacattaactcctcgacccaattccatgtgatgtcaaaccaatcgatcaaatataattattttagcgaatgcataagaataaaagaagatgtcatgctgagcttaacgggttctctcttccagttcacatgtgtcgaaccctccatcaccataagagcccagaaaactgaaagcacatgcaaacaaatataactgcatatggatttggacactattcattgaagtaagattctataatcatttgacttgaaaactaattcttattaaaatttaccactgtttcgccaaataaaatttggagtaagccttttactgttgagcgtgcatggctcacgtgcacgatatgggctcgaacttgtgcgcaggcgaccacaggaccgatctagacgcgtatgttctgcgcaaacgtgtttctctcctactccaacatggatgcacacacccattcgatcatcgtgttctctcctattcctgcacggacaacgaacgaagcggagagccggagagtacgaggatgtgggatgacgcgcgatgatacaataatgggtgacacacgaaattttttccggaatacttgcatatttttaagtaggtaggtatagaattaaattaatttacaagtaaaataagtgtgggtaaaataatatgactggatttaatttttattaaattacttatgattaattacactatttagaattttctaggatttttcagagctcaaatgctaattttaataatacaaatataattatagtaattaatttaaattaaaaataaactaaaaacatctcctaagtcagggtcaaatattgcccattcttccttcctcctcccccaagccggcccacttcctctcctctatcttcttctccctcctaggccggcatccttttctcatgctcggcctagcccaagccactcccatctcccctactgatgcatgggacccagtgccacagtgtcatcttcaacctccagaccaaaatcccgacgttgtacatcgatacgggagtcgcatccagttctgaatccggcctcgtcgctgcttcccttaccaaattggatgcgaaaacggaatcccctaatcctcctcttactttccccattgaaatccccaaatattctaaaggaaatcacgtgaattttggcaatgtttctaatccagagaactcggtaaaaccctagcctcaataggaaagactcggacaaacaacgggcttgattaggattcgagtcgacagacgaaaaatccaccgaaagccttatgtattttgtaagtaggtatagatatagatgcgtccacttataggatggacagggattctatacaatgctaaacttttcatccaattgctcttaca

SEQ ID NO: 24780 - DNA, 685 bp, Oryza sativa
caatttgctgtgtgtttgtgtgcacgctttcaagcttctcctcgtgcttcacatcgtcaagcggtcaagcgaataatgaggtatttgaatcatacacttgagtttgaaatttggtattctacttcatcttatatatgcttaagtggatattcagatgctgattttggtggttgtagaattgataggaaaagtactagtggaacatgtcattttcttggtacatcattgattgcatggtcttctaggaaacaatctagtgttgctcaatcaagtgctgaatctgaatatgttgctgctgctagttgttgttcacagattctttgacttttatctactttgaaagattatggtcttacttttgagaaagtacctctcttttttgataatactagtgctatcaatattgctaagaatcctgttcaatactcacgcacaaagcatattgatattcgttttcactttttgagggatcatgttgagaagggagatgttgaattgcagtttttggacacaaagttacaacttgctgatatttttactaaacctttggattctaatcgctttgcttttcttcgtggtgaattgggcataattcatccttttggcatggtttgagggggagtttgtacctcgtggttttatcaagcaataatatgacaatgagaaaaattgataaaagagagct

SEQ ID NO: 24781 - DNA, 962 bp, Oryza sativa
aatctaaagcaatgaaaacatttgaccaatgtgaaggcttcgaacttcaggagtagcctgaacagtaaaaaacatttgcatacttcaaaaagctctactaagattatataaggcatattatcacatccgcaattgtatataattttactatcaccatctgtaatttttgacacgaaaatatttacagagttatgtacaaaagcttaaaaggaatttttttctttaatttacagagttatttaccaattcatatccataattatgggatggaaggttccatttgtacaacctacaaaatgcacaaatggttcatgaagtatttcatgtaatataaatgagcatttagatatgtggaatctgatatggaacctttggtggctataacttaactgaccaagtgaacttcacctcaaaatcagatgcaaaataagaacaatataatggtgtgtgccaaattcacttgagtttctagtttcaaaaaatcaattcgtccttacaaagcaaaccaaacctctgactgcacaggatctacagagcaacagatcacagctccaaagtatattgacctgcctgcaaccttgtggctccacgcattcagctcttttggtgtaactggcactcaacgtatgaaatttcagcatggaaaggaactgaaaggttcatttttctttcgaagaacaaataaaaaatgtaatgtcaatcaccaaagaaaattgtgtagaaagtgaaagagtatagcaattagcccacttagcagtttgtactgatttcaagttctactggagcaaattgcagtgtccctaagcagagcatgatgggtgtaggaatcttggtagatatttgcataggccatatcattaatctccgacctctaaccattatgtgttcaattcatggaaagaggattttgtgccatagctcaccacaacacgtttcagatccaatttatagtatttatatat

SEQ ID NO: 24782 - DNA, 710 bp, Oryza sativa
tctgaaggacgagatagcgcgcctgaagaaggagaatgctcagttaaagggtcttcccgcgccaggaggcgtccggatccgcactacgccccgcaagacgacgactgcacccgtgcgcatccagcttgcgcccaggaacccacctccatcagcagctcccgcagcacctccagttccgcccgcagctccggtagttcctgcagctccagtaccagctccagctcccgttcacgtgtcagctcccgcgtccgctctctccttcgctccagcatcagccgccaggggtccagccagtggcaacggaggttggttgtctgctactcccagtggcagccgcgatctcagcagcagtagctccagtggctcagagccgggcggcggcgagacttatctgccaggctccaggagtcgctcagagggacctggtgacgagcaggaggacgccttcgactccaccgaccgcaggagccgttccgagcattaggctcgctttccattagtttatcgactgtctagtttctgcttgttagtttgtgtgtttaggttgcttgcttggggtcagtcgacggtcgatatcatgcgcctatgatatggctgtcttaataaggatttttgcttgctttttaagtgttttaattcagatccgaacaattgcagtttaaattcctatataataaagcttagttcctgagcatctgttttccttcttt

SEQ ID NO: 24783 - DNA, 724 bp, Oryza sativa
ccctccccctgcccaatctctccatctctcttcccagttaagcagggagagtggtcatgatgcagaacgagggcgagagggtcgatctgctggccctgccactcgatccggtgggtagacgccggcctccccctcctgcgcttctcctcgccgccgacgccctcccttcccccaacacacacacacaccataataatactactcctctctcttcccagttcaagtaggggtggtggtgatggagatcaaccagggctgctggtgatggagaacgacaacgaggtgatcgatctgctggcctatcgctagatccggtgggtacatgcactcaagctcgccatgaaggtctggatcagtgatgttgcattgccatgggctattgttgtgttgaattctccgttggttagtagttctttgtctctgtaattcatatttgattccttttgctttgtgctctcttcagccgatgcaatccttctccatctccacagtgggttggcgcccttctgctcaagtttgaagctccgctgccgtgcggcgccgacactgtttcgcaattgcagatctggccagcaacaggtaatctgggaaccatctgtcgtcgcctagccaagggccatttgcaattgccttgccattgttatttatggtgtaattacttaggggcaatggatgtatgcaacttcatcattaattgagaatccatatgtataggtattttggg

SEQ ID NO: 24784 - DNA, 1470 bp, Oryza sativa
aagtttttgtcccaagctccaccaaaatcaaagagcgcaagctctcaacatatcttacaggatttgattgactcgctcggtctgaccatcagtttgcgggtgataggccgggctaaaatttaaacgggtccccaattctttctgcagcttctgccagaattttgaggtgaaatgactccctcgatcagatacaatctttgtgggtactccatgtagacatatgattctcgagaggtaaagctccgccaaccttttgcccgtatacgtggtatgtactggtatgaagtgagcaaccttagtgagtcgatccacgactacccagatggaatcatgacccgatgatgtccggggcagtcctgttataaagtccattccaatctcctcccatttccattccgggatttgaagaggttggagtagacctgctggtctttggtgctctgccttcactcgttggcaaacatcgcagagtgcgacgaattcagctatttctctcctcatgctgacccaccaaaacttttctttgaggtcttgatacattttggtgctgcctggatgaatggagtactgggtctgatgagcctcggtgagtatcagatccttcagttccttgtcgtcaggtacacacaatctttctcccaaccagattgtgccgtgttcatcttcatggaaatcccgggcttttccgactctcatgttctttttcagctctgctatttcagaatcatttacttgagctgctctgacttgatccacgagcgtaggccgtgcctccagagcagctacgaacctgtgttcaacaattcccacgttgagatgctcaaactcctaccgcaattcctcacacatgccctcgatgcatagggcagtgcagtaacttttcctgcttaatgcgtctgccaccacattggctttacccgggtggtagtgaatgctcatgtcatagtctttgattagttccaaccatcttcgttgtcggagatttaggtccggttgggtgaagatgtatttcagactcttatggtccgtatatacttcgcagcggttgccaatcagatagtgcctccagatcttcaaagcatgaaccactgctgccaattccaggtcatgagtcggataattcccttcgtgtggacgcaactgccgcgaggcatacgcaaccactctgccctcttgcattaggacacacccaagtccgtggcgggatgcatcgcaatagacttggaagtctttcatctggtcgggcagaatcaaaactggtgcggatactaacttctttttgagctcctcaaaactcttatcgcactcagctgtccatttaaacttctcatctttcttaagcaaccgagtcatgggtcgggcgatcctggagaagttttcgatgaatcggcggtaatatcccgcaagtccaagaaaacttcgaatctgtgacacggtcttcggtggggtccatttggtaactgactctac

SEQ ID NO: 24785 - DNA, 1152 bp, Oryza sativa
attaacccatgcatcccgacaaacttctttgaaatgaacgaatgcgttgcaccagaatcaaaaagtactgttgcagggattgagttaacaggaaacgtacccagtacaacctctggtgctgtttgtgcctcctccgcagatacgtggttgacacgagcttggataaaccttggcccggcacgcctaggcttcgggcatttgtcagcgaaatggccaagctcgccacagttgaagcaggaccctggttttgctccagtctccttggcttgcgcggacgggcctgactgtgccggtgtcattggtgggcgtggagatacaccgcggttgggctgacctccatggtggttctgactgccactggcgccctgggaaaattgctagggttgaacgggcggtactggcggacgatcatggtggtaggtccaccctgctgtccaggagtgaagtgcggcctctggtgacttccctgatgtgccctgaactgagcggccttcctcttcctgtccatcttgttgcgttgatcctcctgacggattgccttgtcaaccagcctctcaaagtcgacgtagtccccagatattagttggttggtcagctcgtcatccagacctgccatgaacttttcctgcttctcggcgtcggtgcggacatcctctggtgcatatcgcgtgaggcgattgaactcatggagatactccgtcacagtcctgttgccctgatggagtgcccgaaattccctcttcttttgtgccacgaccccgtctggcacctgcgccttcctgaagctacggcagaactctgcccaagtgacttcagtacctggtgggcgggtggccatgtgattgtcccaccaagctgacgcaggaccttgaagctggtgtgtggcgaaagcaaccttctcctgatcattgcactgcaggagattcagctttttctctatggcatggagccagtcattcgcctccatagggttggtggtgttggagaaggtgggtggcctgacacgtagaaactctggcaacttggactgagggggagggggaccaaactgctgatgctgctgttcggcgtgctgcagcatccgctggtgcatctgctggtgctgctgctgcatctgctgcatcatggatgccatcatctgagtctgatgtg

SEQ ID NO: 24786 - DNA, 889 bp, Oryza sativa
ggcgatcagtgaccacctgcatatacaccatatagatatatgttattatacacacatcgatcgatcagtgatcagtaatatgcttgtcgattcatccatcgccatgttgtcatgatcggatcatgattctatctcttatatagctaatacaatatttatcttctttgcaggatggccggcatggaggcttacttgttgcctagaagctcatggagcttgatgatgaactcgtcctcctcctcggtgaaattacctcgcttgaggtccggtctcaggtagttgatccatcgcagccggcagcttttcccgcaccgcagcaaccctacacacaggtaacactcagtcagtcaccgtcgacctctgaccatgatcgccgccgccatgcacgccatggccggagtagcatgattttgtacgacgttgtatatacctgcggccttggggagcgacctccagcatccctcgccgttggccttgatgtaggcgatgagccgctggtcctcctccttcgtccaggctcccttgttcgtgtgcgccttctcgcagcatggggacctccccatgctagctaggctacctagctcgctacacccagatcagtccctctctctctatatatatacacacacagatcgagggaaagctctcttgttgatgaagagaagaagcacaggagcgagggagggaggaggaagatggagatgagcgggggctggttgcaggtgatgctttgtgggagctttttcgtgagcaaggagagagaggagggtggtggttggttggttttatacgagggagagggagaggaggggagggccccattgacccggatccctctgggccatttgaccgagttggtgcgatgagacgagaggaggagcggaggttg

SEQ ID NO: 24787 - DNA, 2244 bp, Oryza sativa
  unsure (1)..(2244): unsure at all n locations
cctgcagcccntataatgacgcatctgctttgtcaccttgtgaaagagatccgtattctcgggcctatgtacctacacaacatgtttcctttcgagaggtacatgggcgttctgaagaagtatgttcgtaaccgtgctcgtccagaggcaagcatcgccaagggttatggaacagaggaggtcatcgaattttgcgtagaatttatcgaagaccttcgcccaatcggggtacctgaatcacgccatgaagggagactacggggaaagggaactctcggaaggaaagcaataatgacggtagacaacaatttattccgtaaagcccatttcactgttctgcaacactcttcattggtagctccttacatcgaggagcacttggctctagttcgcgccaggaacatcggtaagtccgatgcatggattacacggcatcacattgatactttccccgcgtggctacgacaacatctcatgggtaacgagtcgatcaaccaacaacttgccttcctggcgaggggaccgtctgggtctatcgcgacattccagggatatgagatcaatgggtacacattctacacgagagcccaagacatgaagagcacgaaccaaaacagcgctgttcgtgtcgatgccatgggacacgatggaacaactgccacgtattacggtgccatcgaggacatatgggaacttgactatggtcctctcaaggttcctctgttccggtgccaatgggttaggttgactggtggaggcgtaatgattgatgacagtgggatgacaactgttgaccttaacaaggttggatactcggacgaaccttttgtccttgccaatgatgtaacgcaagtctttttcgtgaaggacatgtctagcaaaggaaagaagggcagagggcctgatgagcctaagcgtcaagtggttctcccaggcaaaagaaaaatcgtcggagttgaggacaagactgacgaggattacgatcagttggatgggcaaccccctttcacggtgacgattgaccctagcatcctcctatcaaatgaagacaccccttactcacgcagcgatcacaaggagggaacaatagtgaggagaaagtacgtgcggtcaaccgtcaccgccgatgtaatgccgtaattattgtgtacacgatgtaaactattttggatgtattgattatccatataaatcaattgatgtatggcatatgttaattacgcacgattattagaggtttcaacaagtttaaatcaattgatgcaggcaagtgacgtaataatataaatgattgttatatttgtaatgcaattaattaagattattagacctgtaattagacttatcatataagattgtgtagtgttctaatattatttgagttttaatataagattattttattgcaaattagacttagtatgacattattgactacggaattggtgcgactcctaggaattgactattgtagtcttaattagacttagcatatacgcacgaaatacttagcatacattactattttagtcttagcatgtaatattatttgagttttaatataatattactttatttgtaattagacttggtatgtaattattgactacggaattggtgcgacaagtagcaattgactattgtagtcttaattagacttagcatatacgcacgaaacacttagcatatacatgactattttagtattagcatgtaatattatttgagttttaatataagattattttatttgtaattagacttagtatataattatttactagctagggttgtataatatacgtcacctagacttagcttatatcacgatttgtaattagacttagcacgtaaggttgtgtagggttctaatgtacgacatttacacttagcatacatgacttagattgttaaaacataaatgtctcgtgacttagcagatgtttcttgtatcaacagatggctgaccgcgatgaggaacagatattgtacgatacaatcgcggagggaagcagccagtactggaatgaagaagaggggaacgaggatccaaaccagtacttgaacgaggaagggaacgtggagagggatgcggaggggaaccagcaggggcacgtggaaagggatgtggaggggaaccaggaggaggaggctagtggtagtcaacccttcgttggacagaagagggcacgcgggcaacgaggtgcagcgaagaagcttgagggtcggcacatcataacggaa

SEQ ID NO: 24788 - DNA, 587 bp, Oryza sativa
ccgtcataagttcctttgttaattaagaaaatcttgttatgttaattgctactacgaatcatagctttaaactccatgtagagcttggtatcggttccgtcatttggtccgcggcaaatggagagaaagacttaggcggaagttcaaatttcctgtgagtacacatgctctacatttatatttctccgattcaaatacatacaagtgtatattaattagatctctcgttgtttgtcatttatttgtagtgcgcaaagcaaaagcagggaactaacttgtgcggctattacgtgtgcgagtattgccactgccttgcagaccaaatcatcaccacaagagagctcgatgtacgtacaaataaattcaaaatttcattacgtagcgatttcttgtttaattactaatcaatttcatacattcatatagtttattcgcatgagggataacctgaccacacacaaggaatttatcgcggcggttcaagaacaactcatgggattcatcaacgaagaaatccttgatcccaagggtgaattctactacgacggaaacacaattcaccgtccttagcttctgagctagcagcg

SEQ ID NO: 24789 - DNA, 1473 bp, Oryza sativa
tggtgttcgagagatgattctactcgctcgctggttctcgaaccagtgcgtagcaatctcccccaccgcaagcttccattgatgttcgagagatgattctactcactcgctggtcctcgaaccagtacgcagcaatctctcgcaccgcaacctcaaatggaggaggtacgactacagcaataacacagcggtcctcgcaccacgacttcaaatgatcgagataaacttactcactggttctcaaccagtcaatcgtagcaatctctcgtacatttacttctagtggttgagttacgactactacctggctcttgaccagaggtgtagcgattctcccattacctctacttcaacaaagttgatatcaggtacacgatatcgccaagtgttttacccagagatcccttaccacaaaagacacctagcgttgaaacctatcctaatgttcctttacgccgtcttgacaaagcctttgaggaacctaagggaacttcggctgggaacgcccagagcggataaggctttgtcggatccttcagagacgaaagaccatgtaagatctggtcgtgtaagagttctcgccgtgcgtattaaccaagccgtgtaatcggaaatcgggtttttcaacttcaaggctaggggctaggatcagtgcttgttcaactaaggcaggtcaaaggtccaagagccttatcctccaagaacaattctccgacaaaaaggctaggggctagggagagtatataactcaacaaaccgactgatcgtagtcggtaaaagagtagacgctcatatacaaaacattggcctgtaagtttaattcattttctgttttccatacatattataacatgtcacccttagagcgttcgctcgggggctatttctatctaatattcttttctgagtattgatttcaggaaaattctattcgacattgtcaaagacttcatgtctctatggttctacaccaagatcgactaaggcaagtacgacaaatgttgacaaggctccgtcgcagactctacgcctactcgattactcgagaacggttgatggatctcgacaaggaatacggaatgaagagatggtgtacccgccgagataaaatttcttgacttcaatccaaattcccgattacagcaagacgggagacttagtcgtatgctctgtactttcttggttgacatcgaagattgactcagagaaaccctttaggtgcccgcacgaggctgataaaggaagtctaacgttatctccgaactcatcaagaacagtcacgagagctcgacaacagttcctacaagatctgcggttgagaatatgaacttgctcatttgcattgaagtcgggggctactgtcagggttatggataccatatacctaatagtagttgactaaatatgggcaggacccaccacataccatgtcctatatggaaacaacctgcggatataggaggagttccggat

SEQ ID NO: 24790 - DNA, 9003 bp, Oryza sativa
atatatatatatagacacacacacgtatgtatgcaaatgcatatgtacatgtacaaaatagacacacacacacaaacacacacacacacatatatatagatatatatatattaaagcacttaacattttatgtgcatatatgacctatatatatatttacactaaagtaaatgtgtacatatagaaaaatagacatgtattaactacaattcattatgtcctagctaactacgacttcgatgtagaagtcgttagctcagaagctaacgacttatgaattgtatttccatcgtagtagaattcaccctcgggatcaaggacttgttcgttgatgaatcctatgagttgttcttgaaccgccgcgataaattccttgtgtgtgaggttatccctcgtgcgaataacctatgaatgtatgaaattaattagtaaacaacaaatcgatacgtacgcaatgaaattttgaatttatttgtacgtacatcgagctctcttgtgggtgatgatttgggttgtaaggcagtggcaatactcgcatacatagtagccgcacaagttagttccctggtcttgctttgtacagtatatatacatcacaaacggcgagagatttaattaatatacacttatatttgagttggagattcaatataaatgtagagcatgtactcacagcaaatttaaacttccgcctaagtttttctttccaattgccgcagaccaaatgacagaactgataccaagccctacatggagtttaaagctatgattcgtagtagcaattaatagcaaaaatcgtaataacattggaacttatgacattacctgtctataagttcaaaaaccttgtcaaaagtagactcttttttatccattgagtcatagacattgactatgcaggcctccaagtcgaagagtaaaaggacccagtggaatctgcaatgtgcgtcgggtgcatgacatatgaaacacttagcatgtatgtacgggaatgaaattttttaggaagacagtaaaaactaactctgtgttgtacagcaatagtgtgaatgtcttgtaatgttgctccttcaggagatggatgagattgtcctctgtggcttgcggatatttgtcgatcatttcgacgtttactttccgagggtcgatgaatccactatcgaaaaccccccgccgtcgggccctttgaatctccattctacaatgataaaaggaattattatatatggtgtacttatatacaaggacctaattaattaaaggaaacgtaataagaaatctaaccaaacgatacttacaaaatccaacaactcagaagagagacgtcgagggcgtccagctggtatagttcgtagatacccttgaaattgatccggataatatcttctccttgcaagaagtccatgtgcctgatcctcgctccgatcatctctctaccggtggcgctcatttccatgtatagttgatggaatttgtacatctgtgtcggtagggactgcagctgctcaggcttgacaagcggtttaccgagttcgtactggtgtctcacttctgcctttgggattggtgcacctcgtagcaattgagccctagttagcccggtgtcagaaataaattcttttattccaatttcttcctcggtcaccaacggctcgacctcctggtttggttgctccccaagctgagggactggtttggactttctataatatgctttcttaagtgttcgctcatagtccgttagctttatggccttcttggctggtgcaaatatacccctgaagaagttcctggcactcgggtctataggaatcttcttttctggactccgaggcttcaattgcctcttcacttatgctgccacataagcgtcaagctcctcttgcgtgcaatcgtacggcggcggcttgttttctgcggtgtcaactttcgtcttctcgctgcccttgtgtgggcaggcggtggagcttggtgagaccttgacttggaaggtgccggacgaggagcttgaggaggagtcggcgcaggagcctgtggaggagtcaatgcagaagcttgagtaggaggagcctgaggaggagtcggtgtaggagcctgaggaggagatggtggagccggaggagatggtgcacgagatgccgcttgtcacccaaggaggatgatgtacctcttgcgccatagtataatggcgtggtttgtctctcgtagatgcgtctcaccgtctcctccagggtagtccaactcgaggtcctcgtacgcggcttccaccagctcaacttcgaccctcgagtatcctgctggaatcgacctgcagtggtaagtccctgaagggtccgttgggatggccattcccgacgccaccttcacgtgataagaggttatctattagtaatcaacctaagcagcaacttgcgaaatgtacaagtcaaaaatcataaaacaacgagcataccttgattgataagttcttgaagggaatatgcagctcacatggtgtccgctgcgtgatctcatcaacggggcatgtggtttcgtcctgagtttgcatggcgtccatgctctgtgatcctacctgccccgttgaggcgcagctgctacgattgcttgatgggctgaccattgtaggaggaatgtacggctagggatcctaggaccgatgtgcgttcatgtgttcatccaccttccttgccacctcctcttgcatgctgagctcgttgctcgatgccctatactcaagatctgcaatcttcacctcggtatctctcttgctcctcatcgaactcctgtacgtgtggatgtcctccttgaatccaatcttccaaggaaccacgcctttccctcgtgttcgtgctggatgctcgggagtctgcagagcgagtgacagctcgtccttctctctgtcgggttggaacgtgccctgagaaaaggcttccactgcgtccattagtcgactggcagcctcgcgtatctgatcgctgaagaccagggagccatcaactgggttaagtgttccaccgtgagcatagtaccagaacttcgatcgatctggccatttagcggtggccggttcgatacccctctcaatcaagcttgcctccatctcctcccacttcggcattgcgacgctatagccgcctgaccccaagtggtgatggtacttcttcttggcagcattttctttgtttctgtccatcatctcttgcccttgttgccctgtcttgtaagcaacgaactcgtcccagtgatcccttagcttcggtaatgtgttgaagttcagtgtctgccccttcaggatgtatttctggcagagatctcccttgaagctctgaaactgttctgccattttctttagagtccacattttcactatgttctctgtacccacaggaagggtgaacgtctcgagcattgtggtccacagcatctctttctccgaatcagggacaaatctgtcatgatctccgcgtgcccttctcctgcgccagtacaccgtactgacatgcacgttatccctcacaacccagtcgctgtgtcgtacgtaattcttggctgcttctgccggggcactaggtcggccgtcttcgtccacttcagttatgatgtgttgaccctctatcttcttcgcggcacctcgttgtccgcatgccctcttctgtacagcggagggttgacttccactagcctcctcctcctcgttcccctccgcatccctctctacgttcccctcctcgttcaagtacttgtttggatcctcgttcgactcttcttcgttccagtactggctgcttccctctgcgattgtatcgtatagtatctgttcgtcatcgcgatcagccatctgttcatacaagaaatatttgctaagtctataggtcatttttgctaagtgtaatattcatatgttaatactctaaaaatattatattagaactcaaataatcatatatgctaagtctaattaagtttcttatattacaactctaataatattaaatgctaagtctaataatcataaatgctaagtctaataatcacatatgctaagtctaataatctaataatcttatgttaaaactctaatggtcgtatattaaaactctaacaatcatatatgctaagtctaagtgtcgtatattggaactcaaataatcatatatgctaagtctaagtgtcgtatattagaactcaaataatcatatatgctaagtctaattaagtttcgtatattaaaactctaataatcgtatgttaaaactctaataatcttaaatgctaagtctaacactcacatatgctaagtctaataatctaataatcttatattaaaaatctaataatcttatcttaaaactctaacaatcatatatgctaagtctaagtgtcgtatattagaactctagataatcatatatgctaagtctaggtttcgtatattaaaactataataattgtatattaaaactttaacaatcatatatgctaagtctaactgtcgtatattagaactcaaataatcatatatgctaagtctaagtgtcgtatattagaactcaaataatcatatatgctaagtctaattaagtttcgtatattaaaactctaataatcttatattaaaactctaataatcttatattaaaactgtaataatcatatatgctaagtctaacactcacatatgctaagtctaataatctaataatcttatattaaaactctaatagtcataaatgctaagtctaacactcacatatgctaagtctaataatctaataatcttatattaaaaatctaataatcttatattaaaactctaacaatcatatatgctaagtctaagtgtcgtatattagaactctagataatcatatatgctaagtctaggtttcgtatattaaaactctaataatcttatattaaaactctaacaatcaaatatatgctaagtctaagtttcgtatattagcattctcgataatcatatctttacatcacttgcctgcccaaattccttcgagggctagctaccacttctgcttgagggacgacgacgacttcttttttgcaacatgcaaaaaaatgtattagtctaaacgcaaaggaacatatattttatgttcatgttttcaaatatataatcatatatatatgctaagtctaataatcgtttaattatctcgttcgtactcgtttcgttcgcgttcgttcacacgtttcgttcacgtgccttcacgtttcgttcgcgttcgttcacgtttcattcacgttcgttcacgttaagttcacgtttgttcacgttcgttcgcgttcgttcacgttcattcgcgttcggcattgacggggcggtagcggaacggcggggctgtggcgcggcggcgtggcgaggcgggggcggtggcgtggcagtggcgtcggcgtcgttggcagtggcggccgcatcgcggggtcggcaacgacgggccgggccgggtcagcgttacgtcgtcggcaatggcagccgcgtcgacgtcgggatcggcatcggaaggaggcggagtcggggtcgggttcggcgtggcgctacggcgttggcaggcatcgcaacaacgacggtgatgaggcggtggcagtttggagagagagagagatcgagagagagagagatagcaggcggcggtggcggctctcaccccagagatgcggcggcggcggcgacgacgatgatgacagcgagacgacggcggcgtcggcgcgggggatgccctaggtagtggcggcgaaggagaagccgagatcggagaaaaacttctaagtgttggtggagaagatgagggcgcaacgggaatatatataccccgagatctttagtcccgattgatgagaaaaaccgggactaaagattttttcccgctattttcaaattcttttttaactcggttagggttaagaaccgggactaaagataacagcactacatattaaatttcattacatatgggtttctaaaaaagtaaataatgcattaaaatgatttaaagtcacaaaattaatgacaaaaacttcaaaatatattgttgtctatagtaaatgaagtggataatatataataagcacatgaatgatttaaaattgttaaaagttctaataattaatcatatataattagcatatgcatgatttaaaattgttaaaaattttaattatcatatgtaaataccacatgcatggtttaaaattattaaaaattctaataatcatatataactagcatatgcatgatttaaaattgttaaaaattttaataatcatatgtaaacaccacatgaatgatttaaaattgttaaaaattctaataatcatctataataagcatatgcatgatttaaaacttttaaaaattctaattatcatatataactagcatatgcatgatttaaatttgttaaaaattctaataatcatacataattaacatatgccatacaacaattgatttatatggatattcaatacatccaaaatagtttatatcgtgtacacaacaattacggcaatacatcagcggtgacggttgaccgcacgtactttctcctcactagtgttccttccttgtgatcgctacgtgagtaaggggtgtctttatttgataggaggatgctagggtgaatcatcgccgtgaaagggggttgctcatcaaactgatcataatcctcgtcagtcttgtcctctactccgacgatttttcttttgcgtgggagaaccacgtggcgctttggctcgttaggccctttgcccttcttccctttgctagacatgtccttcacgtaaaaaacttgcgttacaacattggcaaggacaaaaggttcgtccgagtatccaaccttgttaaagtcaaccgttgtcatcccactgtcatcaatcattacgcctccaccagtcaacctaacccattggcaccggaacagagggaccttgagaggtccatagtcaagttcccatatgtcctcgatggcaccgtaatacgtgccagtggtaccatcgtgtcccacggcatcgatacaaacagcactgttctggttcgtgctcttaatgtcttgggctctcgtgtagaatgtgtacccattgatctcatatccctggaatgtcgcgatcgagccagatggtcccctcgccaggaaggccagttgttggttaatcgtctttttacccatgagatgttgtcacagccacgcggggaaagtatcaatgtgatgccgtgtaatccatgcatcggacttaccgatgtttctggcacgaactagagccaagtgctcctcaatgtaaggagccaccaatgaagattgttgcagaaccgtgaaatgggctttacggaataaattgttgtctaccatcattattgctttccttccgagagtcccctttccctgtagtctcccttcatggtgtgattcaggtaccccgattgggcgaaggtcttcaataaattctacgcagaattcaatgacctcgtctgttccataccccttggctatgcttgcctctggactagcacggttacgaacatacttcttcagaacacccatgtacctctcgaaaggaaacatgttgcgtaggtacacaggcccgagaataccgatctctttgacaaggtgacaaagcagatgcgtcattatattgaaaaattaaggtggaaatatcaactcaaaactgacaagacattgcactacatcattttgaagggcttctaatctatccagattgatgaccttctgcgaaattgcgttcattaaagcacatagctttgttattgttgcccggacattgtttggaaggataccccttattataactggtagcagttgtgtcatcaacacgtgatagtcaagagactttaggtttgtgaacttcttctctttcgtgcttattattcgctttatattcgtggagtatccaaatggtaccttgatgctctccaagcattcaaacatactttccttctttgccttgctaagagtgtagctggctggactcaagtaatggcttcctttctcctttggttccgggtgaaggtctgttgatgtacaacatgaggcctgggagatctgcttaactccagtacaggtccaaaacttgcctttgggtgtgtaagcatgccagttgatttgatcctgcaatcaacaagaaacaaagacaaagaaaccgcggttaaatccataaacgatagccggccggctaattgccaatgacatatcatttatctttgagcctgtgtcatatatgcgtcgatcggcagtcattaataagtaacaaagaactaaatctactcaatcagctgtagatatcaatggtatataatatttatgtcagtatatgcttaaatcaagtgattgggatagatcggtcgctatgccgagacagtataaatcacttagatcgaaatatatatgaataatgagattatatgtgttcatagcatagccgatcagatagatctagtatgtatcggctaatactccgatactactctatattaagatattaaagctagaagaatataccaaacagaaagcctaatatatttgaatgcaacaagatcttaacataaagggcatacttaacatgtcaataaagtgtataagataaagggcatactactctaatcagcaaccaaagacaggctagagattgagattctaatcacgactcataagttcaaactcaactgatgcagctataagtatgaaaagaaggacaatatatagacaatcaagccgttggatgtgtcacagagtggtggatatcctatataatctagagaaaattccttgtgtacacctcaaaactctctcagtcccttctatgcacctgaaaaatactgaatcccttgtgtgtccttgaaagtttgtttggaacccttgcatgcccctctcgtcaagtctctgtcagccccagttccttcggaaatggtaagatctttgacgcagtctaaatattaatttgcttagaaatgtccattataccctt

SEQ ID NO: 24791 - DNA, 2261 bp, Oryza sativa
cagcaagaaatcgacgatgacccatgtagacaaccttcctacagtgcttaagatacgtactttctgtttcatccatacagtgagtgcaagccttgtaccccttgttagactgcccggataggttgctaagtgcaagtcaatcgttgatggttacgaacagcaacgatcgtaggttaaactcctcctgtttgtcctcgttccacacggggacaccttccttcttccacaacagtttaagatcttcgaccagtggtcttaggtacacatcgatgtcgttaccaggttgcttggggccttgaataataatcggcatcattatgtacttcctcttcatgcatagccaaggggggaggttgtagatacacatcgtaacgggccaagtgctttggccgctgcttatctctccaaaaggattcatgccatccgtacttaaaccaaaccgtatgtttcgtgtgtcctatcaaaagtctttaaattttctgtcgatgtttcgccactgcgaaccatcggcagggtgtctcagcatcccgtcctgttgacgttcttcagcgtgccaacgcgtcattctagcattccccttattcctgaacaaacgacttagccgtggttttatagggaaataccatatcaccttagcaggaattctcttctttgttggctgcccgtcaacttcacctagatcatctcgtctaatcttgtatcgtagtgctttacaaacagggcatgcttctaggttctcgcactcctcaccgcgatataggatacaatcattcggacatgtgtgaatcttctgaacttccagtcctagagggcaaactatcttcttagcctcgtacgttgtcttaggcaatttgtttctctccagaagaatgttcttgacgagttacaataaatcgccaaatgccttgtcactaacaccattttttgccttctattgcaagaactccagagtggtatccaactttttgtgcccctgctcgcaacctgggtacaacgacattctgtggtcatctaacatatgctccaatttatgggcctccttttcactttcacactcctccttggcgtcctacaacatctgaccaagatcatccgcagcgtcattatcgtcagcatccctgtccacctcgcccatttgatttccttcaaatgcagcgtactgagcccagtcgggaatgttcccgtcctccgcttcatcttcttccatttcaaccccttgcttaccgtgggatgtccaacaattatagcttggcatgaacctcgactcaaacaagtggaaatgaatagttctggatgtagaatactccatcttgttcttacacttgttgcatggacaacaaataaaaccgctacgcttgttagcttcggccactctaaaaaaataatgcacaccgttgataaactctttggactgccggtcagcgtacatccattgctgatccatctacatgaaatgaaaaaaaatcgtacataaataaattttcgtacaattttgacagtggaacaataatgataaaatatttaaaaactctttcgacaagcatacaataatgacatatcattactcatacaattaataattataaaataatccaacaaacaattcttattaactatttttgaagttctaaactaatattaatgttgtacttctcttaattttcaatttagtttgttttctattttttaagattaattttcattatattttaaactatgagaataaaacttttttaagtaaaaaaacaaaatttctatatattcttcttccccatataaattttctctctcatcaacttacaacaaagttttggagaaacaaaaatgtgtgaaacatagctccaaaagtaatataacaacaaaaaacattggaggatgaagttactaaccttttagacacctccgacttgtatataatcactaaaaaaatttcacaagaaattttggcatgacctcccctctttttttgagaaattttaaagcttgctcgggctggaggaggaagaatacatatataaagggggggatttttagtcccggttggtgttaccaaccggaactaaagatcacatatgcccgttgtagccaccagccgggactaaagatcacctttagacccggtttttagtggaaccgggactattgtggatttcggccgaccgaccaaagatggtttctccaccagtagttcatgaattcacccaccactattcaaattatggtgccaataaatattactcactccgtccctaaatataagg

SEQ ID NO: 24792 - DNA, 11975 bp, Oryza sativa
gtgtgatggcacttttgtgcctggtaattctgaacttttgtgaaccattatgtgtgcaaggaagctagacgtactcttgttgtccataggccgtgtttagttgccgtccaaatttttttttttgacgtttcgttacacacaatcgaagtattaaacgtagacaaataataaaacaaattacagattttgactataaactgcgagacgaatcttttgagcctaattaattcgttattagcacatgtggattactgtaacacttatggctaatcatggcgtaattaggctcaaaagattcgtcttgcaatttacagtcggactgtgcaattgtttattttttgtccacatttgatgctctatacatgtgtccaaacatttgatgtgacggaaaaattggaattttaaagaaaaaagttggaatctaaacacagcctatgttgatatgttgatctgaatttatatgttgaatttatatcacttaagaagtatataatcatgtgaacaaagtctctgatacaacaaaataaaaagctgaagaaacatcaatggtccatccccaaccttcaattgtgttgatgcttcttacacatgctccctctcatagctccggcttggggattacttcgcaagttgcaaacatgttcaggaaagtgaaaaattctgtgatacaagtgaatctggcaatcgcggctgctttaaaatctcatctcataatgaaaactaccatggtggtccgcgcagattacgcggctagcatcattatattttctctcatataatagcatatatgttttctcattatattattcaaatatattgaaatgacaacataattttaaattttacaataactttacaaaactacaaaactactaatgtgtaatattcatattatattttatatacgtgttagttattaattatttttaatatcaaattttagttagttgtaaattatatatattcctatatagactctagactcgtcttttaatatttctttttttttaattctgaattttctgtaaattgtatttctatataaactctatgctcttccttcaatattatttatttttatttctaaatttttattatttctaattgtatttctatgtggactctaaactcatctttcaatattctttaatttttaatttcaaattttagttacttctaaattgtattcctatatttgtattcctatattgaccttaaactcttcttcccatgtttttcttaatttcaaattttagttatttataaattatatttttatacagactctaaactctaattttaattttattatgtttattccaaattttagttagttttaaattcctatatcgactctatactctacttctaatattccttattttttaattccgaatttctatttttttcttaattatatttctatatggactctatactctacttctaatattccttatttttaattacaaatttatattatttcctaattgtatttctatatggactctatactgtggacccccgtttttataacaggaatcaatcgtgtaaacagtaccatttccctggatcaagtagtctggtacacacgaattcatagctgaaataccaaatgcacatacacgaatgtctagtacgaattattacatcataagcccgcaggcatagtcttaaatcatcggaccgagcggtccggaatacatccaaaagcagaaacaggtaaggcagcggaatttaggcagcggcatgccattgccacaggcaacgaccgtactaagacctactgggcgccatcgtcttcatctcccttctggtagtaggcatagggatcctccgaagcttcatctcccgcttctaattaattttatatttgcaagggtgagtaccaaccgtactcagcaagccaccacagcaatgatgcacatgacagaggaattcaaaggatggctatggttcgtttgcgcaaagcaagttttgtaattcttttcacaagcctaagacctagcatagactgatcaagttttaataccattgttcatattaaacaatgacggttctgtccaccatccattgtgatcccaaggatagcttcccgccattgagtcgttatgattttctgaggacgtccatattcccgcctctcaggagtggctccatgagcataaaaatcatcatgccatattccatcccacacaagttaagaatttagagtctagccaagtgtaatacatgtcccggtgctcattaaccgcgagcacggctattcgaatagatttggtttactcacactgcagtggatgtacactttacccgtactccgcgactacccaacacatgagcctcgtcccaacacatgagacgcgtcacggcaaagcttttcgataaccttgtattggcagtacccgctccatgaactttacatcctcatgcactccaggtgtacacggtttctagcagtgagaggagttctggcgcacccgggagggaaagactcacatgcattaagttataattatgtttaaattctcacatggcagtcctaccaatggcgacaccactatagacacccgtctcgcggttctacctatggctgccccaccgtagagcccctgcctcacacatcaagaaaccactatgcatggatactgcctccgctcagccatctactccgctaggtctatacccatacgagaagcggggttgtacgggggtcgtttcatgcttaacttcatggctcggtccctaattgaccagggacggcattagccttttccggataccacccaaatcctccgtccgccccagtcgaaaatagttgtttagttttatttctcttttcacaaatcatgtcatcaatatcatggcaatgtggcgctcatgtctccacatgcggcatctcaattaccttcccaaaggtaattgcccaagcataaagcattttgataaatatgagtatgcatgattctagaatagcatttctaagcaattgtcatagttgactagggactcatacgtaaacatggttacgaaggaataaggggtaaacaataatcaaggcatggcataatcacaagtaggatgttcatcattgcatgcaattttattcgtaaacaaaacaatttcacaattgggatcaacatgttcaaggaatagtgatgacttgccttgctcgaggtcttgcgggtcttggccttcacccggatccgcggctccctcggtctctatagttacgtgcgtaagaacaatttgaattcgattagaattcaaacaaaatccaaataatgaccgaattgaaaaacgagcgtgggaggtgaattctatataggctactttattcgcgaagtggaattattcttcttcctaagatattttgtgatttatagtcatgtcctaagactcatcgaattattgagttcttaattacatataaattagtaccgcgaaattgatttcttatggagattactaaaaataatctataatctataggaattcatctaattatattctcattaatcctataattaaatgctagtattttaggtatttaattagtaagaattcatctaacaatatgttcattaagcctatgattaaattctaatatttttaaatattttaaaatttctcttaaatttttcctttcctttctctccctctttcttttcttttctcttttccctttttcctttcctctctttctttttctctctctctctccccctttttcctctcctctctttctttttctctctctctctgccggcctctcttttcctctccctctctctcggctctctcccacccgagcggcggcggcggtggacgcgacgggaacggagggcggctcaccggcggcggcagcggcgacgacggaggtggcgatggtggcgcacggcggcgcgggagcggcggcacggcggcacgggaacggcggcgcggcggcacgggaacggcggcgcagcagcacgaaggcggcggtgtggcagcactacggcggcggcgcggtgaaaagggaggagatggaggggaatgggtgtgggggagaagagaagggctgggggttttatagggtgtgagagagggaagagagagggggcggtgaaggggggtgatgcgacggcggcgcggcagcgcggggcgcgaggcggcaatgggacgcgcgcggcgacgggacgtgcgcggcgatgggacggcgcggcgcgacggcgatgggacggcgcggcgcgacggcgatggcgacggcggcgtagggctcgaggcggcgacggcaacggcacgtggcgacggcgacggtgatggcgacggtgcgcggcgcagcggcgggcgatgggacgcgcgcgcgacgggacgggtggtgacagggcggcagcggtggcgcgcggcgtgaggcgggtcgcgatggcaacggcgacagcgccgcagcggcggcacagggcgcaaggcgacgtgacgtgtcacatcctgatttttgtttcaggatttataaattatctaataaattattattagaatttatattaaatgttctttaatttacaagtaaagttaaatgtgggaaataaaatttcctaaatttaaagcatggatggatttaattttcattaaattctccatgattaattatactctctgaaattttctcggatttttcggagctcaattcctaaatgatacaaagaacagttcagtaattatttaatcattaatgatctaattataattatgttaagtgcttttcttgtttaaaaaaatccttaatttataaattgttgtctaaaagggaattattagaaatgatcttaaaagcctaaaagagaagatctaattaataaattccaatataaaatggggccagataaaatttcattaaatactttgcttaattctataattcctagatttttctgggatttatttgagtaaaggaagtatttttaataaatggaattgcatttcatgaataatttaaattgaaaaaggtttttaaaagtctcttttggctttgggccgaaagtcggcccaaaaccttctctccctttccctcggcccagtcggcccagtccgcagcagcagctgcccgcgcgagcgctctcggtcgctgacaggtgggtcccacctgtcggacccgtcgtcttcctccggccgcccgtcgcccgaaccctagcgccgcgccgccgccgtctctttccaaattcggccgcgcctttccttctccggtgaaatcaattgagggtaatgtttcccgagatctcctctaccttttcccttttggaaacatcgtctaaatcgctttggaaattcgtggattcgagttcgattcggatcgatctctctcctccgaaccctaaaccttccatcgcgttgccggtcgccgtgggccttcgccgtcacctcttagcccctataaaaggacccccggtgtctccgctacccgtcgccacctttgccttcgtctctcgccgtcggtagcgccctagcaccgtgagacctcgcgccgccgtcgtcaccgtcgctccagccgtgcgtcgccgtcactccagtcgtcgccgtcgctcaggaaggccgccgtcgtggtcgccgtcctcgtccgcccctccgtcgttgctatagaccgccggagcaccgccgtcgtcgtcaaggcgatcttctccgccgccttttccacgacgccgtcgccgtccgttgatcttccgccgccattttggtcaccggtgagttcgccgcgtcgccctctatgtgctgtgtcctccgtttgtgccgtcgcgccgtcgttcgccggcgagcttgcacgctcgagccgccgccggtggtgacgtcaccgctgacgtcatcgtcgtcgtccatccgtgagccacggtggatccgatcgatcttggccgtccgttttggataggatcgatctcggccattcgtttccgtgagccgccgctgtgcacccggtccaccgtgaaccctagccgctgacgcaataatcctcttttccttttcaagaataattcattattgcgtcataattccattaaaacccatataagtgttttaatccgatttaatctttaaaaattcataactaattcatcttagctcggatttagttggttcaagtctctaaatttttctaaaattgagatctacatgttaaaaatatccacatgaactgttcatgcttgtttatgtgctgttttggtgttttgctcctttctgtttagattccgacgtttccggagagtccattttcgcaggagaagaatttgaagagttccaaggccagcaaggcaagtcacacagatcccaaacaaccctttgagcatgttgatcccgtttaaagctattgtttctattcaactattgcatttattttcgaatgtcattgggtggaattaacctactgtttgtttatagcccttttgtttttgattactttattctttgataccttgggttatgataacttgactagttaggctttatatattggttcagctagatattagatatgattgcttagccatgcttagaaacattagcacactattgggataattaatgtttcactattatttaatgatggcttaatgatagctcacgatggccaatcgtgattggttaattaattacttgccaactaaaacttgataatggtgggttgtgagcacatggttttgagagtcgtgctcatgacaattaaggaccggttcacgattttcggttgtgaaatattaaccgtgccaaccacaagccagcgtgggcaacggctttaccttttgtatagcatggttcattgcggagcaccagactgagaagtggcggagataagcccacgggggtcgctggggagtccatgccttgtttataagggggtgactatgatccgggaacggtgcactgtggtggattgtgttgtgcgaggggtaatgtcacagctcctttccgaggtaccgtggtggtattgaggcacatggtgacatgttgtggggctgtgtcttgtgggtacagtggtacacctctggccagagtaaaactataaaaatagccgtgcccgcagtcatgggtgggtctaacaatgtctttcgtggttagtctcacacttctcaccataataaatgatgatataattggtaataatttgtttagctcctggtttggagatagatctgtgcagccgggtatggttgttcaggatggttgggcctgtgcagcatgggtgtgctgttcagtgttgattaaaatttctgattaattactccactgttttacttctcttaaatgttttgctaaatgctgcttttgcaattgagcctatattatgccatcctttggtatccttgtgcacttgcatatttgctgtgtggcttgcttagtatgtcatatgctcaccttgcaataatcaatcaaacctcagttgaagacaagttgcgaaggagaagacgtttggcttatactccagttgagctgcctgtgggagtggagctgaagccatcgctagaccgttattccgctgctgttttcttttcttttgtaagtgtgtaacgttatttttatgatggatttgaatattaaattgtcagtttgtgtacctcggctgattcctggacgaggattttatgcacaaataagttcggaaattactagtgaatttccgggcgtgacatgacgggcgagcggcgacggcaacggccgaaggcgacggcggtagcggtggtgcgcggcgcgaggcgtggggcgcgggcgcggcgtcggcgcggcagcggggcagggttaggctaggggacctcgtcgaacacctggcggccgatgaatagtgccgttttctatttacccgatttaagcctatttatttatttaaaattgattctataaacctaaattttgtacaaatgaagttcactcaatatttgtgttattccaaccaatgggtccatccttgattaattttacccatattttatttttatataattttcttgaatttaattagagttaattcttattccgatactttcaaatttaattgatacaaatatagtcgtaataatattttactcatttctatcctcaccaaatattattttaatttgcactttaattatttacttagtcaatttactttttagggtttattcctaactaattatccattattcgcgattcataaactccgaaatcagaatccaataaaataatcgaacaaaatcggcatgatgcaattttatttaaaaagtttttgaaggctcatatttttgggactttgatttttgttggtcgaattttcagggtgttacatatactctacttctaatattccttatttttaattacaaatttatattattttctaattgtatttctatatggactatatactatatttctaatatttcttatatttaattctgaatttcaggtattttctaattgtatttctatatgaactctagtctcatcttttaatattccttattttttaattccgaatttcagttatttcctaattatatttctagatggactctagtctcctcttctaatattccttattttttaattccgaatttcaactatttcctaattgtatttctatattgactctagtctcctcttctaatatttcttattttttaattctgaatttcagttatttcctaattgtatttctatatggattctgctttttctttttcttcgattaatgtgagaatttctaggccatgagagcgaacgtgaaggctcttttttctattcctttaataatataatagatattctagcaattaaagaatatatatcatgatgatttatgagcatgcttgtggacattcatggataaattagtaattaatactactccctccattccaaaatataaggcacaaccacccttaacccaaagactaagaaataattattatcaccttgtagtttggatcatcctaataaatgtaatgcatgcatccaatagagttagagaatgtgagagtgaaggatttaaaaaagtagtaatttaatggagaattgtcatagttaatggcatgcatgcatgtatgccttcttatattatggaacatcttaaaaaaaagtggttatgccttatattatgaaatggagggagtattgagttagtaactatatggaactgctcccaaaaaaaacaactcaggaactgagtttctaattcagaaatgttccctcaaatgaaaactcaggaactgtgtcaacgatcctaaaatcgtgagtattttcttttcaaacaatacttttagatttttagaaatataccataacagatattaacagtcaaaatagtattttatacatactctgaagttcagagattcagttagaactgtattttgttcaaataatacagtattataatagctagcacattacatcttcagaattaatatattgcatccagcccgaatcaaaattcagcatccatccatatcaaattgacatccaataaatcgaattggaacttgtatacaacgctatatgcaatctagcagcagtagcagtagcaggttcctcttcttatcaacaacgaagaaatcaaattcgatttggagcaaacgcacaagaaccatgataatcgaaaataaataccagctgttcagttggaggaggaggtcaacgcggatgtggacgcggtcgtcagggcagaagaaatcggcgtggccgtggtcgatagggaggagatcggcgcagatgcgcgtggtcgccagcaaggagtcagttggcacggccgtggtggctagacagagatcagcgacggcgggaataccaggggcggaggatggcaggataatcgaggtcaccgacggcgagataaaacggcggcggcaggatgaacgccggctaatcgaaatgggtgccaccaccggaatcgggctgtacaggaacggacggcggatggatgcggcgagatggtcggagcaatacgagactaaaacaaaaggaaaatacaaatacccaaattacccttaagcacatagtttgtaagtactaatatgcccttccaaatggatggttcagatcgtttctatttgtagtataatactaccagtagaaagcaccgtagacaagctctacgaaattacaatggtacgtggatccaacggtcttcagtgtgtagaaaatggcatgtctgatacaaatgaagaattataacggcatatttccaattaagtgaattgggatgatattttttaaaactggcaaatttataatgacgtggatccaattaactttttatttatctactaatacttcaatcaaatatctagtcgcgccaaatccacctccatggcggcaaatcacattcctttagcaaattaccggcgccaaattttcattaaggcgccaaatcattgcatatggcgccaaagccctctcacggcacacctaatatctcctcaaattcctcctccctgcccctttgccaatttttttgcttccttctctgtcgatctgttgcacaaaagtcaaatttcacccattattggttgtctaaacttacagtatgatatgaatcgctgctgatgttaggaacatttgtttattctttgtttaaaacatgccttaaacttgattttgtttgtgaagattttgtctcagttatatgaaatgcttgaatttttgtatgctcgaagtttataaatcttaatggtatgatggacatatcgactggcaattttccgccatatgttggacttatctgacgtatataatacggcaaatactgaatgtgtccaaagtatataaatctgaatggttacatggacatattttctaacatatgttggacatatctgaagtatataaaactgagaatgaaatgtccgctgtatgtaaattttgaggtttgaatgagcatatttgtctcatccatgatttgcctttgtaattgggtatttttcaatacaagtttgttccaaagtatgtcaatgtggggtcatagtgcttgtatacatgtattcagtactgatgatcgatttatgacttatcagcaggagaatgtatacagttctagtttcctgagcaatcactgggtataattagttttctatatcaattgataggattatgtactattgaattgaagaatggttcttaagtatgctgttgcagtagtttacataactattaggtgatgatttaccaccccttttgtgcatactgtacatgtaaacttttgatggtcatgccttgtattaaaaggttaattcctgtcatggaagcatattttcgtcttatctaccggtgttagctttgtttgcagaatttattcatgggacgctacttttttaatttaattctaaacactaatcatgagatctctcttttaagatattgattttgtttgcagctaggaatcagagcacataggccgagcacatcatacagtccacaaagttagaaatatgggagaagccaggttatgaagttgacaggaaattgtgatatttgtacaggaaaatatatgcgagttttcctggaccttgactaataaaccaacaaaaatgcattttcattctaaagaatgatgcaattgtgctaaatattttctactatgcagatatttcttgcctatccataatttgtgttgactcgcagcagtatgtagtttggtattatgtcattcagaagaatgactgggccaagaggccgatctgaccggggggcattggagaagagtgggaaaattgagagtagcacgagagttttcacttcgactaaaaatatcaagaatcattgcttggctcttgaaaaacaaccacagccgacgtggatacctactggcttatctcgctctcaaaagaggaggatacaacgtcttcgggccatagatcaaaaagaaaataaggccgaagatgtagagaacaaaacatgtaataatttagaacctcaaacagcacctaagcaaatgtggagacctaaagaagtaaaagttaagagaccggtgattt

SEQ ID NO: 24793 - DNA, 10469 bp, Oryza sativa
atattatacatacatgttgcaaatgccagttctaagtagtggaattggtaagttggtatacaatttgtttaaagtatgatttggctcatgagttctggatatttattcaaagccaaatcatatttgtttttatggatcaccatagaagatatagatttcatagttattgcaccatgaaagctttggttattagtaattcggctaatgtcaaccgtcaatgtgatgatttgttctagagttgttttctttaggaacattggcattgttaatattttgcaagccataacaaatgaaaaaagataaagactcacaaggactaccaggcccaaagaccgtatccttgtcccctcgatccattgccgcccgcgcgctacttagcctcgatagttcggtgtcgcgcaggcatatgtacaacagctagggatgaaactggttcggatagtttccgtccgtccggaccatttttcggattcggatagtttcggtcggaactattcggaaattctcggattctgaaacgaattcggattttttttctcgaagacgaaaacgaatacaataagggtactatccgtcggaattggaaaatggtcggaaactatctggaatttttttatatcagcagacattgagcaaattttagaaaaaacacgtagatatatataatttttttatacggaatcagatgaagacaaactttatatcaacatttgtagagttccatgagatctacaactttcttatttactattttattatttaaggtcatttaagtgtctaaatattcattataatataccatattaatttttacaaaatctcagatctacaattcaaacgacatctgatggagatgtgtttcataccaaagttgtagagctcaacgggatctaccactttgtagtttataacatttgtatttgaaagcatttaaagcataaaacaaatatttcaagtttcgaagatgtgaagtaaaataaataacatctccaatttatacaatggcaagtaagttatacatctagtaaaacgtcttgagaatagaaaatgataatcatatttgcatatgaatctcttagaggaacaaccatgaaaattgattttcacatacggttgtgagaccgtctataaaattaaattgacgatataaatgttggagatgttgaactacaataataataagtgatatctcttccttgatcaagaaattcaatttgaggggctttttatataccggtaaatattcactaccgtattcgttccgtctcgtattcgctccgtatctgtattcgataatattcgattttatttccgtatccgagttttcgattccgattctgattcccaaaaaaaagtatgaaaacgaatatgataaagctagtttccatccatttccgatccgttttcacaacagcaaatcaattcctaatctccgttggatcgcatcagcaagaaaccaacaatgcagcaaaagggagtatgtccgtgtgcatccatcagttcgtgagacgttcactgtgccattacatttcccgactttatttttcttctctaagtttcaaattcatgttataaacacgcaggaatttatttgtttatttcatcaatcctcatcgtgtcttcttaaatgtatgattttggttatgaaataggagtttatttattcaattcaccaatccatattaagtgaagatatatactttgattctatagtttagatctcttgtcttaccaggggcggcagcaacttattactgggcaatttggctctcatgaatttggatcaaggaatgatgtggtttttgatagcaaaattatttcttctcctttgcaggttattttcttgattacacattggctccgatcgtgggttattctctagaaaccaaatttgtaggattttgtcacttcggcttgtctatatttggagcaagtggtcaaggagtttttttaccccggcaaatgggtggtgacctagtttttgggttgttgggcattgatcttccacattggttttttctcttattttgagtgtattgaagtttgttggttgtgtacgctgtcatggtgcagaggccgagagtattctctgaatgactaatctctataaagttttcattaccttaaaaaaaaaactttgattctacagtgtttttaaaaatttagggccatgttatgtgattcgcacacgggtctctaattcctacgtctttccacatgcacggcgaatagactccaggtgcttgcaacgtcattggctcatctccaggttcgttcatataatgcaggtggtttggagtcttatatcccaagtcttcttattttaaagatgatgaagaagaagaaggcttaattaagaccgcgctgaagagacgatgttaattcccacgggcacgtatattagatatagactctattagaaagactgcaacgccaggtgccaacctctagtctctaggttccttgacataatggcacattgtgggagtcttttatattccaagtcttgtttttttaaaaagaagaagaaaattagatgtgtccaagccatcgagaagacgtatcaacgcatttccacattttcatagaataaactccattacaaggacggtaacataaggcgctcgcctgtccttcacttgatggtgaatggtagtctttgtatctaagtctttttcttaaaaaagaaagatcgaaacgaagataaaatagatggatccaagactgctgaggagaaataatgccaacttattccacgggagcctcgaatagaatccattacaagaatggcaatgtcaggtgctcaaccattcaggtcttcaatttggtggtgcctactcgttccgtaccaaaataaatcaacgtgtaataagatgtgacctaatctaataaaacgggacggaacaagtaattcggagtgtttgtattgaagtctctattttattattaagaaagacaaataggtggttccagcgcattcccacaggcacgtcgaaaatactccattacaagtagggatgaaactagttcagatagtttccgtccgtccggaccaatttatggattcggaaaaattcggtcggaactatccggaatttctcggattcgaaaacgaattcggatttttttttctcggatacgaaaacgaatacagtaagggtgatattcgacggaatcggaaaacggtcggaaactatccgggatttttcattggatatccagagatatttttcaaaaaaaaaaacaacaacaaaaaaaaaacccagaaaccctagccggctagccggccgcgccagctgcatgctgcagccatccgtcaccgcgcgagcctgcctgctgccgccgccgccgtccgctgcgcgagctcgcccgccgccgccggccgcgggagcccgccgcggctcccacccaccgacgccgccgcggcgcgagccgccgctcgagctcgcccgccgccgccggccgtgggagcccgccgagggtcccactgccgccgccgccgcccgtcgccgcctgccccgcctcgcgagcccgcgcgccgctcttggccggtcgccgcctgccgcgccccgcgccgctcttggctggccgccgccgccctgtgcctgtggatgagaggaagtgaaagagagagagagtagaaagtgtgtgtgagagagagaggagaggaagagtcaagaggataaggttgggggtgaaaaaaatggtggattttttttcaatgtaaaaatcaatttttattttatatgtggctctttaaaacgaatttaaaggcactaaatcaactcatataaaaaagttgttaaaaataaagttgtataacttattgagatctattatttttattttggtcatttctccatccgagtttgattaaactatataaaatttgaatttaaaaatataagaaattcaaataattttccaggttgtaaatgatttcaaatgaaaaaattgtcaacaacaaagttgtataacacatcaacatctacaacttttgttttggtcatttttctatatgactttgtttgaaccgtttgaatttgaatttcaaaatatgacaacttcaaataatattttgaaatactaaataatttcaactgaaaaagtcatcaacaacaaagttgtataactcattaagatctataacttttattttggtcatttcttcatccgacaaagtgattataacattgtacacaaaatttgcatttatctcatttggtttattaaactataagagagatatgtaaactttgtgaaaaatattattatcaatttatcggatgaagaaatgaccaaaataaaagttgtatgtcttgatgagctctgcaactttcatgttcgtgtacaggtgaaattaattacatcttcaaaatattatttgaagttttgaaattcaaatttttaattgataaaacaaagtcacaagaaaaaatggccaaaataatagcagcaagaacacaataacatgatagagtatgattttagaaacatttagaaaaaagaatcatctaatttggagttcatatgagtgagataaattagtttcaaatttccaaattttatttctgcatacggcttcttaagtcacccgtatgggaaaattgatttttttcatgcgggtccttaaatggtccacatacaaacaaatgaaaaaattcaattctgaaaaataaccaatcaaatatttaaaaactttcaattgaaatgttcaacccaaaatttaaaatattcaaccaattttcaaaaatttcaatgtgcctatgaaaattttagtgatacacattaatttatttgtttcatgataacataaatttatatggaaagtaaacataacattttctatctcctccttgccattataaatagagataaaatttaaaaatactgatgttttgtttttgaaaactaatggctacatatcttcctcgttttaagaagcttattttgaggggtattatattttgataattattcgttaccgtattcgtttcgattcgtattcgctccgtatttgtattcgataataatcgattccgttttcatatcgggtttccgattctgatttcgattccaataaaaaaaatgaaaacgaatgatagagctagcttccgaccgtattcgatccgttttcatccctaattacaaggatggcagcttcgttcactcatggaccactaaactatgatgcctggttcaatgtctttttatatccatctcttttttttttagaaaggagaaaaaaaacaacaaggttgtacgggtgctgaggaggggcatcaacgcgttcccaaaggtgcaccgaatagatcgtctctaattacaacgcgcacacatgtctgtttgcccggtagcatgtgacaagcatcgactatgaagcaatcttattgaaactggataaaagggtggaaggatttctcctgcaaacataatcccaactcaaacactatttcgtagttcccatacttaccatgtcatacaaacactctttatacaaactatatgtgtcaaaggtttggtttcctcacaataaactcatccaatcacctctcttctctcatcatttctctctcttctaattatctatcttgtcaacttattttttttacagcttatttaatgctacaaaaactagctaggtatatggctggaactaccctgacaaacctcaccacctccatgcccttcactggcaccaccaaaccacttgttggatgacattaaaggcaaaataaacttcgttaatctgctttgaaattttaatgtgtcaaaaaaaatccatactttgaaattttgttttaagcttttaaccggaaaactattttaaccccacaagaggatgttccttcatttgtcttaaaaaaatcatccaaatagttatgcagaattttgaaaaaagaaatataacattcatacttacaacatatatctgctgaattctttttctatctcattgtgttggtcaaatttgatattaattctggcggactgctacatttcccttcatttgtcttaaaaaaatcatccaaatagttatgcagaattttgaaaaaaataaatataacattcatacttacaacatatatctgctgaattctttttctatctcattgtgttggtcaaatttgaaattaattctggcggactgctacatttcattatactctacattatcaaaaataatatttttcaataactattcatatggaatttggaagaaaaatatacatgagagaacattcctcggagatattagaatctattccaaatatgatcatatatatactaaaaatttaaatgttcatgacagtaattcgaattggattgcattaagtgcttactttatgggcaacaacatctctttacaccactacggaaaggctcatcactcccggtttgcaacccattttactcccggtttgcaaaccgggacacctaatccgggactaaagttatctatctttagtctcggctaaaataacagggagtaaagatggatttttaagtcccggttggtaagatggcggcaccattagtccggttggttagtttttttttctttttgttgttatttttctgctcgcatttattgtcacccttaaatgccccacaaatcattcacaacaaatcatacacaattgcctatccataaaatcatccacactccacaagtcattcataaaatcatccccaaatctaaaataatccataacaaagtttataaatcattcaaaaaaatctaaaataaactcaaaaaacacaaccctgccgccgccgcccggtggcctcccctcccgccggatatggaggaggggaggccgcccggccgtgcgccgcatcgctcccatcccgccgccgctgccgctacgaccgcccggccaccgccggaggggaggccgccacccgcagctcatgcgtggccgcggccgtgcgccgcctcctcgcagccgccacccggcctacgcccgccgtcgccggagtgggaggagtggggagggggaggagaggggaagcggccggaggaaggggaggagagagggggagggggaggaggtagaggagaaaatgagaagggagaagtagaggacgagttcgatgggaggagcagaggaggaggggatcggataaggactgctggaagcgcgcgcgagtctctggggagtttttcgattttttttattttgggtttcggttggtacaaacaaccgggactaaagatgataggggttggtaacaccaactgggaataaaaatcacaaaagtacatgtaggttttcaaaccgggattaaagttatttttagttccggtttttactcaaaccgggactaatgtgatttttgtgtgacctagtaaagatcatttctccagtagcgttattaggcaggttcatgaattcccttattttattttttttacgatatattacccccaaatgaggtaagacgaatgtcattcatatatacaatactagtaatattagtatcatggtatatattatggacggtgtgaaacaagttgggatgagcatcataaaagattctcaaaggcaatatataaggagaccatcagccagcttctgagcaatactaattaactctcaaatccctcgcgcacacacacacgcagacagagagagagagagagagagatggcgttatttggggtaagagagatgagacgatttgagagaatgacgccggaaaggcgagctgaatatctactaggcatggccggtgtcgtgacgttggtaacgtcgatcctcctcctgttaagcggcagcacctatgggtacggccctaaggtttgcaccggccgtggcgtcttctttagccccacgatcgctctcggcctcctgctgatggccgccttcattttgggtacgtgcggccagaggtacggtgatgagtgcctctttggttgctacctcctcggtctcctcatcgccttccccctcctccttgccttcataatcttcggctacgtcgctgttggaggcatcgacctcggcggcgtaagtattcgcgagtacaatctggaggagtacagcgggtggctcaggggccgtgtggccgacccgcactactgggaaacaaccagcgcatgcctacgcgacgggaacgtctgcagcggcatgacgcggttggtacgcgacccagacaccggcatattcgtccctgagttatcccggtatgaaaggtggctcaaggaacatgggattaaaaaaggcgtgcacgtaatgtcgcctatcgaggtatgtacgtagcagctagcttcgatataattgatggatgatatccccgagcccaagctcaggtgtaacttcggtattagcctatgtatgtccaaccttagtgtacaaaacttgatttattttgaaagggagagggtagtatcttctttgacgtatgggccggtccacctttgaaaccacatgaatgcaaccgcgtgcgtggtgacggttttttgtttaggtccgacaaagatgaccaccatcgatgacggctctaacacatatgagtttccacatcgctgaccactaaaccgctaccagaccgtctgacatagatgagggttcccgccagacagaaatgacttgattcgcactagcgcactcgggatgaagcggtgcaccactttgttttagggagttcaaaagacttccagcttagtatacgtacgttgtgctaggttaattatagcttgcatttcattttttttctttcctttcctattccctgctttattttttcagtgatgatgatatattttgttcaatacttctttatttatgagcaattctacggttcttaggaaggtaccatgagatagcaaaatttacacttaaatttcggtacctcacagtacctagataccatgagttaccaaatttacaatagaaaaaatggtatttcatggtatctcctcaaggactttaaaattgctctttatttattcatttcgatatttcacttaattggaacctcgccttataactgaatatatatatgctgcacttggcagtctggatgctgcaagccaccgacatcatgtggtttcagatatgtcaacgggacgacgtggataccaacaccagcagcagcaggcacccctgccgcggcgaccaacgtcgactgcagcaggtggagcaacaaccaacagacgctctgcttccagtgcgactcatgcaaggctggcttcctggacgacatcaagaaagcctggagtttcgatgccctgtatccaattctcgcgttggtcggagcctttctttcatgctttgcaggcgtcaagtattggagaccaagactagacactgggtactcactaattagagaacgagcagtggcttaatttagacggctaatatctgcgtataatcttttcacgtaatgcataggcgacatacttatagacgacgcgtacagtaagattataagagtcgtctctcttttatagacatgctatttgtattatcaatatgctttgactctgtaaatagcatgcataatgagtgtatggtattaagccatctatattgagaaaggctctctagtgtaatatcatactagttctggaatttaatctgaatcgtcggtttttataagtgcatatatcggtactttattaactcagcgattagggtacgcaatattaattttggcattttggttattatccattcaccagtctgtcatttttccattcatttgtgcggtatcgctactttgatgtcagcatccttccgctgccggtcacgctcagcaaacttccagccggcgtcgtcgatcgttaaaactactactacctcctccgttttagtacgtaagatttacttgtatatgtatatatatatatataactagattcattaacatctatataaatataaagacttataatataaaacggaggaagtagtattaacggcatgaataaaaagccgaatatgatcgttaaaggtcattatttttctcatcgttatggtattaactataaagttttccttccgtcgttttctgttatatattaagagtccattaatatttttcaaaacgatcttaaaccgtcacgtgacgctctaacaaattaaaaaaatctgagaaaaaacaaaacatttatccctcggttttaaattaaattaatggttctaatattataaaccgttatattagattatcttaaaataaaacgaaaaaccaaaagtgactatactgtcccatctcaacttccatggtacggacgtacgtgcgttagtatgtaacctttttttttcttttcaatgtctatagttgagacgtttattattattattattattattattattattattattattattattattattattattattattattattattattaaaagtgataataaattttaataaaggttactttaaaaaaaatagaatatatctgcatacaactcttttacaagtagacaactagacata

SEQ ID NO: 24794 - DNA, 10608 bp, Oryza sativa
attacacatgtgataatctatttacatgtgttaattaagaacatactttgggaagaaaacattctgtgccacgtgtccgacgcatgagagaggagcggcgtgggctcatgtaaaataaatgagtagataaatttatataaaatatggtctatacaactataaaaagataatgagtgagtggaggatgtcaccaagcaataagcagactcaaaataatgacaaatagtttacttctatattttatcgagtgatggcatgatgtgtcagttgtataaaaaagtttttctttgattatgaataatgacaaagacagcagtatgaagggatgggaatatgtacttattttttaacttaaaaaaatataggcaaaccatttattttgttaaatagtcatggtacaaagttaatgattataaatcgtatggaacttattgattataatttacatgacaaactatattcttgatataaccgtattacatgatagaaaaaactttacttaaaagaactccaaaatttataagtaaactatacatactaattaaatgtacataattatggtcttattacaaaaaaattattgtttcaacaaaaacaatcgaatatgcaaaaatgaaagaaattaacttcaaacaattttatgttttgcactacaaagccaagcaattatgtaagtatttgtgtgcaccaaaaccctttaatgttctttaaaactatagataaaatattgttgaacttatgtagaggaaaaaaaatctaatttttaatctacccttgatttaatctacgccttcacgaggtgattcaatcacaagaactttgagtaacttgatcttgtaatttccgcttctagccgtatttacacggcatgtgtactgcatgatatgcatgataattacctagcggtagtttaatatttattttatacaaaagttgtatgaagttaatgtatcatctattcaaaagtgaatgaatggtttttgagaaatgctaaaaaaaaagaacccaggatatattttaaaaggacattcgttgactatctatgagataattgttgaacaaaatataatattacccttcaacatataatgcccgcgcaaaagcgtgggctacctttctagtgaccgtgatattatgtcatcgtcttcattaacgatcgtgatattgtcattgttatttaattaagggctgttgctatcattatttcactgacgatgggggtattatacatccttattttatttatgaacacttccttatataaaatcaccgaaaatatcattaagcaataatatataattgtgtgcactcacaaagaaacacttcatttattcatagaattattggaagcttacagacccctccgttccaaaaaaaaaaagtccaatcctagctacagaactggacatatgcgtgaccagattcgtacttagagtttgactttttttttcgacaaagtagtacaaatttatagcttcttggtttcacaacgggaatacggctagaagaataactatgctggcatgtgtttgttcatcatcgcggattgcacattaggtgatcaagttgatcgatcttattcagcatcatccctcagtacataggtatcctgccattcaatcacttggacacaaagtagatttgtgggggcagcgcacggtgcggtgcgagtggtgtgggacggctcggcgcgtcgcttgcccggcttggcattttgtctaccaggtggcgggcaggtggcccggcgaggccgtgtcggcccaggagggaggagggtaaaaagtgcgaaatacctaataagcagaacgttcgctctaatactttaccgcgaacagctcggacaggttgacatgcatgactgaaaaggctgtcacgcgtcagctggggcccttgaatgcagtgtcctttcttttatagctaaactgtgtacgtatatctttttttttcctttttaatctccgattttttagggattgatcacgtatgtgatttttttttctgaacaacacatgcacaagaataggaaagattcttgggaattcttactcaatgtgtgcccacatccgccactttttatttaggttagttttgacccaattgaaatttaatagttttttatttttgaattattttagtttcgttttaaattcatctgtgtataaattttgtatatcgaaagtttatttatataaagtttacatgccaaaagtttatatatgtataaagtttctatatcaaagtttttatatataaagtttgtatgtataaagtttaaatttgggtttaatgtttgtgagtagagatgctagtaatttgaatatgattttatttgaatgaaaagcttaaaaaaatgggtaaaaaatctattgaattgaagatgttgctataaaataaaataaaaatacatttacctagcctagttacgtagtataatggtttaattacagatcatactagttttatcggtagaaacaacatgatacatgcagctgattaagtggcagcatgcatggttgcatgctcgatgtgtgcatgcaggtgcctggctgcctgcaaatcatgccactaatccctaattaaaacgcgtaagcgtagaaggttaaggtgatactagtagatgataaagtcgatttgtggtctgaaagtgatcgcgatccgcgaacgttcgcgtattagccccacccgggcggctgctatgctgggctgaggcctgagggagaggggctaggaggagagttagggcctcaaatgaacaggatttttgttttatatttgcttggaattttgtaatttggaaatgaaaaaaggattgaattggaatgtaatttgtattcaaaatttgaaactggactgtttaattggacattccaattcaacatggttattacggggtgcagggattagttatagaatttcgagaaattgcttggatggatggattgtttttgaaaacagatttagaattgtcgtcacatattaaaattcatcggcagtttttttggctatgaaggaagggactattacagggtgtttcggataaagttgaaatatcatgaaaatggatccgaagaaaataaatgcaaataaacgaaattgggatttagatccaattttggcattcaaaggattcaagggaaggacatgatattataaccattggaacgggttttgggactttgattaacttaaatagaatctattaacttattaaaggaataaaaaaataagcctccatgtttgctcttatggcctataaaatcccacattaattggaggaaaataagaaaaaaataaaagtcaatccgagacggtaccacattaaccgtagaaaaaaagaaaaaaaatcaattggacaccctatagattgcttacatagtaaataaggattctttttcagtttggaaatagtattttattttggaaaacaacaatcatacatgatttatcaaagtgaaataatcagaatcagtaaccgagtattgcatatgtatctattccgaattgtactctctacattcatgtcaaaaaaatacatagacttagcaaccaaagcaaaatacaaacacacaaaacaatctaccaaagctacgtttttcaattcaaacttgtcacttaccttgacacatctcgtagtaagaatgacaatagtagaagcatcaccaaagataatcgattccgtttcgggtgcctgtttgagcgaggagaaccaatttttatcactggtcatgtgctgcgaacaaccggaatccacgatcacacgttctccttcctcgccaccaaagcctatacacaagaagatgccgaagcctcagtactgcggttagataaaagaaatttagaaatccaatactaagacacatgaccagtagatccaatagatatatatctgcgcgtgaaaatagtttgagaatttttagaaaatttttccaaggtcggtttgaccgagggggtactgccggtctaaccaggggtcggtccgaccgccactgcactgtcggtatgactggtcgccggcctaaccattgtgttctggccgatttgaccatgccaatgtcgtcagtctgaccactagtgtcccgctggttggaccgccgatcccgaccaaacacaaatcgaagatctctcaaagtagattgaaactttattagttctctctgtgtttacaaagttggacaacggcactcctcacgaaaatctttactaaactcgaaaccctaactattctctcaacattactctcagaaaaacaataccgggaggacacaccatccctctctatatatacctaaggtaggcatcctaaagccacgaaccaaccttgtacaagaatcttaatcccctacgaaaccttcccatacaagaaacaaactttacaaacttaaattgtaccaaatttggactccttccaaattcgactctccatcccatacgcacacaatatctccatcgtatgccatatggaatcttcaccaaccacgtgcattgatctttagcctaagcatctgtcacgcccgaaaattcactagtaatttccgaacttatttgtgcataaaatcctcatccaggaatcagccgaggtacacaaattgacaatttaatatacagattcatcaaaataactaaaacaataaatacttacttaagaggcacttagtcctcaccatgaagaaacctgcagcggaaaataaaatctagcgaagctccggctccactcccacagacagctcaactggggtataagccaaacgtcttctccttctggatcctttttcttcaactgaggttgattgattattgcaagaatgagcatatgacatactcaacaagccacacagcaaatatgcaagtgcacaaggataccaaaggatggcataatataggctcatttgcaaaagcagcatttagcaaacatttaagagtaataaaacagtagagtactttaatcattaattttaatcaacactgaacaacacgcccatgctgctcaggcccaaccattccgaacaaccatacccggctgtacagatctaactctaaaccaggagctaagcaaattattactaggtataacatccataattgttgtgagaggtgtgagactaatcacgaaaaacattgctcaacccgcccataaccgcgggcacggctattcgaatagttttactctggccagaggtgtaccactgtacccacaagacacagccccacaacatgtcaccatgtgcctcaataccaccacggtacctcggaaaggagctgtgacaataccccttgcacaagacaatccaccacagcgcacctttcctggatcataatcacccccttataaacaaggcatggactccccagcgacccccgtgggcttatctccgccacttctcagtctggtgctccgcaatgaatcatgctatacaaaaggtaaagccgttgcccacgctggcttgtggttggcatggttaatgtttcacaatagtagctcgcgaaccggtccttaattgtcatgagcacgactctcaaaaccatgtgctcacaacccaccattatcaagttttagttggcaagtaattaattaaccaatcacaattgaccatcgtgaactatcattaagccatcattaagtaatagtgagtcataagttatcccaatagtgtgctaatgtttctaagcatggctaagcaattatatctaatatctagctgaaccaatatatacatagtccaactagtcaagttataataacccaaggtatcaaggaataaagtaatcaatgcaaacaggccataacaaaggaatagattcacaccacccagtgacattcgaaaataaatgcacagttgaaataaatagagaatttaaatataggatcaacatgctcaaaggattgtgtttaggatctgtgtgacttgcctttgcaataatcggtcttcaattaatcttcttgaatacttccggcgcactcgcgaaccttcgtaacgacggaaacgacaagctaacacgcaaaacgaagaaaaagactaataaaaaccaaataaacaatacataaaaagtaaacaaacatgtagatcataattttagatgaattatgagacttgaacggcctcattctgacttcaaatgaatttattatgaactttacaagattaaatctatttaaagcctatttaaaaaggattaaataaatttaattcaatttatggataattttaacatgtagatctttattttatacaacttttgcaacttgaaccacattaaactgagttacaatgaattagttatgaattttcaaagattaaatcggattaaagcatttatatggattttaattgaattatgacgcaataatgaattatttttgaaaaggaaaagggaattattgcgtcagcggctagggtttgcggtggaccgggtgcacggcaacggttcacgggaacggacggccgagatcgatccatccaaaatggacggccgagatcgaacggtccacgaccgggccacggcggacggtcccgatgacgtcagcgacgacgtcagcgatgacgtcaacaccggcggcggctcggcaatgcatgctcgccggcgaacgacggcgcgacgacgcgaacggaggacaccaacgggtagagggcgacgcggtgaactcaccgatgaccaaaacaacggcgaagagcaacggatggcgccggcgacgaggaagaagcggcgacggtcttcgggtcgacggtgacggcggtgctccggcggtcttcggcggcggcggagcggtggacgaggacggcgacgcgacggcgaccacgatggcgacttccccgagcgacggcgacgactggagcgacggcgaagcacggctggagcggcggcaacgacggcggcggctagggctacgcggaggcggcgctagacgcgacggcgggctaaggcaaaggtgacggcggatagaggagagctcgggggtgcttttaaaggggcaaggaggcggcggcgaagacccacggcgaccggcgacgcgaaggaaaagttagggttcggaggaaagagaccgatccgaatcgacctcgaattcacgaacttccaaagcgatttagacgatgattccaaaagagaaaaggtggaggagatcccgaggatcatttcccctctattgatttcaccggagaaggaaaggcgcggccgaatttggaaggagacgacggcggcgcggcgctagggttcgggcggcggcggcggcgcgaggaagacgaacctgacaggcgggacccacctgtcagcggccgagagagaggaggaaggggcgcggcggactgggccgactgggccggggagggagagagaaagagagaggttttgggctggctttcggcccaaagccaaaagatacttttaaaaacctttttcgatttaaattattcatgaaatgcaattccatttattaaaaatacttccttagctcaaataaatcccagaaaaatctaggaattatagaattaagcaaagtatttaacaaaattttatctagcccaattttatattgagatttaacaaattaaaattagatcttctcctttaagcttttaagatcatttctaattattccttttaaacaacaatttataatttaaggatttttaaacaaggaaaagctcttaacaattataattagatcattattgatcaaataattactgaactgttctttgtatcatttaggaattgagctctgaaaaatccgagaatattccagagagttgacttaatcatggagaatttaataaaaattaaatccatccatgctttatatttaggaaattttatttcccacatttaacttcacttgtaaattaatgaacatttaatataaattctaataataatttattaaataatttataaatcctgaaacaaaaatcaggatgtgacagcatcccggattagctgatcatccggacgtcatcttctcccaagttgacttccgatccatcatcggcaatactcttccgaggcatcaaaaccacctacacatgcagcaaccaagaaaccatatctgagcacaagttctcaccaacatgactcattgttagccaacaacagtattatatacgcatagtatccatatagaagttataaacatgaattatccaaggatatccaaagaatcaacccgaaaccgaaacctacatagagtcagccgatcagaccactagctggccggtccgactgcacgcatacatccgatcggactagcagcacttgcccggtctaactggttcaaacagtcaacaccagttgctgttcatcacctgcaaatcaatcatctccaaaatcacttcgtcaataatctctaaatatcaaaaccaataatcccatatgccaattgttcacataataaggaccaaacacactttgattttacacttggtccaacgaacgagattcaccaactttggtcagattggatagagccttttttgcacagtttgggaggagatgtttctggattcgttgttacagagctcagcatcagttgtcttagatcattgcccctgttttgccttcgcacaagtgttcgggggcaaaaagggatttcactttgagagttttttcacctaaaacgagggttttcttgaggtcgagcaatagatctaggtagctcctatacaatcctcttgtgcaattgagggtttattcctcaagctaaaatgattgggcaaatggattgcagagttggagttagaaaaaggtgggcaactttaagattcagctttcgatggcaaaggagatcctcaaccgcattaagattgccagagattgtagacctctcactgttggggaggaatggttgagaatgaaattgaatctgcactgccttggcctggcatctcttgagcgtactattgctaggtcaagatctcagataacttttcttagtgaaggggacgccaacaactcttattttcttaatcagtcctgctactgtaagaaaaaaaagaatcatttctaagttaatggtggatgatcgggttgtcacttctcaggaagaaaaacatgaggtagtttttgagttctacgagcatattctaaagtcagcacgtgatagggatttcttgttggatctcccggattttgacgataaaaagtttgatattgatgccttgatgagccattcttcgacgatgagatatggtctactgttaaggcttttcacctcgacgaagcttatggtctcgatggttttacgggttgtttctacaaggtgtttgggagattatcaggtgatattctcttggcgcttgcagcgattcaacaaaggcatatttcttaattcaaattgttcaattaagcctatatcactcttttgtctgaaaaggtggatgcttgtcggtcatcattataatcgatcatctggtagcaagcgtagtaaaagaccctgccaaccctagggttagacagaagtgctatggatgaataccccaaagatgacgatacctgttaacaatttgtgatgaaaatctcaaaaaattatgataaattattcaatatatagaaagatggtgtgtgcctctgtgccactaaaaagttcgagcctccctctccaccatcgtcgaactttatcacaccctccacaccattccatcgctattctgcttgggtttaacagtttggcagttctgacatgtgggcccaggcaggaaaaatgtcgctcttgccctttcagtcgctggcataactattcttttgttctttgatggtgaaaaacatctgccatgtgatgaaacactcttcttttgttccgttagtttgccatgttgttatgtggatgcaaacaagtaatgtatttgataagtcatgtctattgccgacatttagtgctatcatgtgatgaaacagctagttatgtgaggaaacgactagttatgctatgttgtttcattctggacaattacactttcaccattcaacattgaaaattcattcattcatccatccatacatccatttatccatgactactcacacacacaaccacctacttcttgaaaatagcatacaaagtaagaaaaatgcaaatatagactatcttttcaagccacttaggcttagttcatttccctagttcccaagtccccactctcttttttcacgcgcacacttttcaaactgctaaacggtgtgttttttgcgaaaagtttctacatgaaagttgcttaaaaaatcgtattgatcaatttttgaaaaaaaaatctaatacttaattaatcacgcgctattggtccgctccgttttccgtgtgcactgttccggtcaggaacaggcagcaacaaacacaaccttaagctactgcatcaccctattgcccacttgtgcattgcctacaattccagcagcctgagaaccttcctgcatgatagccaatggagctgcagtagggaaaccaccaagtggtgccactgccattaggggaactgcatgaattggagtaggggcatgaggtgtctgcactccagtgtccaccattttatcctcccactgataatactgttagcctccaatctgaaagccaaaccattaacacattaattgtaagcaaacaaaaaaaaaaccaaagacaag

SEQ ID NO: 24795 - DNA, 5216 bp, Oryza sativa
cggacagtagagttgtgattgcaaaactccacccaatgagcctcacagatacgaggaaaaaatattaattaccccctaaactatcgcggtcgaccgtattacaccttagaccacaaaacaagacattatttacccccaactatacaaaccaggcaaataactcggtaattcgttcaggggggtaattcatacttttttttccaaatataattatgtgtattcttagttggtgtagtgaacagaagttttatactttgccaattattttgttgctacctccatttataaagtggtgatggatgtttttaacatcgatgagtttttcattaaaattctcttaatataattttcacaatttaatcatgatattgttgcatctattaatgacttcaaatttttttgacatgtgactacacacaatttaggacgccatcatttcgagatcggaggtagtgcagattattgttttttacacacggttttggacgtcataattatgttgtcacaatatagttcgatcaagtgagtattatataagaattcaatagtaaaagaacaaatctcaacaaataggtacttacccactcaatcgaagcttgatgacgagcacctcgtccagactcactcattccactaatggtctcaagtagtgtcacaccaaaaccgtagacatcattcttcaaagagacagtaccttctataatatattctggtggcatatagcccctaaatatcacaaaatacaaattcagatcctatcaagggtatgtagagaaaatagaaagaaaataatttcagaggcaacgaatgaaatgccatatatcttacagtgttccactaacgcttgcattaatgtagtcatcttgtaattcttcagataatccaaaatcaccaatcttagggttcatgttagaatccaaaagtatgttgtctggtttcaggtccagatggactataggtttctcggagtgggtgtgaaggtaaacaactccctgggttatcccttcaattatttttaatcgggaggaccaatcaagcaacccccctgcaaaaccagaacaatttgaagtgggacaatcagtaattataaacaacaaaagttaggatcaaattttctgtttatagtgcgtaccatagattaagttgcccaagtttccatttgtcatgtattcttcaaccagcaaaagaaattcttctttggcagaaacatttccatttgtggcattttctttcggcatttcaatttccctgtattcgtggcaatatcctacaagtttaactatatttttatgctcaagcattgaacgtagaaggatcaaaggatgctttttgggcatctcgtcatattgagatggaaatccatctgtatgtttcttgatagcaacctgaaccccatcagataaaacaccctgaaaagtgcaaattacacagtcaaaacagcacccaagaaagtcttatcaacgtgggagtagccatgaggcatacagtacaccatgacactagattaccagcagacatctatcagtaaagataaagaattattgatagattttggcaaattatgtgttgacaatactgcgtaataagacatgttatatgttaggaaatctaaatattttttggatcaaaataacagcaatattatgagtagaaacaaattatatatccagagaacttaatgattattatccatctgtcagcaatgtttcgtctgtcagatcatgatctcacagttaagatagagtgaggtgaaagctcaggcggcaaattcatttaggtgtgcgggaaaataaaaaaaaccgccaaaattttttccacgccaaaaagaaaatcgacgcaagaaaaaaccctgggcgccgccacctcgcggccccttccatggttcaccatgcattgccacctctccctccttccactgcatgcgcctctctccccatccaccgcgcacaccgcctcctcctctgccaaatccagcgcacgcccgccgccacctcactcatctctccccctccaccgcgtgccgcctccgcaaaatccacagggcgactgcctccaccacgcagccccctaaccggttgcctgtgccgatggtagataaggagaaatgaatcctacaaacctatacaaatcatccttaacttattatagttaatagcaattctctgcctttttttcttcttccatgctagtatcatgttttatcaaagttgttggctctaaatcaagctatcaatcaatcacctacacactgacacacgtcaactccttttttttaagcctaaggcggaactttgttccacttttatatttagaagagaattgacccagtttataaggaaaacctggcccaaaaaccatacaactgcacggttaattacagaaaaaccggctgaaacccgccgttacacaactaacaacaacggcggagcacaaacgcaggacgtcgggccgccaggctaaacacaaaagcgacacaatagctcctacatcgcagaagaggtgttatcattgccgagctaggcgcccaagcgacctagcagcgccgacttcacaaccgcagcgacactgaaggcacaaaggtcgccaaagcgaaaagcagcttcggcatccaacaatgggcatcagccaagccaccgaggagccacttccttcacacggctagcaccagaactccttggaagagactgcaacatgtcatcattgccaagcattgcctggattaatgccatactgctaggacaaattaaaaatctattcgattcttgaaaaaccgctaccggtccaccggttcccataaaaaccacccggttcacccgttttttaccggttcgattgcagggcggttttttgttgaaccaagccgccaaggtccctagttctggttttttccggttcaaccgccggcctggtccggtttcttgtactatgccgtagatcgagtcatgtttagtttgtgctttgttgacatcatcgcatggatgacaaacaatgcatcataggaaaaaatattcatttgtcgccatgaaaaaaatcagggcatcaatactattgaggcaatatatacatgttgctacaattttaaaattgttgctatccgtggtaataaatagggtggtaataggttattgcaatgatttttatttgatggtaataaattttgatgttgccacggaatggatgtggcaaaaaatcatattattgccaccactccatatgtggcattagttctacgtactaaattaaaagttcaaatattaatctatcatcataactatttattttttataacttgtattggctaggattcgaacccaagacttatcctcacatgcgctctcctttaccaactcacctcacctagacatcatttctgttacaaaatgcatatcgttccatttaagcctacctaactgagatttgaatctaaaagatttcaaatgaaaaagttatcacctataaagtttagatctcgttgagagctataattttcttataaaatttgtcccaatctatgtccatatgaaaaaaatatgttaaattatgagatgacaatttttttattgcaacgaatttgttgatcgtggcaatagaaaatattgaaaagtaacttgccatagccatgtactatgcaaattaccaaaaaattaaaattgtggcgatagaacattttttttcaacaataatgttttttggtgatatatcattttctattacaataaaaatactaaataaaataacgactgtaaattgttacaataaaatatagttatttgcctaaaaattatcattgaaatagtacattatattgctatgaattattttttgttataataatttaatggcaatagctcaattatcttgtaacgattttctgtttgttccttgcatcgtggctactattctaaaacatttcaaccatgttcaaatacacaataaagattaaatggctatttatgtgcgcatgatcccacacatcgaaaggtatctggtggacaattgtgaattggacaatacgagcctcatcggttatccatattttctaataagccaaaacggcttataggaaattaaaattaatttataaataaaacttttatatgtatgttcgtagcaaattaaaagccaacgctaaatgaaattacgttgagaaaatcttaaaatcaacatcaaaatcaagtttaaaatttcaagttttagcttttactcttattaggtaaactgatggggctctataatagttgtgcctgacataattgaactgggactaacgagccattgctatatatagttgctatataattgatcccaaaattaactaacatgatccaaaactgaattgctcccaacccgagcaaaccaagacgccaagttagaattgggactgaccttgtagacagttccagaaccaccttgaccaattgttgttgcaaagttatgagtggcagcctccaactcaataaaactgaagttcattaattccctctgtcgaacacggggaagttttgggattcctacaggaagtgaacttcgtcttgccctgatgacggcgaacatctctgtaaatccagctgaacatcaagaagcgttttaatttgcagcaagaagagaaaaaaaataatattctctattataaagaagtttgaagtgtattttcattcgttagaacagctaggaagctagcccgtgcacatgccggggtaccttaatattatttgaatttttattatgatgatttatgtgtggtgatttatttttctaaatattcctggactcattttaaatatgtatttttagtattttatttgagcattggctatgattttcttctaattaccctttcaacatttaaattttaacctaaaattactttgaaccatgtagtgttgaatttgtgagaaaatattatgttacaatcaagaagttgatttctatgcattttctaccatgtgtttcttttttaaaaaaatatttagcatatcatttttttccgagttttcaaacttcaagtaaaactttttcttgtactataaaaaaatttcccatgcgttgcaacgggtaaaggtaattttaatcttattattattatacggtttagttaaggcgaagttgtaaaattcactgtagaaattgcttggatatatatatttctagaaattcataaactgagttaggagtccaatcatctcaagttagcatgcgagtttttaaagagatat

SEQ ID NO: 24796 - DNA, 8270 bp, Oryza sativa
tcgtgcacgcgattggattttccacagaagagaatactaactcttctgtttttggcatggttgttttttccgttggatttggcccagtaacagtctcgcaaacacaaacgcatgacgtcatcgccctttttcccctttttttaatccttcgtcggttccttttttttttcttcttgtgcacgcatgatgtaaagccaaatgcagattctctgtgcaaacgccaaagtcaatagtctcacagcccaaatcaccgttttctctttccctctttatttttttattatttgtatatggatatacatgaatttgtttctaaaataatgaagtttaaaatctattttcacataaatgttctctaagattagatttaaaattacacccacgagcaagtctaattccaaattggactttgtatcctttttaaaaaaagaaaataccgaaaagtctctttttttatatattttgtgcatagaaagtttatagatattttgtgcacagaaaatttagagacaaaaaatttatatgtataaagtttacagataaattttactcgcataaactttatatgcatagatttatgtagaaagttaggtttaaattataaatatatatatatactgggctacatatatacatgtgaactttttttctcaaatttgtacgtcaaaaagaaaaaaaaatgcctaaggatttttttttgtttgaaagctcgtgtgcttggtactgccatcgcgggcttgcgtgggctctaattcaaatagccaatggaaactactaaaaagttacgtggaattggaatggctcgatgggctttgccgagatgcatgcattcacgcagatgtgtaggtgtgtttttattgtcaacaccaatcgcgctccttttcggaagcgatcgctcacccattagagatacccaaaatatgccaaccttacttgaggtggggtgcttacaatcattgccataaataggtaagacttgtcccccttctttagtaggtttggttacttttgttcgatcctactatatctccgccgtctcgatcccttccctccgcacttctttctccgtaactctccacatgtcttgtggcgcagcagcggtggatgtggctacctagcacagcggtggcgcggtggcagccacgtctccgtggtgctgcaacggccaccaacacaacggcgcactggggggccacgttgattattaatagtttatttcgtgatgattccaactggattgggtctcttctgtatttgtgattattttgtgatgatttcgatttgattgggatttagttttttttgttagatttgtgatgctattttggtgcgtctgattggattgggattcagatcttaactgtccactgcagccacattccacatccatccccacattccgctctgctctacactgcattttacatcgacaaaactacatgcgttccggtagcacaccacgttcatcaaagattcatttcgatttcgacatgtttcgcagacaggaatgcaaatacacgcaaaacatgccgaaacctgttcgtcggcatggctgcaggcagtcacgatgccaggcagcagcaccctacgtgccaaccgtcccatggcgtccctgatcgacggctccgacaccacgttgcggatgcactggcctccgcaagccatgacgccacctctcgacccaagctggacaagattccaatcctcctcactcatatccaggctggacggagtgacgacgccacgctgattccgccttcgtgctgctacaaagctgcgtccgcgcccgaagacagcgccacgaagccaccctgggccatgccgcaccgggtccccatcaacgactccacatcgcatgcttcttcacacaacgagtaaccggggcatcgttatcattggcatccaagctgcgcgcggctcgtccatgtcacactctagtagatgtcacgtccactccattctaggctccccataaatgcgtgaggaagaaccttcgggtacgactatagtgggtggatagatattggaagcaagatgaaggtggcatgtgttattccttctccattggatggttaaatgttttaccgtcaacaattataccctcggtggaatgttgcaggatgttggggttttagcatacaataagagcataaatgagaagttcattagcttgtgatagatttagagacacatgtttaccttgggtgcaagccaaaatacacgaagttgtcttggagcttacgaagcttatggtaagtaatggatgatcggataagtctatcacataacaagacgttctggccattggggttggaagtcagaagaattcattttcatgtccgaacgactatggccccgtttggcacaactccaacttacctgcagcgggagttgtgccaaacggtccagattcacctttttttggagtggaattggcagagctactcctagaaaataaactagggggtggagctgggtttttgctgctccacagctccactccaccccaaaagacccactaccctctaatattttagtgtatttacacgaaaatgccactcaactaccccttcacccctcctttcctcacgttctctctcctccccccaatcttcctcccaatctcgagctagtgcggcggcgtcggcgggctgcggcggcagcggtagcgtcgacggcgacaggcagcggcagcggcggctgcgggacgacgaaggacgacaacgggcagcgcgcgtggcgcgcacgcgcgaccggaggctggcggcggcgggctgcggtagcggcggagagcggctgttgcgggacgaggacgggcggcacggcggcagggccagcaggtggcggcggcccatcttcttccccatcctccgacgacggccacaaccggttgtggtagtgtctgcatcggcagcatacgggggcagcgagcgcgggctatggcgcgttggcggcggcaggcggtggcggcggctgcaggcggtgttgcagtggccacgacgggcggcacgtggtggcgtcggcattggctcacgggcggcgacgtcggcaggcgactcacgtgcgggggcgtcggcaggaggcagcctgggcggcggcttgtgcggcggtgcttgtgcggcggcttgggaggcggcggagatgcgtgggcctcccggcggcggtggctcgcgggctgactggctgtggcggcaacgtcaaggcgacgcctacaaggtgttcgatgaaatggcaacaaaggatgtagaaatgtggagctgagtaatcttgccaaacactttttgacctacctcagctcctagaggagccagctctcattagagttggagtttggagttgggagttggagttaggagctctaccaaacagggcctatatattgtaaaaaaagaaaatatcgatttgtatgcgtcccttgtatgtggtggtgcttcttggttcaagagagagaacgattgggtagaaggtaagaagcccatgaagggtgccactgtaaagtttgtgcggtatcttctgattgcacattatctcatatgaaagtttatcaaagataaggagattgagttagtctattgccatgccataggtcaaaaattgcacagtatgcttaggcaccatgcgaatttgatatgatggaggaatatcaacgcattatacctagaatccttttggtgatatgaataggcacctttggtatgcatgaaatagggcctaacttacctgtgatgggttatttgtaaaaaaacttatcacatgtgagttacctgtgactattccacgcccatcataggtattttcactgtaacaggccatatctcaacagctgtcacaagaaacttacctatgatgggttgtgagatacgtcctgtcagggatgaggttaaccagccatatgacctagtaagagccatatggccagtttaccctagatcttaccaaacgtgccggacaacaacctcaatcctaacctaacgcagcgttcttatcacacccagctgccacctcctccttaagcctggtggtgctgcatcctctccaagccgagatgctttcacctgcgcactgttacaattgcacctcttccccgagcatggtagcctcgtcctcccgtatgtggttgtaattgtcaaatttagtgattttagtgacttctcagtgatttattagatattgcaataatgctttgaaataaaatattagtgacctattagtgactttagctttatatttgtgagtttggtggccagacatatgaaggtccaaattgatataacgatgaacaattgacatactatctcctagatatcccaccaaacaatgacattataacatggggagcgggggcacatgtatccaatggtccaagataaatctagtcacgaagataaaagcgcggtcactttacccaccttggcaagctcgactgcctcttccgaaacctccggctcttccaacacttccttaacatgcgtttatggaactacaatttggtgccggtcctatggacttctaggacgatgatatacctgaagatttcactggtggagaaaccatctttggtcagtcgaccaaatttcacaatagtcccggttccattaaaaaccgggactaaaaacgatttttagtcccggttaaaaaaattttgatctttagtcccggttggtaacaccaaccgggactaaagatgatttttagtcccggttcatcccctgtcagatgtatgtcagggggtcgaggatctttaatcccggttgatactaccaaccgggactaaaaattaccactttagtcccagttggtgataccaaccgggactaaagatcgatctttagtcccggttggagttatcaaccgggagtaaatatttctctcccacatccgatcggttaagtcccagacagatatttagataagattggaacatcccctctcttcctcttctcagatccaatcctcttcctcctcccctcccctcacttcctccccttcctcttctcctcccctctccttcctctttctcccctctactccgtcttccatcagccagccggcggcgggcggtggcggcgcggccacgaagggggaggcggcggcggcacggccgcacgcggggaggcgggcggcgggcggcgcggccgcgtgcgtggaggcgggcaagcggcggccgggcgccggctcgtttgtttttgttttttttataatttgtctttcactggatgtataattgtttagattttgtgattcattgcatcgcatggatctaagatgtataatttgtataatctatgatgtatttaatttgtgtgtagttttttaggatttgtgatgtatttgatctgtgtataggatttgtgatgtatttgatttgtgtgtataagtaacttaatatttgggatgttgatttggggatgtgcatcccattcgattcggaagaaaatacatagattaacactagccattagcaaatcaacaacaaaagaaaaaaaaaaggatctcgaggaactgtcgcgaactgtcggttcctctctttagtcccggttggtaacaccaaccgggactaaagatagcgatctttagttccggattcgtagtcccggttggaaaaccgggactacaaagggttctaaaccgggagtaaagagcatttctccaccagtgcaaatttgccacccatgaaggtctccatcaggtccaaatcttctccattgataacccacaatataggttatggaaggagaaagtgattgttgacgacgatgaacaagtacatatgggtacgttgcctgcgaataactacacccttggtacattggggatgatgaatgccaataggtctcaaaaggaaccatccttccttggtcaattaacatgataaaaagacattccttttgtcaggatctctctactcgttgtgggtatcaatgatctccataacatatataggctctgagcgatgaacacacgattgctaaaattctactatttgtaagtgctctttgcaatacaatatgttaaaatttgaactgaagatgttctacagtagtttgtaatcattttagggcttgttgcctacaaaaccgtaggatgggtaaccaggatggtttgctatatgcaagtatgatccacaatctcagagtaaataccaaactagataaagtaataagatatgtgagggtagaactattatcagtagcctagggcgctagatctggccactccatctcccggtccagtacatatggcagccatgatctaggggtccgacagattaggcccacccaaacctcaatgggagaggaactcctgcttggtaaaaccagaactacgctaaggactgtgccactgtggcaggactgttcgaatagtttgttaacctccacagtggagtacactttacccacatgatgctactaacaagtgtcaaccaccctatgtagaaagccgacacatggttacttcctacactgaacattaccaggtgactttggggctttcgtgacatgtcatttcgtaacctgatacaggttttcacgacaagtcctgttgtgccatgaatcctcagtattttccctaactcccctgggatcgacatccataggcattcaaggattccctgttttagcttgttacttagccaagggtgttccacttcacccatgtggtcgcactttttatatgctcgatatgttctaaggtatcttacgttgctcagggcttcacggattttcctgaaatccaatcccggacagaattctggcaatgcaagctatacacaaacaaacaaaatccaacacagggaacaagaaaaggatgctacttaactactaatagagccacttgatagagctcaaataaaaaaaaaggtggaacgaggtcaatcggagctacgaattaatttcaaagattaattgattctctagacaaaggacaaatgatatatgcaatttcaggaggggaatattccatgtagatgttgacacgtggggtcaaatgtcagagagacacaacccattgggcacaccatggaccaagttcacgggcgactggctcgataggaaatagatggccatcattccataggcctctaggaacgatggctcggccaattcggctggggcaaaaacgcaatctaacagggcaacgctcttgaaattttttatttaagtattttaataatattttttgtttaaaagttacagatctggatgcctctcgttgtctgggatggttttttcttaaaaaacaccctcccagaggaagttttttgtgatgtgctagacgaccattagccacttgcaaatgactgctttccgggggatgtagttttttgtaggcggctatgttgcgaccctccccgaggctttttttccctcaagagtgggctgtctgcaaaatagcggtgagggcaggctggtgtttttttaggggtgcctttgccggccttacgaagagcatttattttttccatagggggccgcttgcaaacctagttgaggtggcctgccattttgcaagcatccccttgccgcccttctgtagaggtcttttttggcccagggtataaaacccccatctctctcctgaaattttttttactattccatattataatatttcaacctattttacatattttacaaatacaactcttatacccacacatcaaaataaacaattggcagggaaaataattatgcaagaaaataaacaactcaacaaaatttccttatctcacaagaaaaaaacacactccccgagggcaaaaggggccctcctgcaaaatgccagccccctcgactggggtttgcaggtggccacctctggagcaaaaagtgccctctaggagggtagcaagggtgccggatgagagaagagccttgccacctttgcttccctttgcaggcagcgctttgcggggaaaaaaacaccctccttgaggtttgcaaggaggctacctgcatattctacctctctgggacgccctctgggagggcattttctagagggcgttaggcatctagtttgtaaatttatcaattgaaaaaatatctttgaaaatatttttaaaaaatatcatctctgtggtctgcacaggttagtgactagtgagcaatccagtgagataacacgccttttccgtgttcagttgcttcgtttagggcaagagatggaagtccatctcgtaggtcttatatgaaaatggtggcggctagtattcgccactcacaccgccaccattggaattttctatggaccactgttggtgtcgt

SEQ ID NO: 24797 - DNA, 4109 bp, Oryza sativa
ttcatttgggcgaaaatagaccccgtaccatagcaatcaactacagctttctacaggaacagagccatgacctaactgaccttgaggaccctttcatagaagatgaaataaaataagcaatctttcacgcaagatcagataacgccccaggtcctgatggcttcacaggtgcttttttcaaaaaatgttgggagattatacaggaagacgttgttctggcgataaatcaggtggctaaccacgacactcgaagcctttggttactaaactcggcctacattgccctcttgcctaagaggagtgaagcacttcgagtaggtgattatagactgatcagcctcattcatgcctttgggaagctcttctcaaaattattagcaaacagattggcccctaagctccaacagatgatctcaaaaaaccaaagcgccttcaaaaagggaagaaatatctaggacaatttcctcttcgtcaacagcctggtgcgcgaactgcattcctccaaaacctcggcgatcctcctgaagctagacattgcaaaagctttggacactgtcagttggccataccttcttgatagactcagacacctggggttcggagacaggtggattggatggatcatctctatcctatctacgtcctcttcaaagatcatcctaaacgggaaagcaggtgacagcttcttgcacggaagaggtcttcgtcagggtgacccactctcccccatgctctttattctggcgatcgaccccttacagagattacttgctaaggcacaggaagagggcctactccaacctctccaaaggcggacatctcgtttcaatgtagccttgtatgctgatgacgcggtggtgttcacaaggccagataaacaggaacttcagacagtacaggcgattctccataactttggactctcaacagggatggtcactaacctatctaagagcgaaatctacgcaataagatgtgaagacctggacctccaagatattatctcccctttcccagcgcaattgaaggccttccaatgcacatacctaggtctccctttgcacatcagaaagcacaaaaaatcggatgtgcaaccactcattgacaggttttcagctcggcttccgacatggaaaggaaaattgctgaataagacaggtcgaacggttttgatcaaatccaccctttctgccctcccaacttatcaccttacagtcttccccctaaagaaatgggctaaaaaaaagatcgacaaaatccggcgcggattcctctggacaggatcagaacaggcacagggaggacactgcttagtaaactggaagagggcctgcagaccaaagaacatgggagggctgggcataacaaaccttgagctcttcgaccgttacttaagacttcgctggctctggcaagaatgtactgcagtagataaaccttagcagggatctacccttccttgtgatgaaacagatcgacaagttttcagggcttccacggtgatcaccttaggaaatggcaacaggacaaaattctggcatgacagatggcttgaggggtcatcccctaaagagctatacccttccctctaccagatagcaacaagaaaaaacaaaacggtggcacaggagcttcaagacaaccgttggttgagacagatgcgaagaatgaacaccacagttcaagtcagagagttcatccccctatggcaccaaatccagcaggtcgttctacaagagcaaatggatgacacgattatgtggcggtggacttcaaatggaacctactcggcaaaaaccgtgtacaggattcagttcgttggaggcatccaagataacaggtcggatttcttttggaaggcaaaagcggaaaataaatgcaaattcttcggttggcttatgatacacaagaagattctcactgccgataagcttcacattcgtgcttgggacaacagtcacatctgccctctttgtggtgtagaactggagacagccactcacctcctcatggactgctcctttgcaaagcaagtctggagactcatttggcagaaagcaggccttcatatgccactagcctctcttttcaatggagacatgctagcatggtagacagcttgcaggagagagatggtgaaagaacagagaagaaattttgatggcctcttcatctacacagtttggggcatttggcttcaatgacatgctaggatcttcaagggtgcttatggtgcaagtcgtcgagtcaataatcgacatgtgcaaggcctatgatggagcacacaatttagatgagtagttctcgtatcctcctgctagttgctctacactatctaaaaattcctgtcaactcctctgtcaacacctcggaagggggtccccatgggatccttttgtaaccttacttgtacaaactcggtttccctctcttctccttttatgaaataggcagagctcctgcctttacccctcaaaaaaaacttgtagtgattcttcccattggtgataacttgttcagtcaacaagtttattttatcttctttagatggccaaaccttcaacttgatcaactctgcaaatggcctgggctctttagaaatcagcactatttggcaaatttacacaactgaccggcaccatatgagcttcaagatcctcattagcgcatctgaacaagtacctactccatttatcaaatactagcccttgattgcaccagaaggatagccatggttctagctgctactcggaaaaggtacgtgtgcaaatgactcgagaaggaggtacggtggccttggttggagagccctaaataccagcacatttcgactgccttggatcagtcttggaattgaccatgggttcaaatccatcttggtgacgtaccacgacatgctctggctgataaccggatagagaatgtgaacgcctacgtcttgtactttgtctcaagcaccttgtggactacttgtcagcaattgctttgcgactaaaccgttgaagcttgcattgtaggatcgaacaacaagaactaagccaaccacaaggggacgggtttgaatggttgtagtaccaaaaaaccaaaacttttagtggaaatgaaagtcaccctcaaattcgatgtcacgcggtctaaccgaagtagatgcgccggtctgaccgagattattgctctggtcttaccgccgagatcagctgttgtcacctgaggctcacgctggtttgaccgccgttactccgctggtctgacagtcatgatgccgtcggtctgaccaccggtatctcgccggttggaccatcgaacccgagcaaacacaaattgaagatctctcaaaatagatgacaactttattacttctttttgtgtttacaaagtgcaacaaaagcactcctcatgaaaatctcggctaaactcgaaaccctaactattctcacaactcaatgctctctaaagcgatatcgggaggcctcaccctccctctctatttatacatgaggtaagcagcctaaaactacgaaccaaactcagacaagaagtcctaatccacctaggaaacctttccgtacaagaaaccaactttacaaactccaacagtagcaaatttggactccttccaaattcgactctgcatcccatacgcacacaatatctccatcgtgtgccatatggaatcttcaccaaccacgtgcattgatctttagcctaagtatcccgcataatatctaaccgttcggacgtcaccttatctccaagttgactcccgatccatattccaagaccaagctatcaccaacttgactcattgttagcaaacaacagtattacatacgcatagtatccatctagaagccataaacacatattaatcacggatatccaatcaaacaacccgaaatcgaaacctacacagagtcagccgatcagaccgtggtctggctggtctgacagctcgatacacgccaatctgatcgcaacccatgcccggtctaactggaccaaatcatccagcagcacctaggcccgggccaagtcagtggggggaccctatcgggctccttcccccccaaaacaaactgtacgtgggcagaaccgttgttgcctgatgg

SEQ ID NO: 24798 - DNA, 7289 bp, Oryza sativa
tgggtttttctcgacgtacaagctgagatccgtgcctgcaaagagcgtggaattcaacgtacttctccaacccgtgatgtccattgtcctattcataagacaaagaatcacgacctctcaagctgcaaggttcttctcagcaccatgaggacgtcacctcctaaggttcaacagtcacaaatctctcttagagatgcggacaaggaacgaggagtgacggttatctcagatcgattcgttggggtaatcgacatcgatcctcacgagctgtctgttctacacttgttcgaagaccagacctcatcatcaacgagtacaccacgtgatgtattcgccatcgatgggaccaacacatctgcgcacgctaacgcagaacggaggatcaagtggttacaccggcccagcacatcagggccatcaacgcattgctgagggaaactccttatgaccccattctgaacgatgatctcgaacagtggacagaacggctacgggaatccgtagctaacctcagtaacgcattcgaggaggccgctgctagggcacaaccagaacaaccgccgaacggcggtgctgacggagaaccacctgaacagcggacgtcacctcgtcaagccactcctccgcttcggggcaccagcgatctcctcgaccatctaaacggtcgccgagaagcgcgacgcactcgagacaacgacgaccgttcttgacatcgcgtctcctcgcgacgccgcgggaacgaagaacaaggaggacatccaagcgagaaccgagaccgtgataatcgccacaaccgccacgaacacaccaatcgcgagcagcggatgccgggcgatactgatcgaggacgacatcgtgatgacgatgacggcggagatcgacgccgggacagcaacggtgggcgacgacaagattctcgagaacccggacgtcattctcgtaatcgcacaccggaaccgagcgactcttcatcgtcatcgtcatcatcctcatcatcttcgccatcggacagacatccacggagaacgtacgatcaccgacaacccactgcccccggcggtgggtgtagagctttcagccgtgctctgcgggacgtccgatggcctgagaggtttcgaccgggagcgatagagaaatacgacggaagcaccgacccggaagagttcctttaggtctaatccatagtagatcaaaaccggggtcaaaaccaccaaaggacctcgggtgactggttttgtatagttaagagatcctgcatcaaaaatgttttttatccgagtaaattgcacccacggtgcatcaacttggcatgtgggtgcaatttggtgcaagaacttgagaaatgagcattctagtacaacagcttgataggtaggtgcaatttagtataagtactttataacaacttgcaaggtaggtacggttttgatacagtaaactaaggagttatgcgacaacttaattatttggagcatttttttatatagattcatttttaagtaattattttgacaatatacaagggttgatttttataagcatatttatattgttatcctaataactcataactgaaagtcaattaaactagatgtaaaaattattatatttcggttgatatttaagaaggtgaagaaaacaaaaggaaatcttaaaggtaattggatgtaaactagatgtgaaatataattcttaaagattaaatttaatatttaaggtaatatccgtaggattactatgtaatggcatattgatatcgtgaaaaaactcacctagcatatgcttagccaacttgatgcatcaaaatattaaattattaagttcctgtactggaacgcacccacttatcaatttgttgcactcaaacgtggtacctacctaccaagttgttgtatcatgggtgcaatcaactctttttatcccggtgacaagttgagggaccttcggtgtactttttcctctctgtcagtgaagaggtcaaggccggcttcccaagttgggcagcccagtgggccgaagggcctggtgatttctaaggcttcatgaccggttcgtagccctaattcctatatatacatatatatatatatatatatatatatatatatatatatatatatatatatatatatatatatatatatatatatatatatattaaatatcttaaaggtgctggattagctgccttccgggtgattgagccagccgttatccaatacaatcgtgacacgttgttttgttacagttgatcaactgccaagccaggttagcgcttctatgggccagctgattttttggcccaatgcacggcagccttttagtgctcagcggcccatcgcggcatcggtgccgtgaccttgctccgtcctgggtttcctgtgcgctggatcatccgtcggtcgccgctatcctctcgacgcgtgccccttctccatcccctatctgaccatcagcgacggagcgacgatagtgctctgccatgggcgtacggcggcgacggggttggctacggctgctgctccactacgcggagagccctatgaggaccaggggaggtaatctgcatcgctccttctttcttccactcccttttttcttccatatatggagctggttctatttgctgctcctcctgcttagttcttgaggatttccagctcggtggtttccctcaccgcatcgtctcgtgtggtccgaccgttcctgctgtgctcgctctcgatttccccattgcagtgccgatgttgtgccagccatacttgtgctcactgtttttttcctgttttataccttccaggctgcgctctcggattggtgtctctcccacatcgcgtcttgctttggggggagggaggggggcatctttgcctccctcagctacttctcgctaaggtatttagtataagatcacctggttttatcatggggatgcctgttcagttcagtacgtatgtgtggtgcttggtatatgggtaaactgagatgattatgtcactggatgtttgttcacttcatttcgcatatatggttcccctctgtttttttcattggattcctgattagctacgatttggcatatatttatgttatttcgtttttcatctttcctgccgtgtctcgctgtcgatttccccattgcgatgccgatgttgttccatccatgcgtgtgctcagtgtattttttttctctgccttccaggttgcgggctccaattggcgtctctcccacacatcgcatcttcttttggggggagggaggggggcatctttgccttcgtcagctacttctcgctaaggtatttaatacaagatcacattgttttatcactgggatggctattgagttcattacatatgtgtggagctgtggtatatggataaactgagatgattatgtcagcgaatacctgtttgcttgatttcgcatatatggtgctcctctgttttttcccttggattgctaattagctgtgctttggcatatatttacattatttcatttttgtattgtcctgttatgttatatattctttcgtaggttggtttttttatcgcttatgtgggatacatgtttagttcatttcacatatgcgatgctgcgatatgtataaactgagatgcttttgtctccagtatagctgttcggtggatttcatatatatggtgctcctcttttttccctccttcaattaccaattgctttgttttacattgttccgctatgatatatattcgctcctctttttttccctccttcaattaccgattactttgttttacattgttccgctgtgatatatattcttggctgtttttcgatcgcttgtgttgttgccagttgatttcgttcggcgtccatctgtttcttcctttgctggaccttatacagttatatgtttgggttagcctttcaatgtggttatgtctttggtgttttaccattttcgtaaacgcattttcaaatatttgtatgttccagtctaagcatccgagagctcctggttcagctcttgatgatttcccactttgttgctgttagatatgtcatattatgtccagttattcagtgcttgcttatatgcatctatctttcttccatatttctatagtagctcgtgcctctgttctttatgctttccctctccattatatattcatccatatgtttttctgaatgtgtctatattttgctcctttcgtttcttggtgtatagaaatgacatggagccatccagattcgttcgcatctgcccgcggaagcgtccagatggtacttggtgatgtcattatagtttcgtatgcaagcctcggagttagcaaggccattagcgatccttttttttccctgattcacacttttgctcaccaatagatgggtcctccatatcatctgctgccaataagcacttagagcttacgagtggtgtgtcatgtgccataggtatgtacgctcaatagtctgagagttagcgaggtcattaggataattgttgtttttttgtttcctgattcgcaattctgccttccgatagatgagccgtcatcatcccgcggtgccactgggttctcaatgctcacgggtagttcatcatgcactataggtatgtacgcttgctgtagtcgctgctgtctcaatgtttagtgtcatctcttatcccttgcacatctttttctcatatttttgtacagttgtccacttgctgtgatacgatatgctcaaaatgtatgttcatattgataagttcatctatttgctcattggttctttctagcttagctttgttttctctccgatccctcattctatctcctcgcatcacttccacagggagtcgtggagctggccacattcagtcttctcgacccaacagttacctctggactactatttgttgtgttgcttagcttgctaaggccttttcccttcttccgattgatttttttcctgtttaaatttttcataggagatcatttttgcccaatagtgccagcacgtgttgctcgagtgaaccgggaaaaaagacaggccgctaggaaaatgcgtcttattttgcgacaaggttcttgacctgcttatgtacatgatcctttctggtcgcttatggcgatgttctttctttcttttgtttccctttatttcttatttgctaattctcttcttccgttcttcttctatttgcatagaacatgtgccacgttcactgtcgatgagattcacatattccataccaaaggagcacatgcaaattcttaaaggtaatatcttagtaccagccttgctttgcttcgcctttgtcccttttttttttgcctctctatctatttctggacaaacatatgcatgcttctctacttataggtttccttttcgctcttatagctacgtacccagatcgttcctattatggtggccttgactatgaatgcaatcattgtggtgcattattttggtaccaagaaagggttgttagccagagctcgcacagagccaagaggattgcatacaatctgtgttgtcgtggtggaaagatctccttacccccacccaagccttttcctcctatcttacaagacttgattcgttttgatggcggtgcccgttccaactctttcatgcgactcatcaggcaatataattcattatttgcattcacatcgcttggggctaacattgataggagcataaacactggtcaggggcattatgtttttcgtatcaatggtgttgtccatcacagaattggttctctggttactgctcctggacaacgtccggaattcgcccagctgtacatatatgacaccgccaatgagctccagaataggcttaatattttttatcacactgatgatcctggggatgtccctgatcctgttattgtgcaagagcttatctcgatgcttgaccagttcaatcctcttgtgcaacagttccgtcttgctcgagacaagctgctttctccaagtgctcctgagattgctatcaagctcattgggtcagaccattctcagagtgaccattacagccttcccaccatctctgagttggcaacactaattatacctggtgcatcttgtgaggtatcaaagtttgatgtcattgtgcagaagcattcaggtgagttatgtcagttgtcacctattcatccagcccttatgtcattgcagtacccgcttctattcccatatggtgatgtgggttttcatactggtatcaagcttagagaggtagatgatcagccacccggtagttgcgacgaagcatcgatgcttgaattttatcggtacgagtcccactatcgaaaggatgagcccaatccattcacctgttgtggtaggctttctgatcagctcgctgcgaatgctttctcatgtatagagacatctcgactcacataccatgccctcaaccagaaaaaacttcgctctgagacacatcaaggtatatctgatgctgttgttaggggagacagtgatggaaaggatgttggcaccaaggtaattctgccatcaagtttcataggaggaaggcgatacatggttcaaaactaccatgattcaatggcaatctgccgttcttacggtcctcctcaaatattctcaactttcacctgcaattctaaatggccagagattattgaagctattcgttttgaggcagggcaaaaaccaagtgatagaagtgatatggtcacacatgtttaccatatgaagctagatgagtacatcacatctattaagaatggagaagccttcggtcccataaaagctggtgtgttacttgtcttattcatgatagctgtcctatctttacgtacatctccttcctaacacatctattgcttcccctaacacattatttgttcttttcttgttgctttgcttttcaattgtgtacactgttgagttccaaaaaagaggattgccgcattcccacacattaacatggctcacagctcaatctgaagaaccttcacctgcattcattgacaacctgatctgtgctgagataccagatataacagctgataggtttgggtttggtcttgttgatgaattcatgatacatggcccatgtggtgagcacaatccaagcagcccttgcatgaaggatggtcggtgttcaaagggctatccaaaatagttctgtgatgttactaccatagatgatgatggaatcctatttatcggacgacgcaataatggtcgctatgtggtgaagaatggtgtttcactagataaccggtgggttgttccttataatccagctcttctgaagaaattcc

SEQ ID NO: 24799 - DNA, 4572 bp, Oryza sativa
gagaagaaagtttggacaaagcgtaaaagaggaaccaagatagggagattaaagcacatccatccaagtactgggaagccgttctaccttagaatgttgctcatgatagttcgaggatgtatgagttttgaagatattaggacatatgaaggtgtgttgtatggtacctatcgtgaagcctgtcaggcacgtggtctcattggtgatgacgctgaatgggatcacctctttgaggaggcagttatctgggctacttcataccagctcaggaaccttttcatgactgtactagcacactgtgatgtaggtgatgttagggttttgtttgataagtactggagatacatggtagatgattttgcttacaagttaaccaaagctcttggagtacaacgcacagctattccagaagttatgttgcaggataccttgctcaaagagttggatgccatgttctcaaataatggcttatcaatctcatcatacaatttgccaacaccagttgattgttcaggatccagtgcagcaaacaggcttatcttagaagagctttagctttaaccaacatagcctccatcaagaatctttgtccatgtatgccagcttgaacaatgaccagaagatgatatatgacaagatttttgacaggatagaccatcacgaaaagtgtattttttttatatctggacatggtggaacggggaagacattcttgtggaatgctattatggcaaacatgagatcaagaggtgaaattgttcttgcagttgcctcttctggggttgcagctctgctcatgcctggtggaaggactgctcattcacggtttcggatacctatagatatacatgaccggtcgatgtgtgctattcgtagagggacaatcctaggagatcttattaggaaagcatcactgattatatgggatgaggcgcctatgacacacaagctgtgctttgaggcattggatagaactctacgagatattcaatccgctgatgaaccagctaatgaatataagccttttggaggtaaacccattttacttggtggtgattttaggcaagtcttaccggtgattgagaaaggtacaagagctgatgtggtagatgcttcgctggttaggtctgcactatggaagcatgttgaagtcttacaccttaccactaacatgaggctacataatccatccctgtcgcagcaagccaagggtgaattggcagagtttgctaaataggttcttgacattggtgagggtcgtgctcccatgaacaaaagacaaggtgaggttgagaggacatggatagagatacctaaggagttgctgcttactccctgcggtgacaagattacagctataattgatgccgtgtacccggattttgaattgaactatgactacattccttacctttctcagcatgcaattgtctgtcctgtcaatacagttgttgatgagattaatgataagatgcttgctaaagtgcttggggatgcaaaggactatcttagcagcgacactatttcaaatacacttgaaaagcctgcagattttgatctattgtaccccatagaatttctaaactcaatatccataaacaatttcccgaaacatcgcatatccctcaaaattggttcagctgtagtcctgcttcgcaacattaaccaatcactcggcctttgcaatgggataagattgatggtcacccgactcggtgattatgttttcgagtccaaaatcatgactggcacaaatattggccagctggtctgtattccacggattgtcctaagtgggaacagtccaaagtggcctttcacgctccagcgaaggcagttcccaattaggttatgttatgcaatgacaataaacaaatgccaagggcaaactttggggaatgttggtgtatacctcagaaaccctgtcttcacacatggtcagctatatgtcactgttttgcgcgctacatcgaagcaaggcctcaagttgttgatagaggatgatgatggcaagccttgttccactacaggaacatcgtctacactgaaatattatcgttgctgtagattaatcttattgtcagtttgtcactgtgactgcagctaggatactttgctccttttgttcacctgtttcttctatgatcccatttctccgtgttactgtttgcttgtgtaacttaagcaagaactcatggtcatacagtgttctgtccacaatgactatccgtatttttggttttcgctatttgttactgctttctttttacccttcaatgagttgttgttcatacttgttttcttcctatttgaccagttgattgttgcagtgtcttccatatctgcttattaattgttctttcttatttttgcatattcttctcttggatgcaatcagttgcttttaaacatgcctgcttgaaacactgtcagttgggaaacagttcccacctcgaaaaaaaaaagatatatcctgcaccacagttccttcagcaattaggactttatatcttcatatcatgcaaggtattattattattattattatagtttccctctaacctatgtaatgccttctttatgtgttgtagatggattacactatgctaagggatgtgacacaggaatcacaccgttggcaggtccgagtgcgggtcactcgcttctcgcagttcactacagcaaatgaacctgacaagattctgcgacttgatttagtcctgcttgatgagcaggtatagcaataagcacatggtcatgccttattttacctccatgctatttgtctcttacacatccaaacatcaacagggggacatgatggatgcgcagatcccaggacgtcatgtttctcaattcaagcctttgctgaaggaggatgctgtgtattacatcaagtacttcgaagttgctgaggcgcgcccctagtacaggcctgttgatcggatggtcatggcaaaattcactgcccacacaaccgttaaagaagacactgaggcaccatccacagtcccatctcatgcttacaaggttctttcttttgatgatattctttcaggtgactctgtttggtccagatcaatctatctcattccttattagctttgtctattccctgcttactgccctcacttactcatgtgcaaattttatcccttatactactcctgtagatgctataggtataatgacacccattggaccagtgcaaactgtttcttgtggaggtgttatgaaagctgtgcttaatgtccacataaccaatggaaggtatgtatgcgttaatccactaattgttccagctgcttttgtattagatacaaaatgacttaattgtccgcacatgcattgtcagtttctttttacacatgtacaatccttcttttttgtttataatatcaacattgtttcacaactctcttatttgcaaatgtgaatactagcttaattcatgcacattattttccacctcttcattcttctatgtgcctacagcgaaactgctgtcattgcattgtggggtgcccatgatacacagttccacgctgaaaacttacagcagcaagcaaaccatggacctgaggtagtattgtttgttggattaactgttaaattccaaaaccgtaaaaaataaattcttaccctattatcacctctcctatttacatatttgcctgttcttgcttaaataatgtactctttcatgcttgccagaccagctagccctacaaggtagcactgtttgtaggtggtatcccaatgcaccaatccagaaaacaatttctctcataagcaggtatctctttcctgcactctttccattcacataaacatgctcttctttgttcaacttatatcttccttagtttatctgttatatggatcaaccatatttccctagcctacaaaccaaaacactaatctgtttcatatttgaagcctccatggtaacccacgggtggtaagggcaatagagccgaacttcggtcagaaagaagctgtgcatgtaaaagtttctgatatctgtgaccttaatccccacgaagccttggtaatatagtgtacctccccacacctaatgattacattgcataatttccatccatgtgttatcagtgccatcctttacttcctctgtttctcgcatgtgaaccagggcaacagctatattgtcaagatagccatcaaggatttagtccctgctgaagcctggtggtaaatagcatgcaacacctgtaagagaggagcaggtagagatgggaacacatataaatgctcgaggtgcatcactaatgcaattgaaacaaggtactcttaccacctacacacgttcagctcttctcaattgttttacataataaaccattcagtatgctacaatttgagctatagaacataagacctacttctgctaccttatataataggtacagagtggctatcataggtgtcgacccatcagatttagcgaaccatgacgccaaaacagctgagtttactttctttggagaaattggctaccagttgattggcatccctgttcttaacctggttgcatctgtccaaggagca

SEQ ID NO: 24800 - DNA, 13708 bp, Oryza sativa
cccttatgctagcctcactagatgcagcccacacaagtactctacccagccatgatgcttctatggcatcttctcagcatggctcatcaccagctgatgcaattgaaccgcacacgataattggctcttctctccaatctatgacaccttctacaccattggtgcttccagatccaaaggtataatctaatagcttcattctgcagcaatgtgtactctcttgcatataaacaattgtaaattcttatattaatattgcttatgcataggccacaactgatagccgtgatgatcatcatgggacaacaccgcctacttcagaggctagcactatattctgtacttagagcaaatatgtatgtctgtcccttatcaaacctaactgaccactaatgctttatcagctcctggctatggcacaactagacaaaaaacgtaaatcttctgcaattgatgaggatcttgctcaggaagggtaagtgacaatgcacagtttcatatttacgttccttgtttttttttctttgagttttctcatggctcaaacaaattgcatctgtagttcatctcctcgtgaacatgattgtcagaaagcatcagttgtgcgtgcgctgttcgtagacaaactgcccccacagcccccaaaatgtaagtaaacgttgttagccaactatatattacctgtgtgctcatttgttacagaaaaactgactctacattacattttgccctttaggacttgagggctccatataatatcaccccaccaaagcggtcttttgcacctggcatgccaaggcgtatactcctgtccctgatcaagcaagactaatgctcacatattttgcccaatgtattttgcagtgggaatataaataggggatgtgttcttttgtgcaagccattagaccaaatgacattacttctacgtcttacaggcttgcgagccctagtggctagcagaacgataaatgaattcgtataaatagtatgtggtgtctgtacgatatgcacgttctaatcaaatatcgccagaacttatactcttataattggtgctatatctattcgctgcacactgtttcccaaagtcttcttatgtttgtgccggaaaaacacaatttcctactgtttcttatatatgcagcggctatagtcaaccatgtgttaccaaatacttacgatccgtgcatcgattagcttattcttgaaaaagcatacttgcatattcctgaaaccataggcacactctatttttctcccttttatgtccaaagcatgtggtcaggcactattctatttttcagcaattcttttcatcaaaacaagcacccatgccatttgagagcagcagaccatttacatgcacatattaattgatcacgctgttatagtattcaagaatttccagataccgacaaacatagctaaccaccatacatagaaattatagggctttactacttacactaccattccatcacagattacatatgtctgactatatactatagacaaatacataaccaccatatatcatgcctacatgctgttccatgcatacacacccagctatacacaactgctgctatataacagacgcttattacaatcaactgcaggatccctactgataaaatactggacataatatcagtcacaacatctgttgttttcgctcagcttagttcccaaaaacaatccatgcaggtctccttaggcttagatatatctagcagcaacactggtaagattagccaacccttcgtccacaaaagattcagcatattcaccaagacggtgcacatcgtagaatactccaacctcacgatgactaagatcatcagcatcaggacctcctagaacaaaagaacatatgtcatcacatatttggttgacagaaccccaatgaatctaaagctctatcccagccgatttccagcaaccgtgccttctttgcaagagtattgcatttcttcctagctctcccaagagctctcttcagtcgctctgtctcaacatgatagcgattcatgtcaaaccagtttgtatcatcgaactccacactacattctttcttgataacagaaattaaagcatgtgcagcgctttcttccgcatcacatggtcttatagctgaaataccctgtgcacgaacaacaaaaggctctccaactcctcttgcaccataaacagttgcctcagcaaacccaacatagccatctgctacagcacggcaactgtatcgtgcctcatttgcgcctatgcctctcaaaacctcagatagcaacgttttggacctgatctgcacgagccgacgctgctctgttaaaccataacaaaaacaacatcactaaccataccgacatcataaaaccatcccctttcttcccctattcctaaaacttcctataatcatccatttatatataaatcatccaaatcaccatatgctgctataaagatccagatcaacacgggtcaactgaaaaataatcacacatctaaaaaaacaagcccctcgtacacagctccttcagaccaaacaagatgcaagagaccgaacaaaactaacaccacaaatttataagagtatatctaggtccccaagattaatcggagcatatacaaatacattaatacacataccttgtgcaggttcctccgtaccaactggatagtccctcttatagcaacaagatctaacaaagcagtagcagcgccgccgcaaccactcagtataaagaagcagccagttataccacatatataccagcctcagcaaagcagatgcaatcccaccatgacacgttgccctgggacaaccgagcttaactcaaaaaggccgtgcatcataaatcccaaaaccagcccactaattatgggactgtacatctttaaaagcccaaggtcaaacataaaaggaaaaggccataactcctttatggcatagcacgatcaacccataataacagcttgacatacctccactaccaaaaatacgctttccatatactgcaccggtacgtatcagataaaacccatctcttagcagccgcgcagcgcgctacgcgtaaccgctctagtatatataatcctagtcggagacggagtacgcttcctccccttttcctctccccgcagtaggggtggaaacgagccaagccgagccaagctcggctcggctcgtgaaagcttgctcaactacaggctcggcttggctcggcttgattaattgaacgagcaaaagatgcagctcggctcggctcgtttcaaagctcgagccagctcgagccagcttgtgatgtcatgatggacggcgtcgagtcagggacgccggcgacgcagggggcgtcgagctcggctcgagcggcactggggacggtggacggaggccggaggtggtgcagggaagggaggcggcgccgcggcgggccgacggcacagggggcgtcgccgtggagggaggacggagccgacgcagccacactaggggaggtaggcggcgcagggagtgaggcggcgagcccacggcgcagccgcgcaggaaagggaggtggcgggccgacggcggcggcacagagagggcttcgaacggcgctgccggcctgccgctggcggtctggcgctggggaggggatggatgcggcggccggcaactcctcttgccagtcgccgccagcgccagttgaggaacggaggaaccgaggaaggggagggatcggatctgctcgcactcggctcagctcaggagtcaggacttagggtttctctctttcatgggccagacaattgttaatgggcttgggctcgctcagggaactcagttttccataggcttgacaagcctaccgagcagcttgcgagctagctcgggctcggctcggtttggaaacgagctgtggagggagctcgggcttggctcgtttagtcttcgagccgagccgagcttcgcgagctcaagccaagcccgagccgagctcgcgagcccgagctttttgtccacccctaccccgcagccgccatcgcatctgaagtataattgacgccataggtagcaaagctccaccctctctttgatcgatcgatatcgataggcagcagaaggggagaaaaggaaaccgatctcggtcatggccacgcccaccactttggtcgccgcctccagccatcgccgtcgtcgccggcgtggatccacaccggcacaggcacaggcacaggcaccggcaccggagggggtgccggggtggatccttctgaacagcggtgcccacatcggcagccgctccaacgccaccaccgccgtcggtgaggcgagggacaagctgacgatagaggtgtccttgtggccggcgcagccgccgcacccctccgacgtgttcgtgtgttgcccgggcgtccgccacccccgcgaatccgagatcctcttcacggcccaagatctgctgctgctgcgtgtcccggtcgccgccggggctgcgccgagcctcatcagcttcacggagtgcgattacctcatctaccgtgccgccgccggcgaccgtcgtccgtcgctcacgctgctcccgaatccaaagcccaactacttccacgacggggatgtcggcatccttccccgaggcgggggcgagtacacggtcgcggccctggttgctagacgacgccgggggcaggtggaccaccaagacggtgtggatggacgacccgcggaggcctccccctgtggagatccccatcaacgcaaggcggctcaaccaccacatcaccaccaccaccatcacgctcggcggcgagctggccggtgccatgggctgggtcgatctctggaccggcatcctaatctacgatctcctccatgacgacaaggaccaagaccggccaacgctccggcacatgccgctgccgctgccgatgcacgccatcaccggcaaccacgggatgggcgacaagctagccttaggctgcccacgctctctccgtggcattgcctctgtcacgaggcgcggcaaggcctgcctcaagctcgccggcgtgcatgtcaccggagagcgcctcccctacaacgacgctgaaacccagctgccggcgttcgccgtcgacgactggactgtcacgacatggagcaatgacaagatgaagggctactttgaggactggcaggaggatttcacgattcgcggttccgaggtcaggattagcaacgccatgcgctcggatctgctgagatctgggttgctgtaccgtaaaccgtcacgaggggatggcgatgaggctacggtggaggagctggctttgcacaatctctgggtgtctcatcccacccccagcctagatggtgaagaagatgtcatctacctgctggccaagccaaagtgcttccaccccaaggcgtgggttcttgctctcgacacgaggagcagcacgctgctaggcgtggttgagtttggcactgaaaccgcaccatctgcaggtgtcacgtatcgccccagtactatatccaagtacatgagtctggtgacttctccaggtaattgccatcatgttatagcagcacatgcctcgttccctcctcgcaacaagtgacatttctctacgggcaaaactgactagcgagatatcttagagaaaaccagtctttcagtgacctgtctgtggacaaagactttccttttgtcttagtagctactagctggttgagtacatttcgagattaggtgatgatcaaccaattgaaaaaaattacattggtatcatgcactctggttacatgctcttagttcagttatcttctgttctttggttcttaacctgccatatgtagactcatatgcatgtatttttctatgtaaggaaataaattggcattgcttacaaacattctagtcaatgtgtgggtaaatgaggaagatatatcatatgcacatccaaccacacatccatgcatgagaccgagatatgctccctatgtacctaaatcatatactagattcgttctgcttgaaccagtttagttgccttgctatatttataatagaaaaaattactcatttgatgcagtgatgctagaatcagtttagttgccttgttgtatattaatagaaaaattactcatttgatgcagtgactgggagaacttaaaggatgctgctgctaatcactgaatcaagatggtactgctggcctgtttggaggcgatgcatcgaagattaagactgaatgatgttgttacacatatactccctccgtttcataatacaagactttctagcattgctcatatttatatatatgttaataaatctagacacatatttgtatagatttactaacatctatatgaatatggacaatactaaaaagacttgcattataaaacggaggaagtatatgtttacaggggtcttggcaattttgcattcgggtgcaagaaacgtgtttgtttccctgcgctggtggttaggagtatttatgtaaatttctctagttggaacaaacagccagtagcttgtcgatctgttactaacttacgatgaagcatcatcattatcatctcataaaaacttgtaatgggattttatattcgtgactatcacgcactttgatttcggtgagaagagaaatccagaaaattgccatcaactcatctctgctattgttcttgctctgctcggttgatcttgccggttttactacagcgtgcgtagacacaggggtactaaggctgtgtttagatccagggatgaaaagttttggcgtgttatattagatatatggacactaatactaatttgaagtattacacgtatactaaggaaggccgtgtttagttattttggcaaaaaaaatttaacgtatatagacatacatttgaaatattaaatgtagactaataacaaaacaaattacagattccgcctataaattgcgagacgaatctattaaacctaattactccatgtagcaccacattgacaaatcatggcgtaattaggctcaaaagattcgtctcggaatttattacatgcaaactgcgtaattgattttttttgtccatatttaatgctccatgcatgtgtttaaacatttgatgtgactgaaaagttaaaagttcgaagggaacaaacgtagccatactcgtcttcgaacacttttccaagtcctgaaatgcgatcattgatttgatgcagttgctgaatctgctgaggtgggatttccatttcaaatctatcatgtatttatgggcgtgcatctacgcttcagccacattttaatcctgtctatcaagctccgtttcttcctttaactaaaaagaaagaacttttttttaacccaaacaacattcttgaaggcctgtgggttaggcgtgagcgtgaaacctgtcaaggcttcgcaactgtcatattggtgatgccgtaggaatgtaaggccttacagctttggggagataatgtttataatcctccaaggaggcatatatatttctcttatgcagttttgatcaatgcacttactttggaacctcaaccatatgctaagcatggaatctaataagaatataggaataattcctcatgttgccaccggataagatataatgagcagtgtttcatatgataagatataatgatctccaaatcaaccgagcagcaacaaaatctactaacagagcagtgtatcctatgataggattatcagtagctatacatgcatttgaacaagcaagcgctgagacatagtggagcgcaagctaggaacaaaagtcagaagtcagaacccatcggtcaccgaagaagtactggtctgcatgccctctgcaatcaataattgttcattacttttgttcctaaaaaaaacatagtgggataatggaatttaacatcccagcctttacaagctacagccaattattacattatatcaatccagaaaagaacgtagttcagctaaataggacaccaaacaaaaaacagaggaaactaagccaaaataaggagaacacatttattttaatctatttgtaaacctccatccataattggcaaataattgcataaccatcgacttcaacttgcggcatgcaacccttagaaactccccatcatcctcaccccttggtagctgtgcccaaaaccggagccagtgcgttgccctgaaaattacctgcatatatgaaatagatgatgatttattaaaaaccaaatcatttctactcagtgaagatcaacaaacggatgaagaaaccatcgtgccatttcagttttagtccccccttcctcaggttagtaccagcggctaatgctgacacctcgatcttgtagagtagtagtttacatctgccattctatccagtgacgatgcacgcgagcctaaaatgctcaagcataagaagattgccggccaaaaaataaaaacaaaaatctgatacaaaacctcaggctctgcttaggcggtcagctgcattgacacaaaacgtttccatcagataacatgaaaaaacgaaacctaaatgaaacggcagtaaatgaagatttggttagcatgcacgaaacttgagataaacattacaagtagcaacctctatccccccaccctctcaaagcgaagcaattattgtaatattaaaaaatatttagatgtgtaaaagcatgttcattcgggtaaacaggtactccctccgtccaaaaaaaaactcaatcctgggtttggacctggacgcatgtgtgtccaggttcaaaacccaggattgggttttttttgggacggagagagtatgtcgcaagtggatggacaggtagccaatatcatcctccagtatcccaataaacttcagttatggttcctccattgctgaaaatagataaagagaatatctactactccctccgtttcacaatgtaagactttttagcattgcccacatatatatagatgttaatgaatctaaacacatacatatgtctagattcattaacatctaaatgaatgtgggcaatgctagaaagtcttacattgtaaaacggaggaagtagctaccatgtgcgatgcttgttcataacagaattaaatagaaataagatggttaactttagctatggttcttcacatcatacagattaagacgctggatttaatttgtaatgtcgaatggtcaattagattaatatgaaaatatatagggaaatgtcactactttgtattatgacacccatgtgagcatgaattttgttttagaaaactgtcaattaaaaatgaaaccaccacttcattacacattcagtaaaacttactcagaatcctcaaacattgtccaggttgtagaaaacctaaaaacaagagagaatagctgttaaaagtacaaaacgacatgctttttgaaaaaaaaaagtggcaaataaatcttacgggccatcgatatcacaatttctcactataaacaaaatcaattgtggcacaaattttgaaaggtattccccaatcatcaaagcagtagtaactatgtccaggacagtcccttggtccttcagagaacaaaaaaaaagttagcagactatttgatgagggtattgaaaatttccagaatgaacaaagtgttttcaggaagagacaaggttaaagcgaggctggatcattaggtcagtaaagtaataggacgattacaaagacaaagaaatttggtcaagaaaaaagctcaagaaaaggtgaattgaaaagcataatatagggataaatggtcatccctaactctgcgactctttaagagaactacaactctccttcaaagtcaccactagacccctcatctccagcacacaagccacattcttctctagactatgaatgcagggatgatagttcatttgtgtcaccctggcacatcatctgctatccagcctatcgctgactcccagattttgcatcctactgagccagatgcttttcatcaaggagcaattaaaattgggctgctgcacatttatttataaggaggtatagttgcgtcttcgattaacaccccccctccccaccggaaaacaagcataggtggaaaggttggtgacttggatgaagtaaaaaaagaaagagagaaaacagaaacatgtatttacctttgtgtacctatgggcatgctcaataaagtttctcagatatttcagcagaaaccagtagcctaactcataaacatccacaaagaaatgccaatagacatttgaaaatggtatgccaaagtgtctcacacctctccattctatcagaagagtttccgagacttgtaatggctcatacacagtgtcttgcggtttgcgcagtgaatcacaatctctgtacagatggcatatcaaagtagaaagagctgctggagacatgaaagctggatgacagcccaaaaacctttgaaacttctccagcttctcacgctcatgaacttcagggacttccatacaattatgctgaaattgtagaaagtaacaggggagaactttcttcttttcaccagaagctgaatcgatctcttcatgctcgtaatatgggaaaataatctcaaagaagtttctgaagtcagcttgcatcccttccttggaggttgtatcatttggcacttctgtgataacaaaatctttgatatcattcctcactttcatatgctctgccttccatttcccattccagcacaggcccttcttatgcagcattagcaatcaaatgagaatttcctttgcatttcctactgagttcaaggtccaatacaattctaacaagcctggacaggtattcctcagaaacaaaaccgttgatatctggcttgatcttcgtggtccgagtgaggatgatatagttaacaatcgccaagagagaggaggagccattcttatcatggcatataatttgttttatgtgcccaccataactgatctcctctaccttgtagacagacatacctgaaagatggactggtatacatggcaacaaaatttacattatgtaatgtaaatgcaacaatcttgacaaggcatatgacatagcaatccaacgaaattgaaatctaacagctaaatttggaacatctggaaaaggaaatcctcaatagtagaaaagaaggcgaaagggacgaatacacaggagtgcgcacacgaaacctgttcgccttctcccaacgggcaccaaccagcacaggcagggtgtacggcggcgcgcgcacccacttccccgcctgtctctcccagcagctcaccgccgatctctccgacggcagcgcgcgcgcaccccacttccgccctgcctttcctgcggcgcagcagctcgcgtccccgctccctccgacggcggcgggctcggccgctgcacggaggagaaagtgcggcgggtggggtttagcggtggcttagatctttcgcggccggggggggggggggggggggtggacaagcttaccgcgacttgagtttggtggcgacgccgaccagatcagccggcaggaacgggtccgacaagcaacattagcggccgcggtggcggcgatggcggcggtggcgtggcggcgatggcggcgacggcggagcgcgtgacgagggttttgcggaggaggagggttttggtggagtcttcgacagcaagcgaaagtttatggccggtctgatccgatccgatccgctccccgtatccaccgccccaacatgctacctccccaaccctccttgatctctccgagtaatttgttttttcgattttgctatatcttacctgaaagattttttcttatctctcactcgatgttctcacttaaatttacagtgcattttcttgtaagttacagtgtaatttatgaaatttacgctgtaacttttgtaggttacactgtaatttgtgaatcttcgcatgtaaattttaaaatttgtattggatttgatctttttcttgaggatatggtaatttagtgtccattatggtgtttcttaattgctttttgctttttattatatctatcggattttaattaaagattaaaaatttgtgtgatatgataataaaaatctttcgaaagatgtataggtactcccttgttttttttattctctctcttataacattgtaggactacaaacgacacacttataacacatgcataaattatctctgcgaacacatatagtccctccgtccaaaaagaacatattcctagcatcccaaggttgttttagttgagatagagaaatactaaaatgcccttggacattgaaaaaaaatagtaggtgtgataggtaggtaaagggtattgaaggaataaaacctttcgttttacgtgctgagtgtagataggatggtagaagttggtttttatgggacaaaattcaaactctagaagttgagttttttgggacagatatattggatcagggcctgtttagtttatgaaaagaaaatttttgggtgtcacattggatgtttgaccggatatcggaagggttttcggacacgaataaaaaaataattttataactcgcctggaaaccgcgagacaaatcttttgagtctaattagtccgtcattagcacatgtgggttactatagcacttatgactaatcatgcactaattagactccaaagattcatctcgcgattccctcctaactgtacaattagttttttcatttatctacatttaatactttatacatgtgtccaaagatttgatgtgatgttttctggaaaaaaaatttggggaactaaacggggcctcagtatatcttaatataattattattcgtgtatagctattgatgggtatattgtcaaaaataattagccatataaatacaaacactcatattaagtagtactctaactcggtgggttggttctactataagtatctaaacagttaagttaagctcaccttattctctcttttcacactacccaaattattatgcatcaaattttaccactctctcttcaatcttttttttaaaaaaaactatacacacaatttaacccggttttaaattttttatgtcgtccaaacaagaaataaatagaaaaactgcgaaggggaggggatcctgagctgcattgaagatgaacagcggtacagattacacgactaaaaatgtataaaaattacatactccatccgtttcaggttataagatattttgactttggtcaaagttaaactactttaagtttgactaattttatagaaaaaaatatattataaaaatatattcaattatagattttatgaaattatgctagtattgtaaatattactacttaaaaatatcacgaaaaattttataaacaattagacatttacttctaatagtattacacatatatgcaaaatctcgtattcaaattcactatattttagctgtaacaaaaagatgaaaaatttgacaattttaagagtaaaaatctgttaatattttgtctttttgttactgctcgcgtgagtttgctgcttcgtgagttctacgcatccttgggcaaagctggcatgcatcttattagatatctaatacagttcgtttcaaaaaaaaaaaaattctactacagtatgtagttgaaaggctactacattgggccattcctcatattaactgttgcctcaatgattctcatttatactccctccattttttaatagatgacgccgttgactttttctcacatatttgaccattcgtcttattcaaaaaatttacg

SEQ ID NO: 24801 - DNA, 27118 bp, Oryza sativa
  unsure (1)..(27118): unsure at all n locations
ggcgtcatctattaaaaaacggaggtagtacatgatgttgattgctctttatttgattaagtaatgacaccctcttattgtttaaaaaaccatcaagtaaacacttactctacgaaagttggtctctttcccattacaatgctatctaacagcaataattctgacaattttcagcccaaaatccacatccatatggctcccatgcccacattgtacagtgttttacatatggttttggtgtcatcccacctttccatgccctgcttatcagatcgacgtccccagcgtggtcggtggattccatcaccatcgttggagagatcatctgggctctcaatttctacctacaatatggggagtggattctacccctcgtatacctttttcttctaaattcgatgcaaatagttgtgaaatttttttaaaaaaaattaacaatgtagagtataatgacatctactactccaccaaaattcaagttcaaattcgatctacacatcgagaaacaaaaaagacaaatttagatataaacaatacgctactattcatacgctaaatttgtttatatctcgacgcgtgagttgagtttggacttaagattttgtggagttgtatatatgtgttgtatgaatgttgtcaaattttttcagaatttttcataaccgtttaaatattttttaagcaaacaagggagcatcccctcaagggattagaatagtttccccctacaatgccacccttattgtggtggtgatatatttttgcttgacctgaagtaaggtatgcatctttcttactttattttctgttaatccctttttgtgtacgcaaagtttttttttatggtattcaccttgatataagttgcaatatattcatatagtatttagttaacatcatgaatatttttttctcaataatatatatgcatccatccggcccgtctataattttgtgcactcattttaggcatttttctttgtgaatatatgattatgagtcccaacttcaaagtatatatataatatatatcatctacttgatttttttttaccaaagttacacagcaaaattgtttaactactgcgcttttgctttttaaattaagttatataattaacttatttcattcaggcttcattctgcgctttctggaattgtttcatccttcgtcatcccacggtcatccgtactggcgcagcatgcctccagccccgccttggccgaacctagcaccaccgccatgtcctctcggtgtgtttcttccttcaatcgcaaaaagcaattccctactcctccctcattattttccgtgattttacctttcagttcagctttaattcgccggatttaattgattccaatgatgtctagccatcgagcttatcctgactattttcatcctgaattttatgaattcgctctgatgttggagaaaatagaaagaggagattgagtggatcaaaagctctcaatcaattttaggacatcgataaagattcgataggatttggtgggcaaggttggctccagcatcatatgggcatgggacggaattgtcttccgacactagctagtctgctatactagctgcgtcttcacttatgagttgggtcgaagagaggtaggccaagggttttcaattataatgtatatatagcgatcctaatgttttaatttattgctcagcgtctaatagctagtgtaccataaaagaattacacattgtgacccacggatattttttctagtataattctaatactctaggatgatacatactagtataacaaccaatttcccactatccgttctattcctggctatggaagccactttggaaccgcagtgctctatattagtatatagtagtaatgggtttatgaaaacacaacttgctggttttttgtgattttccacaaaattaaattttataatttgacatatacaaaagaaaaagcaaatcaccatatcatgtgtataactttgacctctatagtaaatatgctatggctgctttttagctctaatataactttgaccatagcatacatgttatctctaatatatttttagtacaactttataagttaaatttggaattatgtacatacatatttgttgagtgatatatcacaaattagtttatttttttaaaagaaaatattttttgactatttaaataacatactatctccgtttcaggttataaaactttctagcattgcccacattcatatagatgctaatgaatctagacacatatttgtctagatttattaacatatatataaatatgggcaatgctagaaagtcttataatatgaaacggagaaagttatgtatatacaaactagtttatttcacaaattagtttatatttgttgagtggatatgtttaggccggattcccttgcacggaacacacctacgtaacttctcacaagaatggaggtttgcctccatgcatgcatataataaggtgtattaattaagtaaataggatatccacctcataacgggtatccgtcaaatgtgtggatccatacccaataagatgggtccatatatgtccatatatatcactctcagcagcatatcatcggacacattttctctgtaagagtacgcaccagtaaggtcatatggaccgcatacatgctgaacggaagaaggtccggatttgcagttgcattccggatttgtacatccaacttttgagcatcgaaagatatactgctatatccgttttatgttataactacatctattttatatcacaagttgtttgactttttaagtttgatcaagtttgtacaaaattataataatgtttttaatacgaaacacacatattataaaaatatatttaatgttatatttaataaaactaatttgatgtagatgttcttaattttttctataaatataaagttggtcaaacggtcaaacctacaaacctttgacaagaaaaaatataaccgatttgtaatatgaaatatagggtgtaattgacagccacagaacaactaaacgaacatttatacatgacagtatgtgattgatatttatctacactaaaagagagagtcggcttcctttttatgagaaatcgctttattggatatacacatggtcctagcatcttcaatctccggagacaacactaattttaaatggaccaagcatcttcgtgccaactttaatatgggcggtctttaacttattgaaaaacttatgttgtcacctttcaaatgcatctggcctcatattaaaattcatcctaagtcaactaaaatcgtaaaaacaaaataacattgtagctgaaacaaactttagccttaggccttgtaatagactaggcaaatctcagacgtgcctctctccacctccacaaactagaacctagccctagctttattttcatctagactaaatttcacaaaactacatatttaagattaagtatcataaaactacatatttaatattgaagttatcaaaaaaattatatatcttagagtttaaatccctagcaccattgttatggtgaagctataaacattatagttttgtggctaaattgattctaaacctagttttattatgataactttgttgctaaatatgtagttttgtgacaccccatcctaaatgtgtagttttgtgataaatttagtattaaatatgtagttttgtgatacaccaagttaaatatgtaatttatgatagtttggtcatagtatctgcagttttgtgaaatttactctttcacatataaatatctatgcacaccctctaaaataattgaattttgtttagttgaattttgccaagtaccagtcacgttgtctctagtcctcggtcaattagtcggcaactatagttttagagtcctcaatagttggtgtgttaatttaccgggttgatttaatctaccatttcaatcgcaactattcctttgtgtcagtgacaaggataagacatacctcctatacaacaatcccatatacccgatagtatacgacaagatatcatttaaatgaggaaatacaggggataaagaaggaaattgtcttctcgaaatagaagatgtcagaatccaagtcaaggaagataatttctccttaggcccatgtttagtaagaaagtaaatgcattggatgaactagtgacgacccctccgaccactagtagatggtgcgtatcggtccaccggtgtcctcttttgctgcgggcgtccctgggcagcttgcgatgactccggtgcacccataggctgagatgcaccgatctcttcctgtttttgctcctcctctttgtcatcctctccctccttcctcttgctcttcctgttcttcctcccctctgatccccttcctcttcatttctttgatgacttgtttcttcagcttgtgtgtgcgtgactcttggttgtgggtcgactgttgtcagggttacggataccacatacccaatagtaattgactaaactcggcggggcccaccatataccaagtcttatatggaatcatgccccatatataggagttccggataaggaaggacaagtagagttttatatggaaacgacaaggactactcggattgtatccatattggtctccgtagttctacttggataaggagacatctatggatataaatacaagaccccgtagggggagagaggatacaacaacaaatagacacacaacacacgcggccagacatcgacatcagagataagcctagacagaccccatctggtgcctacggaggtcgacaagagggatctagaacatctctgatctcgacgagttcatatttgaggaggaagactaccctgccgtcgactacgtgttggttatctatgccgtcaagtcgacggcagctagataggttatcacaaatattgtacttgtgtgatccagataaatatatagagcaacaccagcttcggccaacaggagtagggttgttaacttcctgtgaagtggcccgaacctgtatataatccttgtctctgtctcttttacctcaatctcgcatataccctggtaggctagtaccgacgatccccatatcatgcaaataccttagtcgagatctcaaacatcgacagtggtgcgccaggtaggggaattttggtgcttcaaggtttcaacgagatgggttcaagaggtggattctccgacaacctctgtaagtgtttgtatatgcaatatttgtccattaatcctattttcttatatcaccctgtcttgaagtcgatcctatcgttcctttacgctactctcaatgcgtattaaccaagctgcataaatcgggaattggttttcccaacttcatggctagggcctaggatttcgtcagcttctattgacacgaaaaacacgcactggcctgagagatctgcttaactatagtgcaggtccaaagaaattgccttcaggttctgagcatgccagctggtttgatcctgcaaccaacaagatagaaaaaagacaaagagttaaatccatcaacggtagccaatcggtaggattgccgatgacgtatcatccgaggccatgccgatgtaacttgcgtcagatcggcagaggcagattaaacttggagattgttgggtgtacttgatcgactgtagatgttaacgatacgtaatccaatccaatgggacacgcttagatcgagtgattgggatagatcagtcgctgcaccgagacagtataaatcactccatatctaaatgtgccccaaagtagggattatgcatgctcgcagcatagccgatggggcgaacctaacttgtatcggctaatactctaacaccaccttataccaagatattagcacagatgaaatatacaaaactgaaaccaatctagcaagcaggatgaactagcagactgataggaagcttaatatactttaaatggatgagatcttgatataaggggcagatttagatgatccagaaccaaataagaaaacaagacgactaaatcaagtgagatcggctgaaactccgatgctatctctattagcaatcaaagagagggctagataaagcgtttcaagacagtacttaacagatcgaacctaaccgatccagcattaagcatgaaaagaaacataagatctaatcaaatcgatgaaaactcattcaagatggtagatacaccgcatagtctagcttgatatcgaaatctaaacctgccagctgttttcgatgatagagactagccgataaagcttagataacaaggccaatctagattatgcggtatatatgataactcggtggtttacattgacaggattagagtgccatgaagatgtaagcactaatcccgagaacgcaaaccgccattgaaagttcaagcgccattaatttggttttggtgattaatgacaaattcaatcacatgagactaatattgttataagcatttctttgtctactagtctcatatggatatgaaagtggaatatgtgagatgtgattttcggacttcatatgagttgagagagaaacattcattgatggtttacctaaatcacaaggatgaaatgcatggagatcaagctatatgtatcactctttctctccgtgcacatattgatatattcatatataatattttcatgtgattacataaacatgtgagactaatattttgtttgagccatgtcttgtttagtctctttacattgagaacatgtagatgatgaaggtatgcttttattttaatgtctatatttgagaaataccttctattcttatataggataagctctcaatgttttatatcttgttatgcatactcttacttcacacaaatattttgtatgcatacatttagggggagcaaatcctatactttagttatgcacgtaatcgatccaagttattcactttcatttaattgggatctttacatttgagcatacattcaagtatatgacacttgtggtgttgattagtactcaacatttattcatatccttttatatacgcgatcggttggtcaacatgtggaggttgacatccggatcattgggactaataattttattgagttgaatgagagaaataggtcccaaggattgcaaaggtgttgatgttcaagtgatatcattacacctaacgataccaagaatgacaaagtgaaaaatgttgaagatgtgggatacgaagtggctactatggcaaaacggtgaagggcaagcgatgctcggtcacgatggaccatgcggcggtaaagggcaagcaaggggcttggcaccgaataaccaaatccggtggtgaagggccagtgacggctttgtcatgatggatcgtacgagaccatttgaagctacaagtaaccacatcaatcatttgaagaatatatggtgaaacggtgtagacattggcgtcccttaagacaatgaaagaaagatggaaagaaggcattcctattggtataattctcttcctatttacatttgagtttaggaatgccgtactattaagagagatgcaacgtcgaggtgtttgtgtatgtctcggtgctcaaagtgacctatcatagtgctaccttgagagaaacccaagctttaacctatcctttgagtggttgtagaccttggttttggttgagttgggtagtcctctcagtgagctttccatagagtccaagttcatcaaaaacggactcccgagcgaaaagttatatctgtttttctctgtgtttttcggaaattccgaaaaaggatgcgaaactgagatttgcttcagtagattttcggacttgtccgaaaatgcttttcggaaaatccgaaatttacagttttggccttcaacgactagtttttatgaggctcgggtatataaactcctcgacccctcctttgagtggctgttgttcctgggcaacattagacacatccaaagccaaatagccatccctatttccctacctttgtggtgccttttgtgaaggggatttgagaagagaagagagttggattgagagagtgaggagttgagagctagcgagcttcactccatcctttgtggtgcctctttgtgagagggatttgagaaggggaaagagttggattgagagattgggaagttgagagctagtgagcttcactccatactttgagcactctagttcatagcaagcaaatcttcgattgtgtttgttactcttggggactaaggtctcctagatggtcaggcgtcgccggtgagcacccaaggttgtggtgtgccacggaaagtttgtgaaggctttgatttcgcctccacaagggaagaaatcaagagtgaaaccgaggagtgcatttgtgcaacctcgtgaggaaagggttgaaatagacccggccttgtggcccctcaacggagacgtaggatccgtggatccgaacttcgggaaacaaatcaacgtgtctcctctcttggtttgctcattcttgccttctctcatattgtgcttgagcttgtttttacccgatctacttgcatgcttaattgatttagttggtgaccttatatcttgcttagataccttatttgtcaccttttgattcatatacattttgtttattcaagctacaagttcatagctagtgttttatcccgttatctgccgaacctttcggttgagatcggaacttccaatcctataccggaagttccgatttgaatcaaaagttctcatcactctaatatgctatgaagttgtgataattttaggaacgcctattcacccgccctctaggcgacatcaaggtcctttcagccataacaagctttacctcttcgtcgaagatcgtacccgatgcagctcaactcgaaagcaaaaaaactcatcgaaacaatgaaaatagaaaagggtggcaatgcaccgaagtattattgaactatcgtcctttgattacatggtgtcgggtcatatttatacccgaagtacataacatgtacttgctggacacgactcttatctctaagacaatttaaaatgagtccttcagggggactcttaccaaacatatctctaaggaaactggaaaatgtcctagttaatagatacaattgtcctttttaggactccagtccttgtgtggcaatggctatgaagtgctgcgaccaatcccgacgacgaacgtgtgaccatctttcccgagacaggttgcatcggcttgactctgtcggatccggcgcttagccgatatgtggcaggcgatgctgcttgtaaccgatgcgtattctttctcgaacggaatttctccaactcagtcttgactctagctttgaatccatgatgtggtattaccaaatttgttcgttaacaacttcagcttggtttgttataagatttaagctgtctttgtggaaaaacgatttttccataaagatagctgggggctaggaagagtaccagactccaattgctaagggcagctttagcgagagtactcttttcttgtcatgtgcatattcaatttattttcatattatatcgtgttaccctagggcgttctgtcacgtcctgataaattcaccccgaaataaaaatcattctctaaaaggaataatagaattaattaaaattcgaaaagaaattggcaaacactaaaatacacgtacaagaaaaatccgaatgtggcccagagaatttttgttaaattctccttggcctaaaagaagccctcaaattttacttgaattttcagaacgctgtaaataattattaagcaacaacaacctttatcaaagtttattaaaaagaactaaaaatcatcctcctccctcctttgagccaagtctgacccaaagtccctctcctctccctctattttcctcccttctccctcctttccttcccggcccactccctcctctcctcctcccgcctgggcctgccccggcccaagccgagccgcagctctcccgcgcgccgcacgcgcgttgactgcgacccacgcgggtcccacccacccggtcgtctccttcctcccgcacggcctcctctctctctctcccgaaaaccctagttgctttcctccctcaaatccacacgattcaaacatgggattccaaaattaattagggagaattaatcccctttccttcctcttcaattgcgcctaaggcctcgttcggatagagcccggccttttccctccaatccctagggatattggtccaccacccagaccagtggaaatccaccactcgccgccgcctcgcttctctcgtcgcgtgccgacgcctcctcctctcgtcgcgcgtcgcggcgccgccgccgcctccgtcttctctccccgagcggcgcccacgccgcctctcctctcgtcgcgcaccgcggcgtcggcacctcccctgccgcatcgcatccctcgcgcgcgccgccttccttcctccccagtgtcggcgttgcttccctttcttccccggtgccggcgcctcctcccttcctccccgctgtacatgctggacagagtgaagcagtcttctccaagcccagatccacgacatcagccatcaggtacaccccttgctcttctcctcaccgcatctgttcatattgatgtgcatattgattttcttgattcagagcgtttcactattcagatcgattcatattgattttctagtttcatatatgtacatggatctgctgttagagctgctgcatatatacactttttaatcaactaacagttaagatcttaaaagtctggtcaaagaaaaagaaattctcaaaattggtagataccataaaattggttgttagttcagtgtttcactaacaatgagatgttattataaatgaaaagttaattttaatcataactcgaatttttagaagtgtgtaaataaagaaaccatgcgaagttttattatctaagtgttgcatttcaagtctgaaaataagttggagataggtttaaattcattattctcacttttgtttttcatcatcttagactaaatgtctttgttttcatgaaactggaaactcaaaaaagatttactattataacatcttgcttgttcaagcagttctttgttggtttggtttctccctgccggtctcgtcttcttacgtgttcttctcttctgtccagttgaagcagttcgggggactcaaaggccggagggcttgttcgccaacctagctcactgagctgccaagctcgcttgtattggtaaggtggttgcttctcttcctcctttgttcctcgtgcatctgctactgcttctagttttgattccattcaccaagtagtatgtgtgtagtattggtcagctaaggtcataatttatagtgattgcttctagttgaactgcagtatggcacacaataagatcaagtttatttgcattctttgccattggtataacatattacaacttacctaaagattgctttctataaggtccaattgagttagcgatgttagaaacaatcattaaagaacttgtttttgtgagtaatttcatattttagagctatattttactcaagtcacattccaaagaggaagcatgtttgagtgaggccatatcctgttcgaaattttatatgtgtaggaatagatttttctctatatgtgctgctaaacatccaaatgaagactgattgactttgttttcataataatggaagctcaaaaaatgtttggtgctgagaccttattacccttaacatgaataaatgaattagtgatgctgatatttaatgaggaaatcatttttttaaaaaaagtccttattgacccaaccatgatgtgagtatagtatgcatgaacagtacactttttttcctcttgtgtgtagttaaaaaaaaagggttcaagggctattcgaatgaggaagcgggaggaagaggatgacgatatgattcttttccttttccctgctctgcatcttttctactaaacacaagtactgctcaggttatgaactttgcaatgagctaattgtcaaggagcaatcattttaagcatgcaaaaagtaccttttagaagtgtataaatggacagataatgttgcatgatgagtccccctaataatatttttgacgtttgattcagtttcctttacagtccctgtacctgctactttgtgttgcccagacttttttcagtgaagaagttaatggttgcgccaatgtatctcaactatgtgaaataaagataattgcatctttagcatatgaaattgtcctgtttcttcatgatattgttggtttgaaaaagaaaataaagtggggtaagattgtcatgttttttcatgatattgttggctcccagttagtacttggtactcctagtatcctaaatccagaaatagatcaggtgcatgtttctctgaaggatctgttgaattgtcttgtggcatgtagttagttaatttgattaaggtgaatatgctactatggtactaataagaattaattatgtctgattcatgtggatagtctctaagttattaaataaaattgtagaggaattacttacaatcaaaagttagattagatggggctggtcatgggctgaagatttgatgaaatgttccttctgtgattatgaacatgtatgcagttagctaattattaatgaacagttagctgaatttttagaagtgtatttacaggtgcctgtcaggcttttgacacaaataattatactgactttgacatattgttttggtgtgcagttttctgatatgtgatgtccacgggccttttgtttgctgcaccaatgatgcaaggaaatgtattatgatgtatgtcggaaagtgttgttactagatagaactattaaggcaatgaagctcaagttatgtcttgttttcccctcaaaaaaaaagttatgtcttgttcgatttaatacttgtaacactgagagatatttgtgtcctaaatctcaacgtgtattggttcttcatgttggttgccttttttttttttgcaatattgtaacaattacgacatggattttgcagcaggtcttcagtatttctttaattttctacaattttcgtaattttctaggcatttatatatcttttttctgtattttcctgaaaaattagattttgtttgtgcagtatttcgaattatgtgcataatattttgaaatttctggagtgagactattaaattgatatgatatctcaccactcactattatttaccacaccaatatacttagatcccatgggttgaggggattatatcccatggtggagtggattgacgtgggaattgggtggtgggaggggatccacccaatccctgccgcctagtggtattttccctggggaaaaaccaccccaactaccgaacaagcccttaattatcccttgattcgtgctcttattcacccggaacggcctagccattcacggctgccatttccgccgccgttccatgcctctcccgtggccggctccctccccgcgcttataaaatggagccccctcgttccattctcgtgtttttgcctcctcccgagtctcccgtggccgccccgccctctccctcctcgcctatgcgccgtccggccgcgtcgtcaccgccctcgccctcgcaggtgtatcctcttccccggcgtcgcttccgttccgcgtggagaccaccggaggtacatcctcgccggcaaacagtggcgttgccgcgactccaccgcctccagtcgccgcgccagagcgccggtcgacgtggctgtctcctcctttggcatcgcagcggcaaggtcgccctcgacctcgcctcccctcctcccgatccccaccggtcttcgtcgtcgtcatcgtcctcctcgtcatcgtctccgtccgacgtcgccatcccctcctccggttggccgttcatcctcgccggctcgtcgtctcgctgcgccgcctccgtcgtcggcctcgcagcggcgtgttccacgccgtcctcgcctccgtgtagcagctgccggctgccctcgtcggctactcgccggccccggtagtcgtccgcctctcatcgtttcgtcaagtgtgctgcagccccgtcgtcatcttcatcgtcgggtccgcgtcgtcaagccctgcgccggccgtgtctcgccttcgtccaagggtcgccgccgaagtcatcccctcgccgttcgtctccgtcattcccgtccgcctccgctgtgcccgttcgccgtcgtcgttcccacgcctcgtcgcgtggtggtaaggatccctcttctcgctgccccgtcctcgttctttcggtgtcgccccgtgcccgttgtgcggttgtcgaccccgatacccgtgtaccggtgtcggtagtcgttcgtgtgtgcgtgtggtgaccgtgttggtgtgcccgctcggtagccacgtggtttccacgtgtgcagcccgcgtggtgtctagtggagtccgtttgtcggccacttgcctcggttgacacatggggtccgcttccgtcgacccgtggaccgtctctgtgtactcggtctaccgtggtcctttaggttgacatgtggggtccgcatgtcaacagcgcatccttcatgtcttttccatgctagcgcttacacatgttttatagttgcaaaacctaattacaataatccgtaaatctccatgtaatagcattaaacttcggattaccatttcttggtcatacgaattccgaatcgacccgttcaagtctcttagtgtttgttataacctaaagaaccctgtgttttctttttatgtattgttattgcttctttttaggcttgtagctttgcttgtgtgcttcgcgtagctttcgtcgttccggaggttcccgaagcgtggttcgctgtcgtcgccgaaggttcggaaggacgttctctctgagcaaagcaagtcacatcatccttgagcatattgaatcccaatttataaaattaattattttgatttaaatttttgcattatcgctttatttaaatccctgcattatcactgttttatttagcaatacctattaatctttgttatagccttattattgctattgtttattatcaccttgcttaccctaagaaaacaaaaccccaactagtgggtactctattaatggttccactagtatgaacttaactagatgcttcgctgattaattaggcaatactaggtggttttttaactttagactttgggagctctcatatcatttggacattatggaatggttggcttgtgatggaattgaacacacacctcccccctctattcaaaactcccaaaatggttttaggctgggctcaaggtgcatggttttgctaggagcacctcggccaccataaggaccagtcttcgggcctctgttgcaaagcactaccgtactaaccacatgtctaatgggtaaggcttaactcggtgctcagtctagtcctggcaagaggacacggatagatatggacgaagttggggctcgatggacatctctagggcaaatgaaggctatacgggctacggctcggtagtcgagatgtcatggcacagggccggtgttctgctgctaggggctcaatcctgcctacctgtcccgggattccagccgtaggcggggttgggtcagtacttttgtcacggctaggatgggtaaaggggttatgtcacatgtttatgacgggttccacggccttggaatgtgaagtaaagatgtgtcttgtgggtaaagatgtacacctctgatcagagtataatctattcgaatagccacgccctcggttatgggcaagcctagcaatatacccaagttagtggtttaattcttaaaacttgcttaacaactaaaatgtggaatggttggcctgggttggcttgggacgaactgagacctgggtatggttgccagtttggtctgaatcatcataggccttgggttaaggcaggttcgtgtgggttcacggccttgattaataatattgtgtagccctaggatcatacttttgaaatagctttgagcaactaagtgtcttttaaatgctgtttactgcaaaatctaacccctatattatcacccccttgtacccccttgcattttgtctaaagaaagttgcctattagtaagcagtcttccctctttcataaggctctaacttgcgtaaggaatcaaggagctacagttgtttcttgccccttttgtatttttctgaacacaagttcaccgcatcgcgcctcgtgcaccttcaatttcaccattggaccattctcaaatgccatctacatttatccccaatcctccttcatgattcgtctcctcaaccatctgtaggcagtcgatcgcctttacttgccttcgattcttctggaccgccggacaggtcagtcaacccttgagctgtactgaggggttggactggaaagcatactttatgtgattcctccttccccattgtcctctcctacccgcctttcccacatccatcaaagggatggcaattctatgtgattcgctacacttgctggcgctccaccccataagctaactctattgcctagcggttagcgacacttttccggtagtacaaatcactacacttcgcttctttttctttctatatgataatatgcaccgtcggttgctgcgcaccctgcgggtaatagcaagagagtgaagaacgaacgatcctcagtcagcagtgaatgagtccgactcgagttcgtgagtcaaaggcgtggcaagagagcgagttcgactcgcgaacgacccgcaagtgaaggaccgatcctttaacgccagtactgttgcgagactggtacttgggggctcacgagcaacatatagactaaggttgcccatcactccctcgctcctttttgaaggcccaccggcttgcattttggggcgagtactacagttcctccataatcacacagaacgcccagcttcgcagagctgctctctccccagtccacagcaaggtgtggaatctggatctacagtgtgttctgaccctattggatcaagtcagatactaagccttctactactacttaggtacttaggagagaaaatgctatatttcagagattggactctcttactgtgtttttctcagggcagttcccgagccgggattaatcatgcatctcccggtgtgacttgttgagtactgtggttgtactcattcttgctctatctcccccccaattcagtaagagaagctttggagaagaagtcctaggtgaagtcctggcttataccctagttgagcgcctgtgaagatggagccataggcccgctagtccgctgctgtttatttctgtttgtcaagccttaagtgcctttgtaataatgtaaatattatcgatataataaagatgtgcctttcatatcatgtttgtgtggtgtaccccgacttttcctgggacggggattaatacactagcgttctggaaaaggtatttttccgggcgcgacacgttcgctcgggggctatttgtatctaacaatctgttctgagtattgatttcaggaaagtcatatttcagggctttatcgtagtcgagaatggttggatgactactcgattattcaagaacggttggtggagtttgacaaagattacagaataaagcgatggtgtacacgctgtgaatgagtgaatattagaatctgtgatattgtttttcccttttcatttgttgttcttgaaacatatccagatgatccattgagctcatctgctcatgtccagaaaacacatctcttaactgttgtttatatgcacggttgatttttttggctgctatgttggactattgaagcgctgattaatttttggctttcttgcttctgcgttggctcgcgagctaaacgagctagctcgagctggccaactagccgagccgagctagacttttattagcatgttagtataagcttgaccgagctgagccgagccgagccaagctagctcggtatccacccctagtcgggtttattgataccacatacccaatagtaatccactaagctcggcagggcccaccatataccaagtcttatatggaatcatacctcatatatagaaaatcaacggtattgtcagactaattccgtagatacatctggtatgtatctacaaaggtacgccatattttatatgcaatttatcgtactatctatacaatattgtcatatcagtaatttgttatgtttacctagaacatgttttttatacaatatctattgtgcgagtgtttctgaagttagcccaactacagtttaatactgggggctcgctttattttcttttgtataaatcatgcttgcttatggtttacgtaatgcctgatatttaaatatgctcgttatatcctaataatgctagaagattcatgcagttctttgagtacatactcgatattctctgctatatatcttgccttctagacaatatttttcaggaacaatcgagcactcaagtagattgtggtcgagtacaccccattatcgagaacgttctcggtaaaggctgagttgtcacaccaaacctaccaatgaagaccgatgacttatctcatgtatagcgccggctacgcctggactatttgggcataggttgttaacggataattcctcgtgaatgttgttggcttgatcacccgatatgattgcgaacagacatctggataagctacaagttgggtatgtgagtcatgctggccacatgagatgcacatgtaatacctaactgtagtgcccctataggtgattgagagatgtctatttttggttgtcgaccagacatttgtagtgacatcttgccgcctatcagttgccttcaggtgatcgatagatgcctactcctggttgtcgaccagatggtcgtagcgatctctcgacgcctatcgtgacaatcaacatggccatgataacgataaccgagactgacaggatcgtcgtagtcacccggatgacaacgtccaggactgacgagatcaaggcgacaacagacaaggttaacgacatcacgacatcacatggtgacgatgaaactcgagatccccagacttccagagggcctgaggatgaggtcgtaggtccaggagacaaacccccgactacgatagtccctcattgacttcgtcgtcgtcagcaggcagttctcgcaggttgcgaggatgccgtccatctatctttctagattctcttcaaatggtcgagagatacctactcctggttctcaaccagtaggtcgtagcgatctctcgtacctcggcttcaaatggtcgagagatacctactcctggttctcaaccagtataggtcgtagcgatctctcctacctcggcttcaaaaggtcaagagatacttactccgggttctcaaccagcaggtcatagcgatctctcgtacctcgacttcaaaaggtcgagagatacttactcttggttctcaaccagtaggttgtagctatctctcgtacctcgacttcaaaaggtcgtagtgatctctcgcgcctctatttgttgagtacaactatacacgtggtcttcgcccagtgtggtggttgtctcatcaagtacatcaacttctataagtgtttatatgtgcaatatttgtctattgatcccctcttcttatgtcgccccgtcttgaagtcggtcctatcgtccctttacgctattctgacaaagcctccgagaaacctaaggggatttcagctggggacgcccagaactgataaggctttgttagatgctgcagagccaaacgaccatgtcagatttggtcatgtcagagtgctcactggatgcgtattaactaagcagtgtaatcgggaattggttttcccaacttcacgactgggggctaggattcgtcagcttcatattggtttgttataagatttaagttgcctttatggacaatggttttttcataaaaacagctgggggttaggaggagtaccaaactctgtttgctgagggcaactctagcgagcgtactcttttattgtcacatgcagatttaatttattttcaatttttccatacatattatgtcatgttactcttgagcgttcgctcgggggctatttttatttaacaatttgtttagacttcaattttaattcacttatggaccgttggactccattcagcgttgtcgaggactccatgtctctacggtcttacaccgggatcgactaagcgagtatgacaaatgttgactagagaagtcgcggatgacaacctgagttcatttaactctacccaatgtcagagttcagaacagttaaatcagatttcagggatctgtcgcagactctacgcctactcgattactcgagaacggttggtggagttcgacaaggaatataaaatgaagcgacggtgtacccgccgagatggaatttcttgactaaaatccaaattctcgattacggtaagacgagagacttagtcgtatgctccgtactttctcggttgacatcggagattaacctagacaaacccaatatggtgcctgcagaggtcgataagagggatctagcgctatctctgatctcaccatgaacggtcaagcgagcacgacaacagttattccaaaatcttcggtcgagaacttcaactcatttatttgcattgaagtcgggggctactatcatggttatggataccacatacctaatagtagttgattaagcacggcgggacccaccatataccaagtcttatacggaatcatacctcgtatatagaaggagttccaaataaggaaggacaagtagagttctatatggaaacgacaaggactactcggattgtatccatattggtctccctagttctaattggacaaggggacatttatgggtataaatacaagaccccctagggggagagaccaatagaacaatcaagataggcatagaccaacatatacacaagccaacacacgccgctagacatcgatatcagagataagcctggacaaaccccgtatggtgcctacggggggccgacgagagggatctagcaccatctctgatgtcaacgagtttgtactcgaggaggaagactacctgtcgtcgactacatgttggtaatccatgccgccaagtcgacgacagctagataggttatcctaattattgtacttgtgtgattcggatgaataaagagaaacaccggcttcggccaacaggataaggggctcgaacatatataaaatccttgtctccatctcttttacctcaatctcgtatataccctggtaccgacgatccccataccatgcaaataccatagtcgagccctcaaatgtcgacaactgcgtctgtggacgtacaaccaagtcttgctgccaacatttgactttgttgttttagcctttgcaacaacaaaacaattgagttagaggcaagttatatgaattgatggattaaactcatagcttaattacctatagtacgctccgaagaatacctacttcatcttctaacccaggaggtgtgccaagggccacacccgcgtcgtttacggacatcattagctcaagtgcctgtaggtggatttaatctagtgagaagtaggtgtaatgtgaaatgaagaactctaagccttaatatcttactactcaaccatcgtccttgctcgagtttggttgtcgtactcattcatctccacaaacccctctggatctgtagttatgtcagctagagtctaggccttgttgtgagcgactcgtgaagcacaacatgagctgcttagtcactatgtggccgagaaattgcacttctttcatccaaaattcacacttagaaaaattaggcttttgtaggattaatcaaatttgctttttctcgttctatctcagagtatccattcattcgatcttgctatccgctctcaattgaatcccttctctgttgtcgacatgtgtgtccgcatctggaccagaatcacgatctagtatctccgtactcgaatacctcgtactttattaattaggaagtgaagtagggaacagtttcctattcaaagtacagtgccttcggtacattggtgcattggatatttccaggtagcaggtcggtagagtgagggctccatccataacaaaacaagaacgtctactgaaatgacggaagatgcatattattctctctcgtagctggggctaagaacgatcctcttatccaactttctgtctatcccaaaaccgaaccttgctcctgcttctacttgaccggtgcttgcttattattggcattagttagtagcctagctagcgcccttctgtgttattaagcatatcttgcaaacctactgaatgttgaatctcgatcgatgtcaaaaaccaaccgtagaaagagaggtcgaagcacctgatcactcattcaactcgtttttcgctcatgcctgtatggaatgcataagtcattgcgttttggtggtggagttcgctctgccgcgtaagatcctcgaatcaaccactgccactgtcttttgtctttttttcgttctcttccctatgctctcccttggcccagggagagatgtaacaaactcaaatttttagggaaaaaattttgcgaaatattttaagacttgatcttctcgattcttatgttgagcgaccttgctttcttttagtctcttttactttagatctaaattttatttgcgaagttaaaagatctcttttaaatttcataaaatccttaatttattctctaattcgtttatttcaaattttacaaaacctctctatttactttctttaatctctaactttggctatagattataattcctttgaatccttacccaaatatctccaacatccaaaaataccttttctatcctcacctaactatccccagagtacatgaaatatcactcttcaaccatccctagagtacataaaatagcgattgccactttccctagaaccaatactttccctttggatctctacccaaatattcccagattccatgagatatccttttcaatctccttgagtcaatatacctatcctttggagcttaccaacctaccaccaattacaatcctatagaaattcctatgattccccatttaaaattatttctaatcccttctattcaaaatccaacttcctttagccacaactatttcaccgagaatccataccacatatttggaggccaaaatcctagtcatttgcctccatctatttttaccatcatcccaaaatttatccaaagctagaaggttaatcatttgtatttctttcccttcctattcaaccatttcaatttttaaacttttaaaatattagagaaaatcttttgtgacaagttttacatttggttcttattgaattttataaaattggagcatttcgatccttttttcaaataaatatctttgattttattttaaaaatatttcaactccttttgcttcaaaaaacttatatttaaattccttttataaagttcaaaagaccctcaagcatttgtgttttagattttatctcttttaaaatttatttaaaacccgccattcaaaattcccctagttttcaattccttaaattctatttaaattccttgtccaaagttcaaaaggttcacaaatatcttcctttagaatttttcccctttgaattctagtcaaattcaaaaagttcacaaacattcttcctatagatttcatctcctttgaattccattcaaaatcctctaaacaaaaattcccaaaggttcctattcaaatcgggccgaaattccttctcccatcggcccatttcccacctcagcccaagccgagccagccccagctgagccgcctccttcctcttccctgtgggcgcgcgtggcgcacacgccaccatcactatggctttgcgccaccgtcgccgtcgtgtggatattatgaataacccatacccacagggcatgtatatctgactgggtataggggtaccatatgtagatataatatctttaaaggactcggattaatttcctaacttgtgtatcaaggaaatacccgaggatcttagtcggttacgattgtaatttatctttacctacctattccgttaggaatatgggctgtaccctgtaatacggactcctccccttatataaggaggggttcgggtgcctcttgcggcataacttttctcccagatcatacgatcaataacatactcggcggatcaatccccggacaggagtagggtattacttctcattgagagggcatgaaactgtataaatctcttgtctctaaacccatccacttttcctgcttgatagccacccctttttgtattgccgaaatcttgtttcgacagttggcgcgccaggtaggggtagcgtcaagcttttcgccgatcagtgcgatggtgatacgacccgaccaaggccattcacacataatgtgattgttgcacatcaatgcaaggataacgctatgcttaactccaagtcttattgttttcatcaggaaaggctgctacttggcttgtatgattgtaggttaaagcatatcgttgtgcttaaagagagagacttaactcagattaccaccactacaccaaggcaacgtaatcgtgcactacccttgctatcatatgaacgtaaaccaacaattggattagtgccaccattgcaaggaccaactacgctaagccatgttgtgactccatcaccaagagattgtgctgagcaaagatggagtgcacaacatcattcaataaaaacacgacaaaaggttaattcatttcttgctaaattgaactttagtattgatgataattttatactatctaaatggtgtatatttgctttgctaaggttcataccaaaggagatggtcactactacaaatatcaatgactacatcaatgggggtnnggnttccacagaagatgaagtgacatttgctcaagtggagatggtttacgacaacgagcagactggttacacgcagatgctccaacttccaagggatgtgcgatccagccagtcaaatttctccatgcataatatatatggttacaaagataattaagtctagtttcacctccaacaaatggctcgtcatttcgacttcccaataaggagttatgaacaaatcattgaggactgctcagaagccaaacagacgcgtgagtcttctcggaaattcacttattgtgacctttgagatagcctatgtcctgtaaactcccaagacctttcattcccatctaggagggttgttcctagtataaatatcccttatgttttatcatttggaagacttttgagaatcaaaatacaaacccctttgttcagctgtgtgctaacaaacaccgagagatagagatctctacccctttgctcttgtgaattcctcgtgggattacatagcggccgcttcatcggcacccaatctgtgctcctgctacttcgtgtgcaggctgcttaggttggttctttgagagtgtgattgggcgaatccttggttcaggctgccgtatagagacggtggttggctccttgtgcgtgtcgtcaggttgcattagttatccggctgctcgcagctagttatcttggctgattttcagctagttatcttgttcaagatcctacatcctgaagatcaggacaacatccatatcatctggtatcaaagctttcgttgtcacggtaggattttttatccctagctacatatatttgttttcttcctatccagaaaaagactacaagtaaaattttccgtagcctttgtttgcatctgttattgtagtgagtttggttaagtttcagttcattagagtctttgtttagttgctgatctattttccttcgcgtgtcctttgagccgatctattgttgtctctaagaaaatccctacaaaaaaaatagtagtaaaccatatctatcctttgcgtataccttgatcctattatgttctaattgctgattttatatttttggtttggtctatcatttgtgtaagtgttatacatgttatagtgttgtctttggtgaaaagaaaaaaaaagttgcaaaaaaaagggacttgagaaaagattgaagaaaaaaaaaagaaggaaaagtgaatagataaaaaagaacagaggtgaaaaaaaattgtgagaagagaaaggtgaaaagaacaatctgttggtgttatatgtgctgaaccgtttatgccaccttgcaaaatcagccgttatctacctttggtgcaaattttgctagatctgaaacgtaaatcatccatccctagtgtaatcctttgttttgcatcaaaatatcctatgtttctttgtgcgtgagtttgtgtttctattccaaacattttggatcagcactaggcattgatatctagtttggattgctacttagctttacaacaactagaattcagattgctccttgtgctttatcccctaccaagctccacataaaagccatcgtgtacggtttactggtcttgtattcgctcaattatcactttcactttaccaccacacggattgccttagtaacctcataagagcttcggttggtaagagaaggtgaggttgtgagagtttccacatactatcatattccacatatattttgctacttgttttactaaccatggcagggagaatgtatattcatcttccattttatggaagcgctgatccagaggagtattttggatgggtaaatcaaatggagattgaacttgaagcccaatgtttttgtgaagagaagaaattgcagcgtgctactctcgagttgaaggttatgcctatacttggtggaagaaattttctcacaagcagtatgtgaagtgttgggaagatttgaagaaagtgatgagaaaggaatttattccaaaagagtacgagttgtttttactttgttgtttgaagcatgtgaagcaaggaaccaaatctgtccaagcatattatgatgagttgagttcttgcttgtgccgagcaaatgccattgatgatctagatgcaattgagtattttaagagaggtctcagtcctaaaattgctactgcaattgagggaagatatgcaagaagtgttcgaggtttcttgatctatgccattaaagaggagaagaaagtaaagaagttgcaagaggggct

SEQ ID NO: 24802 - DNA, 11383 bp, Oryza sativa
ttgatgccccttgttatgctgatttggagatgcaacaaaacccaagtgagaatgagagccacatagccaaattgagtgaaagagataaaaagagtgtgttgtctgattccaccaaatatgaggttgagagcatccacaatgagagtgagagaaatacaccacacaaaaagagaggattagagtgcaaagcatgtgaggatgtttttgattctaacaaacttatctccacttttagtgttgtctctcctaatgttcaggtttgcaaagaaaaagatgaagagatagttgtcaacccgatgaaatgtcaagaagataaaagaattgagaagatagaccttatggagaattacccaactactgccctgagtattaaccatgatgataagggaggtaaaaattcagaaacgacacccacattcgatacgtctccacaagagctgaaaggtaacaaagacgaatcatatttctgcaagcatgaagagttggtgagtgaatttgttgatacacttgatcaacgtgatattttaattgcaaataaatttgatcttgtggaactgattactcatgatgaagtctttacaaaaatattgcctgttgaaattttgtgttatatcatcctcgataaacatgttgaaatacacgatatgcttgagaaagtttctgaaatagcttcgctgaaatctttgaatagtattcatgtatgcaagtatacttttaatttgattggtggatatgctgaaaataaattctatatgtgtgctatttgcattacttgtgacaagcttgctgatttgaggttaaaattagtgaataatcatgcttttgaaccttcttatgctcagcgtaagttgaacaaaatgtttggtgcttgttgtttggaaccatttatgtcaccgacatgtgcatatttttcttctgagacactaaaacataatggtagaaatgatgattctttgaaaattttctcatccatgcttgaaatggttggctttgaaactaatgaatttgattgctcgaatatgttgcatgatacaaaatcttggaatgcagatttggtcgatgatgatagggatgaccgtcgggtggcaatacgcactgctcctttcaccgatatccaccggcaagacacgaggcgccgtgcacaactccttcccccctcctcccaaaaaaaaaagacgtgaatattagggaaggacctaatatcaaataattagaaggggtaaggcttcgaacccagttcgtccagcccaccaccttgtggagctagctggtagacctctgggtgtttctccacaactccttccccgacctcatcctccgtacagcgttgcctcgttgcacgctactcgcaccgcccctcatcgacgggtagtcctccttgctcattcaagagaaaagaagaagagggagagagaaatcccaaccatcaatgacgccacgtcgggctcatagctccatcgatacaaccattgcgcggcttcaatccatcgccgccctggccgatgattgtcgccagtcatcgaccacgccgtcgctactacttcgctgcccatttctagggttgaggagagaggatggggaatgaaggtagggacaaaattgtactctcacatcatcacatcattaattttatctctccgattcatccggcaataataaaataaggccgtgggtgtccagcagctaattaccagtcttttgtgatgtccgacagcatatatatattcttgcgatgtccactagctaattacacgtttttttgaatatcttgtagcaaattttacctttttaatttgggatgaatttatcacgacttgacatcccatgcccacatccaatgtgctctccttctcgtacacctgaacaagaatggaaagtggccaacaacgttcgcatgccatctcaacatatcttctccatgtatcagtgcaatccataggcataagctcccaaaaataacctacaagttgacggttaaccaaaacataaagtactataaggccatgggtctgtggattgattttaaagcctctcatcagccagttgcatacacccccggaactcctttcgacaactctatcaatgcccttagtcatactcttgaactcgaacatatctacctcattctgaccatatctaatgttgccttcactgtaatacaagtcgaatatcagcttacttaacatatctgctcacagattaaagtctcgttataatatattaaaataaacgcaattgctatctgtgttgctaaatgtataagtacctaaatatgtcataaggttactacagcatacatacgtactagatctacacccctagcattggatgttattactaacataggatttctatacaaattaataagttgctaaaatattgtccctactcaaacttgcaatgcattgaaatggtaatggaaaaaaaattacctccaatcgagtgtgcgatccggcagggctctgctgcttccttcttaaccttccccttacccctctttcttttttttcttgatttttatgaataaatgagaattttcaagaggaagggagggttttatatagggctgtcaaaaaagctcgaggctcgcgagctgctcgagctcggctcgtccctaagctcgcgagctttttttcgagctgagctcgagtttctaacgagcctagtaatatatgatttttgttgttatttaataaattaggagatcaaatatgttatttgtatgccttatattgacatcatatatttattttattcttttttcctcttctattaatatgatgaactagaaattaattattttttaaagattatctttgaaatatatattgttttccttgaaaatcaagctcggtagtcgagctcgagcttggtcgagctcgagcttggtcgagctcgagccgagcctgtcggaaagctcgaacattttataggctcggctcaagctcgactcgagcttgtattgagctcgagcctaggcagacgagctcgctcgagctcggctcgttgacaaccctagttttataggtgcggggagggggggttgaaaaatcaccctccccttgggcggggaatggccggtcccctggccgggagggggcgtcgagaaattttgcagtggtctcctcgcggtgataaatcgccctagcgtagggcgagaaggggccgcttgcaaaaatatcacggcgcgcccctctccgcggccgccatgtcactcttagccaccgtcccctaggaaaatttatatgccccgccctacgggtggagtatagttttgtaaaatttaaaatggaaatttaattttgtaaatcttttcaaaaataaataaataaattcttttaatttcaatgtctgtttagttttgggccggaacaccacccgtttgggccgaaaatccagcccgtctcccaccatcgcagcaaccgacgaagttctcgcctccccccaacacgcgtggccacctccgcggcgcctcgtgtcatcccccacctcctcgcctctcctcctcgtcgtcgtcggcggcgggccggagccacatgggccagaccctgcgcggcgccgcggggcgcgtgagggccccacccaccccggcgccccctcgtcctcatcaccttccgcctgcgccgccgtcgccggcgggcgctggcggcgcggcggcacaggatcgtctccgtgtcttccaggatggtacggcttccttgctgctcgcatttcgttcggttcttagacgccgtagcttgctcttctaggcagaaaaaatgctccctctgaatgatcgctacagagagcgggatgctttgatttgctctacactactacttatcaaagatttctcatctgctctaacttgcgtccaggcaaattagttcgttcttgagaggcctcgcaccttgtaatcttgctaagggaggggaggaggagggaggtgctagggggggggattaaggtgctagtgggacatgatgttgattataagctcgaacaatatggccctggttttgattcttgattatcttcggtcatgatgtgcttagggatgtcgtctgcgtgttgttcgattgaatttaggtattgttttgtctaatgtaatgtttttgttgcagatttcgtgaaatcgggtactgatcccatttgggaagcatatcctcctgggctctctatcgggtctcttaataattgatagatcggtagatatttcagtattacaaccaattatgttgagttaagaacatacaattcctatccatcccaagctagttccgaaattagtctcccaagtaagctcgtcaccagtgcatgctaatgaagagttatatataattttgataactcatgtgggatgtttactggaagtagcacagtttccagttagacagcttatttccagctgagagtgatgagggacgagggtcaatgttcctccacaaatcattaccgcagcttgctcatcacattattatcttaatattttagaaaaagaagttgttgtatcttggtgggttttactgctaagcactcagcttccagtcaatttgtggccctccagccaagtaaaaggattgctcaaccgtcacaatgtagcacttttgtgaactgagacctgaatatgttttagaatcatagattcagctagggtttactatcagaaattcatattcctttctaggattattcatattctttctaggattaactgtctggtgggtcatttgtttgggttgagcctgtgtatcagaattttaattgatggataggtgacttctccaacacaatataggcagcccacaatatatgggttctaaatccttgggttcaattagggtttattgagggttattttcaagagaactgaaggatacttgaacgttctcaagtcctcagcacaagcttgattgagatttaccaaaacattttacatggttgtaggtttcagattgctgtggccactattttgctttgtagtttatgatttttaaagaaatggactgcagatgtcacaacacaaccaaaagatgcccctggtgtacttaaggagcgtgatccaagttatgatgagatgcttaagcacatggttgggagaatcactacaaagcctggaggaaagccagaaatgggtgaagtaagccctctaacttcagttgttcccccatgctgaaattatgctgtttccctggtgtttttatctcattacatgaatcggtaaataaccaaacctaaagaatcaggttgtttagtttgaacgtaatcaaatgtcggaggatggatacatcatacatgctacagcgcttacatctgaaccatgagaattttctccttttatttgaaacatcattgctgacattacttgcttttcctggtaaccattgtatggggaaaaattggaatactttagcctgaaaatattgttgtaacaatatcagtgttcatggggaataaataagtttcattatgtactctgtacttgaatatccaaattttctttgcattgccatactaattcaggttgttatccttgtaggctttcgtcgtagatcagtacaacaggccactcccaagggttagaacatccagacctgaacccggggaaggcggacacagacaactacctccaggaaccattagcgtcgctcatgtccatgaaatcatccaactgtaccaaggaaagtccagtaaccaccctggcccaatgagcgtggacaagattgcctcaaagttcagagtcgaagcctcagtggttcaaaacatcgtgcagttcgtctcacttccgcaggaagaacatgttaccaagaaagaggaatactgagagtctataggatatagcgatcttgcaggctgtctaacacaattcctttgttcatgtttccgagtttgttctgtggtggactactgggaacacaatgtttcgtagcttaggttctttcttcttgttgttgctgctgctgctgagatagtgagatgagatgatgatggaactggaaatatatatgctgtatgaataaaggtgaaggacgtgttttggccccttgatgctcaggatgagcatagctgcataggttgttaacttgttgtatgctcttttgtcaggttgacatctgctacatcttggaaacatcattaattggctgtgtactgagaaaaacaccaaacgtaaatccagactttttaggtgcgttattcattttcgtctttttatttttacccagccatgtcttgatgaatgcaactaccaaatgaattttcataggaatttctttacatactggtagcttgcaatttcaggcctttcttggaatagcagaattgaatttaaggcccttttggattgaaggatttcttttttaaaaaaaacttggaggaattcagtccttaggaaaatcttcttataagcatctttggtacaaataaatatcattcgcaaaaatcctctggatttgcttcatatgattcaattccataggaaacaaagcataagcttatacctcgtgtctttattttcctagtgcaaaccatctaaactgacattgattttctcatgaagatatagattttacctcggtttccgttagcatgtttttcaaactactaaatggtacgttctgtgcgaaaactttctatataaaagttgattaaaaatattaaatatatccatttgtcaagtttgtaataattaaaacttaatcaatcatgtgttaatagcttttttattttacttgcactaacttaattttcatcttcatgagtttccaacaccaccatagcataacatccgttattcatattcatagagaaggaaattatgagataatcaacatccaagagagtttgaacatagggcgatgtgttgctcctggtagctacctactagctaggctatgccatgttttttaagattaaattgcacccacggtacaccaacttagcaggtgggtgcgatatagtgcaagaacttgagaattgaacgtccgggtgcaacaacttgacaagtgggtgctttctagtacaagaacttacaatttagtattttggtgaatcaatttggttaagcatatgctaggtgaggtttttcacgatgtcaatatgccaatacacagtaatcctatagatattacattataatattgaatgtaatctttaagaattatattgcacatacaatttacatatacagttacctttaagaattttttgttttcttcaccttctcaaatatcaaccgaaatataataatttctacatccagtttaattgactcagttattagttattagagttattagttattaggataaaaatataaatatgtttatacaaatccacgctagtatattgtcaagtacttaaaaatttgaatttatataaaaaatgctccaaataattaagttgtcacaacttcttaatttattgtatcaaaatcgtagctaccttgcaagttgtttcatttatacgatcatcacttataaagttattatactaaattgcacattcttgccaagttgttgcactagaaggctcatttttcaagttattacaccaaattgcacccacctgctaagttgttgcaccgtgggtgcaatttactcttcttttaatataacgtgaagtggaaaaagcacatgaattcaaacacataagagctatgttttttttatcacatgaagattttgaagacagatagatatgaaacaaaacgactttccattaagctaaaactagatgttttctttcctatagaaatagaggaattgccacctctccgaaggaatcaaactgttccactcctttgtcccaatcctaatctgaaactccaaacgattgcacgcctccaaaatttcttgaaaaaatattcgttccaaatagcgtagtgctcccttcgtcccataaaaaaccatataatattttctgatacaatgaatttgggcatacccctattgagatttactatactaggaaatggcacatctcattttaagttggttttttatgaaacggagaaagtatgtaggattaggaacccaaaagggtgtgaatgacatcatattcctatgtttaatcaacttgaagttggttgcaaaccctttcatcaatcaaaagagaaaaaaaaaaagggaaattggggtgaaaaaacaattaggcaaggaatccctctcccaagccgtaggatcacctctcgcacgaatcacgaggcgcatctctccaaagcctccggctccactccaactcctctcgcctccgcggctccgcccatttcgcgggtcgccggagcagcagcagccgccgcgccagatctcgaaccttctagaagcttccgcccgcttccacccatctcccccgagggcgcctggatcccgaaccttctaggcgtcggcggccggggaaggcgcgaggggaggcggaccacgggatctgcttcgaagcccctcgcctcctctggaaccttccgggcgcggcgcggcgggatggcggtgagtttccttcctccgcgctgcgagttacccggatcggcttagacgatgcaatttctaggcgagttaaccagggattcctcaaattgttggtggcttgctgctgctggtctcttcgaccattgaacccgcagttcctgcgagttgatgatttggttttggttcccctcctgggcatgtgtgctgcaattagaactcagaaatttgtagagatggtggaggattggtggtatttgttcaaggcaaatcttagctacagagcatgccactgtttgaccagaatgtgtgtttacctgtcacgcaagcttggtatttgtagcatttctgttcatgttgctatctaggcgtgtagaatccatgaattcagtattatttgaaagtcatttgctggcattcaggagagtttgaatttcttttttctctttctttttaaaccatgaatgatgtgtgttctcttataaccttttcacgtttcatgtcactagagtgcaaaagtgtcgcaccccgttaaatcggcctccgaggagtccaaagtactcgtggtggagaatgggaagatggttgatgttcaggacaaggaaatcaccatggaaggcctctgttccataagttcttatgaccagtgggcacggatccctgtttctggaccgcttccgaaacctcgctacaaggtcctcctttttttacttgcatgatctctaaattccgtctagtctgttgtgctgccatcgtcttctcttggtggttttgacatgctgcacttatcttctacagcatgcagctgctgtggttcaggaaaagatgtatgtttttggtggaaatcacaatggccgttaccttggtgacatgcaggtatattagtcggtcattatacttaatatgtttttttcttgtgatggattcttggtataaactttaaaatagactcaaaattccttatttgcttattaatagaggttaattgtgcaagttcctaactttactctcgagcgttgagaatgatatgcatctcaacaatagtatcttcctttggttgaaggttctggatttcaaatgtttatcatggtcgaagctagaagctaaaatacaatcagaagaaccttcagacttgactggaacagcttcgcttcctccttgtgctggtcatgcactggtaatcaccagatactctttatagtcaagttgagcggaactggattttctcccagatagatataactgtgtagcgtatttccttctggcatttaatctccgcaggttccatggggaaacaagatcctctgtcttgcaggacacacaagggaacctacagaaagtctcagtggttagcctaatattttgctcctttttttctaatcttattttttttgtgcgagttatatttcttatataaaataacatatttatgtcagttaaggagtttgatccacaaacttgcacctggtcaaccttgcgcacttatggcagatcaccggtaccttttttttaatctatttatattgtcagaaagcttctaaagtactcgctgctttttttttttttgtctaagaatatgtggcggtaatcttccttttgctttagagctcatgcggtggccaatcagtgactcttgttggaggcacattagtagtgtttggaggtgaaggtgatgggagatcccttctgaatgacctgcacgttcttgatctcgagaccatgacttgggatgaatttgagaccacgtaagttttgtgattgaagcatgtttttcagttgttgtaaagtgaacaaatgacaatatatttttttaaaaaaaaaagtgatcaaaatgtttatggtccttaatattaggattctgctgaatgacctgaattttgtaactcgtgtgaaaatgctattgcaggcgtactccacaagttatatatttttaggcattaattatgaaatcattcttctagtaaattcattaccaagttccttgaggtgcagagctgatatctgactattttaaactgtactgtaattttccagaggcacacccccttctccaaggtcagagcatgctgctgcgtgctatgctgatcgttatctcttgatatttggcgggggttctcattctacatgtttcagtgatctacatctccttgacatgcagacggtgagaattgaatcttttctttagagctggtattcactactttaggaagtccaaataaatggttatctgctaattgcagatggaatggtcaagaccagaacatcagggtattactcccgaaccaagagcagggcatgcaggtgttacggttggtgagaactggtttattactggaggtggtaataacaagaaaggtaaggatgaaaatccagcacctaccttatactacgattatgacttccaaaacaattgagcttattcaatttccatggttttatcacccttgagtgtagctccttatccatttacagatgatatatttgttatatcttttcttgatagtttttgagcttttctttagaaaaagaaaagtagctcacgaaacagttttcgctcacatgtgcttaatcggctaatcatgatgcactgcaggtgtcccagaaacacttgtacttaacatgtcaacatttgtatggtcagtcgttactggtcttgaaggccgtgcacccccaacaagtgaggtgagctctttatgtaactgggttctcctagtaaataaatgggagcatcatctttgttctgcatatttactctgaatcatctgatagtttgggtgaaaagttttgttggatcttgtattcaaacattgaagttcatattattctaaccaatgacatatttgtaacccttgttaattgcatttctttcatgttatgctcccatgctgttggtgatattgaaatgctgttgtacatcagggctcaagtttagtgctgcccaaagt

SEQ ID NO: 24803 - DNA, 27737 bp, Oryza sativa
aacatgaaatcaattaaattatgcaagaaatttatattgctggcaatgctacatgttttaagaatttcattaagcgcatattccagtgttatctgtatcacggcatttctttgatatgcttgggtgcatctgtgcgtacggaaaaatgtacttcaaaatataaagaagtgcgcaagattgcatagagttgtgtacctcctcggtcactagtgctctagctctttgatgtctcgcaaccagttcggatagaactgcaacaaggcgctgcttcacttcacccgtcagcatccttccttccttgtactcctgatgagtttcagaaatgttagcggaaatcagttgaagaaaacatgttaaagaaacacatcaggcaaattagctctacgcctctacatatatagcataatttgtattaccttctttatgtgctcgagctcattgtcatcttcaaggaagaagttcaggtacttgattggaacatccacctgaacatcacaatcacaactgacattgatttaaggagaaaaataaaatacttttttctgaatctaaaaatacaaatacagaacttgagcattgcacatgcgttaaagtaatgaaagtgcctaaaaaggtaaaatttttgcatgtgttagtgtttgggggaaaaatattgatggcttcaataaatgacaaaagtacaaacgaaaaggaaaggtcctgaatgtatgaactgtgaattagcattcttcctatattcaaattatttttctttaatttacatgttgcatttcaaacaaatatatgtcaacagtgcataactcaggtaatcgggggaaagcatactttactaagtacacacgtttcacaattaacaataagttcaatataacaagaaaatgacttacatcaaggttagctccaagttttctatggagctcaattgagtcccggccacctgagaacgcatatttgttcacctggaaaaaatggtaaaataaatgacaggcccatgaaaagcagaaccataaggctacaggacgcttgacttaattgaagaccaaaatttgaatggcctcaggtaaaatataaaattgcagtagttttccactaaaatacaatgcttaaagcaaacctttgtctttatttctttagcactatctgtcacatatattgcagaatttggatcactggccgacatttttgtgttctccccctgtaaatggaaataagcagctcacataaatcaatgtcccaaatattatgctatctaaaataggaaataagaaaaataaatgctgagcaatggacatgagcgatgaacttggcgaatgaagatgcaatcttatcagacatagataaatgcaatataagaaaatagcaagttactaattaaccaggagctgtcaaacagcacaggaaaattaagtggaatttcacttaaaaaatcgtgattaattgcgattgccttttttttaactttactagtaataatgattctagtgacaaaacttgcaagaaaaatagataacccgtcctttcaactgaaatttcgtatgtaaacaatcgctttgctatcattgaaggactaacttcagattgaggtactgagcatgagctctgtattatgcctccattgttgaattccttttctatgctcattttacacttctatacagtgaagatattaagctataaacccatggtcctaaaaaaacgtacctgaagagcagggaaaaatctcgattcaattaatgatggtttctggtaaccaattcttggagcaacgtcccgggtcatcctgaaataaggatcctggaagaacaaatccaatgagcaactcaaatccaatgagcaactcaaacttgcataacagaacatgaacatctacaatagctacctaaaattaaagaaattacaagaataaatgtatcatggtctgattgatgtgttcctagacgaaatggcatgatagcagcatggaaaggcagccaaaccacaaattcacagggagaaatggaatcagggagcccagatatgtttatacctggtctattgcacatgggattaagcaccgtagttggtcattcccagagaagagatgtggaaatgaagaagggaatgatggaaccgcttgcacaggaggaaagctgacttttcctatatgatcctctggggtgaatccaaatattccaacaacctgtcgttcaagagtaaacaatatcagcaaaagacaatggttggatgcaaacaagcaagtaaccaagcgatccactgcccaaaatattgctagactaacttaaactgctcaccttattatatgtcacacatctggcaactttaaccatgttttcataaaaagcactgtaagaaaatgacagaggattacttttctatagaataaataaatctcaagaattacttgcttagcagaagaacagtcattaaattagtcataaatgaaagataaatcaagactacagttaagaagaaccttaccctccaacataattaaaatcagagaaaatgaaagtcctttcgacatcaaatccacaagcaatgatatcttttgcattttcacgggcaagccttttagtttcctcaacagtcaaattcttccataagaacttctcatcatcagttagctgtattactaggggcaccttgaaagcatcctgcagatatctgaaaagggatactgacagttaatcgacgttgtccaagcattctcacaattataaattagaattaagccaacaatgtaaaggttcatcaaacaagatattgcaacaaagtttggaagctacattcagactagaaagcataggaaacattacacaaagcagcatatctatgttatattgtttccgtgcaagatgtaaaagcatgtcttgttttaaaaaaatgtttaaataccgaattttctttcatgcaaggaacatggtaagatgaaatgttccggggtaacattcatcacacccgacctttcaactggtccggtaatctattgcatcgctctgctgattcaccacataaactacaataagcatatgaaaggttctaccaacactgaaaataggtaaagttcactaggtcatcccagcaaataacacataaaaggtttgtgcacatcaccaacaaacgcattatccaagattcggctgctctagccaaacatacaactactccctctcaatactgccgcggcattgcccagttatttatacaacaacacgagtgaatcaagaacattgcaggggacagcgagtattgcagattggaacaatcgcgcttacttggtgaacatgaaggggatgagatggccgaggtgcagcgcctccgacgagggccccctccccgtgtagaggtagaacttctcccccttctcgtacaaatccagtatctcgttcaaatccctgcacacacacacagagtgagggcgagcaagcaaaccaaaatccagtacttagaatcgggaaacaagcattaagctagggtttggagggcggcggcgggcgcacgcaccggtgggcgaagaagaggccgcggcggaggaagcggtgaggggggcgggcggtgaggcgggcgacgcgggcgacgagcgcgtcgtcgaggcgctggcagccgaactggtcgacgagcttgtcgtagtcgatcccgcctttccccgccgacacctcccacgggttcaccacctgctcctcctcctccccctcctcgttcgtggcatccacctcggtcacggcctccgctgccgctgccatggcgggatctcacgcctccggtcgccggggacgctgcggcggcggcggcggcggcgaggaggaggggattggagagggtgggagataaacctcgtgctctggctgacgtgtggggcccgctggtcagaggcgagggctttgatggtggtgtttcttgctacgcgggttcgggtttgggtctcgttttgtaacgggccggaaggatagtgaattcttcacaattttggcaaaattcaggggattgtagccaaaataatttttggtaatgataaaattttggtaagttaacagtatactaaaattggatttcttagtgtctgttcagattatagccagaataaaccttaccaaaattttagtatgtatttaccaaaatttggtaagaaactaaataaatgcacatatttgacaactctatctaaaaccggtatggtttgaaatggcatcaatctgaacaagccattatatatttatcaaattttggcaaaaactaaatgacttaaaaaaaaggtatagtttgaaatgacgttaatctgaacagcctcttaattcaatcgaattcataattattatgcccaggattgtatctgtaaatttgaggtgatattgaagaatgcaaaacataaagcactcaaatttgcgatgacaacgtatgtattctgagctatcccatcgactcttggtaagaatcgccagtgtgttctcttgacttaggaatatgagatgaaaggacaaaagatgataaaaattcacgtactagctgttgagggtgaactatactctttcgtaattttacttcaggtacatgtattaggttaactaggtgaaatcccacgcattgctgcaagattttagtatgataataataaataaaaataatgtgtaagatagctagacaacgtaagattacttaagttagcatggttcatgataatttaaatttaaaccgtatatagaatgatgatttaaatgtaaaagtaaggtgatatgattttatgaaagtagaaaagcattgagataatttataccatggattaatcatctaaaggctaaaaatcattgaggtaatatgaattaatgagagatgaaaagtagagagataatttgtaccatatattaatcatttaagcattaaaaataattgatgtaatatggcttaatgagagaagagagaaatatcattaactaagtgaggatgaactatataggtacatagtatattataaaaaataatgaagatatatattaaaatattatgtgaattatgtgggatgataatttagcatgcttgtattttaaaagctctaaaatttaataaattataaaattatagatattatagcatgtttacataatgtttaatttaatgattgttagtagaagataatgtggtatctttgcatgttaagttttaggagttagtgggttataactttataataagagacgatatagattttcttcttactcaagtttagggtctaattgaggaccgagcgtagctcggttggcacgttcgcagtggagcgaacggccggtcgcgagtaactcgcgggacctcacctcgacgggattttcccgtctttctttaggacggtccttcagggcagtctcgactagaaatagggcacacacgcgtgcgcgttcagtgagactacacgtttcccgtgcactgagacctactggtctccaatctctttcccagcgtgtgttaaggacgcacacacgcgtgcgcgttcagtgagactacacgttttccgtgcactgagacctactggtctccaatctcttttccagcagcgtgtgttaaggacgcgcacgcgtgtatgtgcgtgtgttgtggtgtgagtgtggtgtatgtgagtgtgcgttctgagctgtaccccttcttaaaaaaagtttagggcctaatttgtcgttatatatgacatccaggtcgttattcacagtatcatcgtttaaatcaagtaaattagttactcctattaacacttctttgccattaaatttaagatatttttatcggtattttggtacgtcatacatatatgagtcaatttttaaattcgtttgcttttcgaaatacatatccatatttgagtcggtttttaaaatcgttcacttctcttctctatctctactattataaaaattgatgttgtttttgctggtaatttgatacgtcatccgagtttgaatcggttttaattttatatttcggtattaacctctatgtctactactgaaaaagaacgagaaatttccttggtctgtaaaaatggtaaaagaaaaaaagaaaaagtccgactgtaaaaaaaagtccgactaaaaaggtaaaataaaaaagaaaaagtccgactaaaaagcgaaaaaaaaaagcttctgtcgtagtaaaaagacattttgtcgtaataaaaattgtccgactccggaaaaaaaaggaaaaaatctctcaccagtaaaaaaacaaaaagtccgtttggttttttttaccggttttttcccgactttttttttcacgcgaaagagttttttttcccacgcgctaaccttttggtttttttcgtctggtttttttattccgatctctgttcactgcacacctcccgagcacttttggtttttccgtcagttttttctgtcaccattttttctcccgtgcgcttttttttacttatccagttttttaatccgatccgttcgccgcatgcctcctgctgccgccatatcgatactgtgttttctcctccaatttgattgcaaaaatcgtttccccacccctccctcatcattctctccttgattttccctttcgattcacctttaatttgttggatttaatctccgtttaacatttgccgatgataaaggccatcttccccggtcgtttttatcccgagtttcacgctctgattttggaaaaaaaaggaaatagtagatcgagtggatcaaaaatcctcaaccaattttaggtgacaggccaccgtactagtacgggattatcttcgggaggttgaagatggtagtagacggtgcgagctgggcttacggctccctttgttctaggtcgaagggaagtaggccaaacgaagggaggtagtggactgacctaggctaaaaaggaaggaaggctttcgaccaacgcacgggtattttttctagtttagtaatacataagaaatcatataaaagaatctatttaacaaaactcgcatgctaaagagacgatcgaactcctaactacagctcatgattttctaaaaatatatatatatccaaacgaactctcatagtaaatttcattttaactaaaccatataacaataataatgtcgacgtttgatgtcgcgattctggtatttgtatagtatggggatcgttggtactaggatatatgcgagactgaggtaaaggagatggggacgaggatttttatacagattcgggcccctgaactgtcaggtaataaccctacatcctgttggccaaagccggtcgttgatcttattcatcataatcacaccagtacaatatttggagtagcctatctaactgttgtcgacatggcggtatgaagttctgactcgtagtcgacaacagggtagtcttcctcctcgaatccgtgcccggcgagatcagagatagcgctttcgtctctctagacagtatccggagacaccataggagactagccgtgcttatctctgaagtcgatatccggcatcttgtcttggcgtatgttggcttgtatgttgatcttgtgtcttgatctattgttccgtgtatgttgattgtctcctctcctcctagggggtcttgtatttatacccataggtgtccccttgtccaagtagaactaaggaaactaaaatggatacaatccgagtagtctttgtcgtttccatgtagaactctagttgtctttccttatccggaactccctctatatccaaagtcagtttccgtataagacatggtatgtggtcagtcctgccgaaatttagtcgactactattaggtatgtggtatccataaccttgacagtagcccccgacttcaatgcaaatgaacaaattcatattctcaaccgccgaccctggagtaactgttatcgagctcacgtaaccgttctcggtgagttcagagataacgttagacttcccttatcagcctcgtgcgggcacctatagggtttgtctgagtcaatctccgatgtcagccaagaaagtacatagcatacgactaagtctcccgtcttgctgtaatcgagaatttggattgaagtcaagaaattttatctcgacgggtacaccatctcttcattccgtattccttgtcgatatccaccaaccgttctcgagtgatcgagaaggcgcagaatctgcgacggagccttgtcaacatttgtcgtactcgccttggttgatcttggcgtagaaccatagagacatggagtcttcgacagagtcgaatagaattttcctgaaatcaatactaagaaaagaatattagatagaaatagcccccgaacaaacgctcaaagggtgacatgttataatatgtatggaaaattgaaaatgaattaaatttacagaccaatgttttgtatattagcgtcttctcttttaccgacttcgattagtcagtttgttgagtcatacactctccctagcccccagccttgtcgtcggagaatcgttctcggaggataaggctcttggacccttgacctgccttggttgaaaaagcactgatcctagcccccagtcgtgaagttggaaaactcaatttccgattacacggcttggttaatacgcacggcgagaactcttacatgaccagatcttagatggccgtttgtctctacaggatccgacaaggccttatctgctctggacgtcctcagccgaagttcccttaggttcctcagaggccttgtcaggacggcgtaaagggacatgaggataggtttcaactctaggtgtcgtcgtggtaagagatctctgggtaaaacacttagcgatattgtgtacctgatatcaactttgttggagtagaggtagtgggagaatcgctacaccgctggtcgaggaccaggtagtagtcgtaactcgaccacttaaagtggcggtgcgagagattgctacggtatactggttcgagaaccagcgagtagaattatctctcgagcaccaatagaagttacggtgcgagagattgctacggtatactggttagagaaccagcgagtagaattatctctcgagcaccaatggaagttgcggtgcgagagagtgctacggtgtactggttcgagaaccagcgagtagaattatctctcgagcatcaatggaagttgcgatgcgagagattgctacgatttaccggttcgagaaccagcgagtagaattatctctcgagcaccaatggaagttgcggtgcgagagattgctacgatttactggttcgagaaccagcgagtagaattatctctcgaacaccaatggaagcgctagagttggtttattacatgggcatctcatgtagccaacatgactcacatctccaacttatagcatatccggatgtctgttcgcaatcatgtcgggtgatcaagccgacgacgttcgcaaggaattatccgttaacaatcttttctcgagtagcccagccatggccggtgctatgagataggtcgtcagtcttcgttggcaggttgggcgcgacgactctgcatttgtcgagatcgttctcaataatagggtgtactcgaccacaacctactcgagcgctcaattgtttctaaaaatattttctagaaggcaagacatataacagagaatatcaagtatgtactcaaaaaactgcatggatcttctagcattatcaggatataacgagcagatgtaaatatcagtcattatatacaccgtaaataagcatgatttatatagaagaaaatagagcgagcccccagcgttcaaccgtagtcgatttaacatcggggacactcgcgcaatagacattgtataaaaaacacgctctaggtaaacataataaattattgatctgacaatatctaaaaataggtacggtaaattgtatataaaatattgcgtacctttatagatatataccgaatatatctacgaaattagtagattaatttaaaatcaatcttactaattaccttcgttcgcatatttataaagatcagactatgcgaatatctgtttttcctcgtcatatataaaggtgtcttggttatatgactgatcaaagccattaattagcttcctgatcaggcgcacgtgtagaagcagcatcggtcttggcttccatgtgtagccggccggacatggcagttgatctcccttccgtcttgctgttgtacacgcgtccgaactagtcacgtgtgttttcagtattggatttggagaagatgccatgctcggtttgaattcgtaaggatgcccatcgatgcttgctccgtatcctccttctcgatgccggatcaatttgtgacgtcgcctccacggtcagagcaggtactccgattgatgaagtagattggattgttaatgatgatggttctgatcttgtcgggagacatacttcgatcgggttagatctccccttcagccaaagtcgccgagtagattattgttgaagaatccatcttttgaacccatctcatcgaaatcctaaagcaccaaaatccccctacctggcgcgccactatcgacgtttgatgtcgcgattccagtatttgcatagtatgaggatcgttggtactaggatatatgcgagactgaggtaaatgagatggggacgaggatttttatacaggttcgggcccctgaactgtcaggtaataaccctacatcctgttagccgaagccggtcgttgatcttattcatcataatcacaccagtacaatatttggggtagcctatctaactgttgtcgatatggcggtctgaagttctgactcatagtcgatgacagggtagtcttcctcctcgaatctgtgcccggcgagatcagagatagcgctttcgtctctcctgacagtatccggagaaaccgtaggggactaaccgtgcttatctctgaagtcgatatccgacgtcttgtcttggcgtatgttggcttgtatattgatcttgtgtcttgatctattattccgtgtatgttgattatctcatcttctcctagggggtcttgtatttatacctataggtgttcccttgtccaagtagaaataggaaaactaatatggatacaatccaagtagtacttgtcgtttccatgtagaactctagttatctttacttatccggaactccctccatatctaaagtcagtttcgatataagacatggtatgtggtgggtcctgtcgagatttagtcaactactattaggtatgtggtatctataaccctaacaaataacattaaataaacttcacccattgtaacgcaagagcttttttttccagtttgaattaaagatttgaacattcaacacgaaactatgaattgtgatgattcaaattcaatttaaatttttcttactttttcgtagtcgccatcagctccagaccaaaccccatcctaaaaatcctccaaatctcgcccatgtcgccgccgacgatgacgaccgccgccgccgccaccgccaccgccatggccgccggcgttctcccccgaccgcgcccgcacttcctccgccgcggcatcctcccctcgccggcctccccgctccccttcgcttcccgggtctcctccgctgcgcccctccgccaccgcctcccgccgccgcgcttctccctctccccgatccccaagaccctctcctcgccgtcgcacgtccccgtccgctccctcttcaccggcatcgtcgaggacgtcggcaccgtccgccgcatcggcccgccgcccgcgccgccctccggcggcggcggcgaggcccccggcgttgacctcgaggtggagacgagcaccctcctcgccgggacgcagctcggggacagcgtggccgtcgacggggcctgcctcaccgtcgcggccatcgacgcggcggcgtcgacgctcaccttcggcgtcgcgccggagacactccgccggacgtccctcggcggccggtccgccggcgacgccgtgaacctggagcgcgcgctcacgccggcgtcgcgcatggggggccacttcgtgcagggccacgtggacgggacgggggagatcgccgcgttccgggccgagggggactcgctctgggtcaccgtgcgcgcgccgccggagatcctgcggctgctggtgtccaagggcttcgtcgccgtcgacggcgcgagcctcaccgtggtgaacgtcgacgaggaaggcgggtggttcgacttcatgctggtgaggtacacccaggacaacatcgtgctgccgaacaagaaggttggggacaaggtgaacctcgaggccgacatactcggcaagtacgtcgagaagctcctcgccgggagattggaggcgatgtcgaaggtgtgaatttgccatttgttgagctggaagaagcactgctcttcattccttttcggtataaataaggcgcaatctaatgttcatcagtaatggcagattctgtatttctcctttctgtatatgttgattgagatgcatatttagttatttatgatcaattgatttcggtgacgctaccttattcatattgtttcatagtcattgaatactttttgcttgctgcggagtaaagtgcttggtgtgatggtgtcttatcttggttggattggtctagtagttcactggttctagttcatcctcgcgctacttaaaagttagtgtttgatcagtgccatgtcatttgtcatgtctgttaattgttcaagaggtagtagcctggttataactatctccaatttattggttccatgcaatgtcgtaattcttgaaagaactggtatcaattttaggtggtagtagcgtgattttctgctgccatatatgaacatttccaatttctggaatagatcgtgatgtagggtgtgttggtagttgtggtatctgtttgcgcagttgtatgtacggttatctgttcttgatgggcttggcatcttggggaaacaggccacactaatggaagtagaatcagcaaaccttcaccagattgatctacatgttaccttttcgttgtgtttttcctgtatatttgatactctgtaattgatatacccgtgctttgcattgtgcaggcaggaaagagaagggaatgaaagcggatcctgatccactgcttcctttgcggaatcgttctggagccaggagcaaggaagataaaaagagaggctcttttcagacttgcatagctccattgcatcgacgaaaaattataccaacagtgttcttgtaataacgcagcttgtaagttgtaagcttgcctttccattgcctctgttgaacgaagcggagacagttgaagagttccatatgataattcagagttataaagtttttgacattgtgtaaatttggtgttgcttctgctgctgctcgtgtaattctggtggctgcttagcttgttgctgaaggctgtgtttagttgaggggaaagtttggattttggttgaaattaaagatgatgtgactgaaaagttgtgtgtgtatgacatgttgatgtgatggaaaaggactgaagtttggatctaaacacagccgaagctttgctccagattttgtatggtggttactggctgaggaattccaggcaggttgttgtcctgatgctgttttatagagtagggtagagttaagtgagaacaattagtttagaaaatgatcagttgacagaaagcgcatctggtgtagtggtatcatagtaccctcccacggtactgaccggggttcgattccccggatgcgcatttgttttttattcttttcactctgtcttttttacttctctcatcatcaaaaacaaaatgcatcagtctgatgatcaaccatgttttttttgggggggtttctttttactcataaacgaaatggatcagtctgttgatcaaccttctcaccatcaaaaacaaaatgcatcagtccgatgatcaaccatgtttttttggggggtttctttttactcataaacgaaatggatcagtctgttgatcaaccaggcgttcgttttcatctctttctcttgttttttttttaatctctaaaacaagatgcatcattttgtagactttctgatgatcaatcaggtgtcgtttcttttcttttcaactccttaaacaaaagcaaagtgcgtcattctgataatctgatggtcaatcatatcagggtgaggattgaagaatgcatcgtctaaaaaaaacgtgaatgctatatcattctggccggttgtcaatcagggatgacttgtgaaagcattcgcaggctgcactgcactgctacagtcaaggcagctcactgaaggccgtgataaccgatttggtcgccataaattatgctaaggattaattatggtcagtctactaaccctaacataattataattacattattaggtccacggttcaccttcacgcttcgtgaactaatacatctccatctcttacactctcctactacctacctctatatatgtgctggatttggatacttccatttgtgccatacattttgtcatttcgacctgctccatggcaaccacatgcatgttctccaaactagtgatccctaacaactacaataatcggagttggcatcttgtaatttattttttggtatactaactgtgggtataaatttagttcgtaaacttaataaatgtgtgcattattcctaaaacttcgtatattttttttcgaggggacaggcagggagctcctgcaatttactatagaaaaagagagttgatccagtttataaggaaaaccggacccaaaaaccttacaactgcacagttaattaaaggaaaactggcgaaaacccggcattgacaaaactgaaccaaatgacaattgtccaacaaggaaaaaaactcctagaacgaatccttcaagaaggttacgctgacagaacggcgacaacgtccgatcctaacgaatccaaggttttcacccgaagagtttccttgaagtggagttgaaacgagggctccaaacgcaacgccttcaagaaggtgaacggcgtccgagggcgctgccgttagtagcaccagaagcggagcaaggttttcacctcggagaccctgtcaaccaaagcatccaaaacggaagcttccaaatgcctcctgcacaccgaagggtacctgcactatggacaccacctgcacaatgaccggattctgcaccacccttgaccccgactgagaacgcgccggatctagacctaaagcccaaatcggccgtcctcctttcaccaccatcgccagccacgggcgaggttggctgccggcgccgcacgctccaaacaccaccggacgtcgcgccaccgccggatccagacgcgccgccgccggatctgttcaccccaccgccgcccgtctccaaccccgccgccatcggccgctgccgccactaccgccgccatctccatccccgccaccgtcgcccatcgccgccccgccagatccggccgaagcggcgcgaatctggcggtttaccgccgccgcctctccggagagacccccggtctcctaagagtggcgcgagagaggagccccgccgccgccgtccttgtggccgcgcggctttgccggcggccactcgggcagcggcgaggcggaggagggaggtgggggagagagaaggggtggccgagtcgtcgcctcccgtgccgcccctgggggaggacgacgcgagggaaggttgtcccctcaagtatcacacacttaaaaacttcgtatatgagtgcaatttagtccaagaagttaataaataaacatataggtgcaacaacttataagatgggtaagattttgtacaaacttaagaagtgatataacaacttacttagtttgggcatattttttctatacatgttcggtttttgaatagttgttttgtggatatacatgtgcatatttgtataagcttactcaaattttatcattctagtaaataaaacaattagattttactatgtagaaatttttgtatttcggttgagatttgagaatgtgaagcaaatcagtggtgcaaattatatgatcaatgtaattcttatggattaatttagattgtgaggcaatatctactggattagcatgtgatggcaaattgacattattgaaaaaaaaaactcagctaacactcattaaccaaagagcaaagttattacactcacttgccaagttgctagaacaaaaaaaaataaaaacctaagttgtcaagtggtacatactcacttgtcaagttattacactcgaatgttcaattataagtgttatataatgaatacaatttactcttattttaggagaacaaaaatacgagaccgactgtctctgcaccatctgaaatacacacaaccatatttcgtgaattaacacctaatctcgatctattgtacataacctaaatatacacacacttatatatttatagacacgatttgaatcctggtgagagtgatggaggccaaacacagacgcgcacgcaacttaatttaccattacactaatggtacttattgtgcaactaattgacagtggattaattttagaaaacgagtttaatctcaactttgttaactacttcctttgattcaaatcattttagcattttacatattaatataaaatggtagaatgacttacatcgtataacggaagggtacaaactaatatatataggtacatgcgtatacgtacactcatcacctggacctggtaggtagattaattaggcctggtcgtagtagtctgatatatatataggcgtgtgtgcgtgtcatgttgccatgtacacacgttaattagtacgttacgtagacatgcaaagcacacgttaattagctagctccttggctactagtaatgatcaggtcaaagcttagtcattagtataaattctgaactaacctatgggcgcacacatacgggaaacggtacgattggccgtgtcctgcatggtggtcaacgtaggcacatatatgctcagagaccttgcctggccttccaaaatatcaagtcgtcagaagctattctaaacggtttagattgtaagttagattatgagaatatccagtatataatatggaaaataaattaaaagttagaagttgaaaaactcagtttttctagctagattctcacaagttagggcccttccattctataggaaaatttcctatgaaaacctttcaaacaaagaattaaatcctatgttatcctttcaaattcctatgtaatggataatcctatagagattttaaagaaaatttagcaagaactctaacctattggaaatttccatttgattctatctctctcatctgattcatggttttttttctacggtccaattaatcggttattcatgtgtttttctgtattttgcaatcatctgttttacaagtacattcctattagaattctacgttttaactattcctccgtttttacattcctactattcaaaagggccctaacattttaccatctgattctcataagatccctcaattatggcttttggctctttccaccttccgtgtgggtgttagtactatatatgacatttatataggttttatggtattttatagaaattattttaattataatatagtcgatagagaagtcacaaattaatatatactgctataattctcgtactctgaaggagaggacgagttagcacaagcaaccttcttaggcaatatttccatacacaaagaacatgccaattatattgttcctagctaagtggatagtggatacaatatgccttatttattagaaaagaagtcgttagagcgatacaatagcagattattagccagctgtaaacatattttaatgagataaaacatgagagagaagagcagcgggctacagatctgtagccagctgcagcgcggactccaagaagcaatatgtatataacaggtgaaaccatatattaatagtatatgacggagcgtggggctcctcaccgggagactgcgcgggcccccctttgccggttcggccgggggcgctgagtgaggctctaagcccttgatctgtggaatgtttcgcgagaaaggaaacgcacaagacacgggcgatgtatacaggttcgggccgctgagaagcgtaataccctactcctgtgttctggtggatctgagtgtgaaggaattacagagagcagaagagctagagagcttaggtgttctctcagttgtcttcctccttttttctttttttcttccccttttttcgtcctttcttttcccccctctcttttcgtcctttcttttcccccctctcttttttcctttttggtgggcaaggtcctccttttataactcaaggggatcccacatgctccacttctacctacttttcttttgggtggagacccactctatcttcaccaaaactcgactcaccttctcttggaagctaaaacacagcttgttcttcagtgtggccaggcgtgctcactcgtctactctcggagatcaccctgtcatcccttcataaatgggcggagatttgcaatggctgctgtccgaatgaccctccgatgggatgggtcatacctacctccactccgctggaaggaggtgcaaaacgggagcgcggttgtccgcctatgacatgacaggcgtcagaccagtcacagaccggtcactctcgtccaccacgcgtcagtttagcaagctgcatgtctgcccttcttcatacaaagacttccttgcaatggttgggatgaagcctggcatatatctgaccgggaccgacgtgccatcttcaggagctggcacgccgtctccggctagggacaagtgcctggaggctctcatcaatccgacgggacggggcgaggcgtgtaacaggccacctgccaccacctaacccgcgatctgaccggtctgtgaccggtcacacgcgcgcccggtcacggaccggataagcgagcgcgctgcgctgcattacatgcgacgtgacgcgctcgttcaacccgcaataaatgcggttaggtgagccccgctgtgctcacctaacccatatacgtggcgccaaacccacagggggtcggggcgccccggccctcggggccgaaacgggagcggtccgacccctcggggagacaaaaggaggggcggccacatcaccctcgggcccgacccccccccccccccccccgagggggtcaggccacgtgggtgatcgcggctgcccaagcctctagtcatgatactcccggtcccatgtcaccgacagtatagtaagcaactattgtatgaattggctattgtattgactatatatgaattggagctagtagtgagctatactattaaacttgctcttatggtggtggagttgaaaaatatttatcgaggatcagggtttacacttccattttccaccaaaattttgggctcacttaaaaaagagtaaattacaccaggggtccttaaacttgtaagcatgttttacatatgtccatgaatttggaaaacgtgcgtcaatgtctttaaacttggtttattgtatcatcacggtccaaaatctcgttcgaccgtggacttacctacgtgacatgctacgtagtcaaatgaggctttaaaccgagatgatataataaatcaagtttaagaaccttgatgcgcactatgcaagatatcgcgaatttaggtgaaacctccctgtaagtttacggagcgctagtgtaatttactctttaaaaaacatcttccgtacatagatactacgtttaagtactaaacatttcctttggtttcaagagtttgatttctccctgattggttgaccatgtataaaacgtgtatgcaacaagacaacgagtatagtacaatgaagacagagcgacgaccgagatgaggaatttcctccggtttttgatcttttcatcaggactgtggaatgcacacgaccgttgccaaaataatggccatgacagctcgtgcttaattaacaagtaatctcaaaaaatttggtcagcgttctctctcgctcgcaacgaatccaaaatccaaagttatgatcgacgacccaaatccaatcaagcaaagtggatcctagttggtagaaaaaagaaggaatttaattggggcatcaagtttttttttgagttcaagaaatagattttgatgagtatatgtttccatggaatttatgtaatattatttttactatctttgaatagaagtttcacatgaaattggtgtgacattattttaccgttctcgaggcgaggataccaaaataacatgatataaacctctgtttcacatgtcataagtatctatttggctaaactgttaactgtgcattataatcagaagtggatttttaattttaactttagaaataattttaggtatttatttgtctatttggttgccggcatgatttttgctagctaggggacaagtaaaagaaatccttaaaaattttcttacaactcaaaagttaaaattttttcattgtgaatgtagaagctggattttaatccattttctaaaaaaaattatatcattttacctacagtataatttaagataaatgagctgtttaatttactcgtgtgggtaggagatagagagaacattgtcattagtaatcactgatttacagattagtcactcatctgctgacacaagaatgtagacaccgttgatgttggaacatggaaatcactgcattcatacgcatcaacacaactatataaaagctacagaaacattgtttttgcatttcgaggtaatagataactctagcccccattacttttgagtgccgaccaacacagttttcaatttggctaaatatctttcacaaaatgccaatgaaattgtcataaagatgatccaaacaaagccatgttaggtaccacaaccttttgttccgtacttcttcataccacacaaaaacaaaaaaaaagataaagtcacaaccatttcaacaaaaattccaacaatgtcccaatgacaagtgggcccacaacctgaaccggctgacacggtcccacatttcagtgacagatatgaacaccctgtgaaccatgtggacggtctcttgcacacacaggagaatattttgttgtgcaggggagatgaacatggacaacctatgatgatcagttgatcacctatgatttgttgaaaacaatgagcagaggaaaacaatgctggtttggtagacattctcagggttgatggagctcaaaaactggtgacagcggctagtggtttttcacagctcctgttctttgtttaactaacaaacagctgcatgttcatatgtttgtgcctaagaactttcttaagcgtgtcccaacaaccccttttggtgagagcaatggctcaacaaccttagccactttgtggattttttttcttttgttccatgatgattaggaactgcatgcaggggacttgttttaacggtgctaatcttttgtttggttcgttgttgtgatgtatccatgcagataagagataattcagttggcctaactactttactgatgagcacatggttttttcatcaaaagtttgtctggatttttaatattgatgacagtatgctataaaaattactaaaacatggtgaaaaaaagtacatttgtctcattggtgatagaaataaatatagcacattaattggtaaaaaaaacataaatatgtagtttaggcctttagggtgcatttcgactataacaatttatttcgcattttgcctggatatagtaaatgagggtgacaattttttaataaatgaacttatgaacacaaccacaaaaattaggctaataagtccacaaaccttaagaaaattatcaatatttttttaaaagtttatgtaagtaatacattagtggtaccattaaagagtttacgagttagaactattaagactttcatcccatggaccacaccaatctatctagtttagtgctcatttgtcatctcccacattgaacatctcataattaatcttctcctaactccaaaccagccagccagccagagaacaagtacacaaaagaattaagtatcctaggagataaataccatgtcacattgtcactcaaaagcccatgaaacaatcatgtgctaaaaaaccaggctaagtcatgcatgtgtccatgtagcagagaggataagactagagagcagccaggccacattataatagagggcaacaaaaaaaacaaaaaaaatccagcagctagcttcactggttttgaaggcttccctaactagatgctggatttgctgctgcatgggcggcgccccctgtattggccacctcaccacctccatggattgcagctgtcctctctaccttaaccctttgaccagtgcttgtttgtgtgtagcactagtagacaaagcaccatccatgacttgaaaagaaaattcaccaaattggttgcaagtattggttgatggctcttatctatctagtaagtagaactagtagaggagataatttgcagatgttttgctttcttttcttgtcctcaccgaatcctactaacctcctctttgtggtaggcatgtgcataagtgtcaagtgtctatatatattcttctgcacattctttgctccctgcccatagatacacatttcctcttcttcttcttcttgttcttgttcttgtgtcctgactgttcttgataaagctcagatttgggaattggaccacatcataacattctttggcagagtttgtgaaggtacatttggagtttggattaatttcaggtggttagctgttcttgatcgttcttcttgttgttggttgctggaagattcgaagattttttttgtgtgtgtgtgtaaattgtggtgttcttgtttggcattgttgctcagttagttgatcatggcgagccgggaggagagcggcaatggcggtggcggtggcgcgacgccggcggcggattaccggagctcggacagccggagctcgagccggcggagcacgcggttcaaggaggacaacgagtacgtggagatcacgctcgacgtcaagggcgacgacacggtcgccatccagagcatccgcaacggcgccgacatgcccgaggtcgccctcctcgcgcgcggcctcgcgcagcagccgccgccgtccgcggcgcccggccccggcgggctctcgtcgcggctcaaggcggtgaggaccgagctgaggcggatcgcgtcgtggaagttccccagcggcgttctcagcggcggcggcggcggcggcgacgcgccgggcaacggcaacgaccgccgccctcgcctcgaccggagcatgaccggcgccgcccgcgcgctgcgcgggctccagttcctcaactccagcgccgtcaccaatggctggccggaggtggagaagaggttcgagcgcctcgccgtcgacggcttcctcctccgctcccgcttcggccagtgcatcggtcagctcaagctcaagctcacctctgaaaattcctctaaatttctgatgaattcgaactgaaaccgactgaattttctcgccaaatcgtgttccaggaatggttggatccgaggagtttgcggttcagatcttcgactcgcttgcgcggcggcgagggatcacggctcagttgctgaccaaggatcagctccgggagttttgggagcagctctctgatccaggatttgatgccaagctgcagactttctttgacatgtatgtgttcagttctatcaaaaattcaagtttacattcagtcttgaagtagtagaattttagtcgttcaaatattgttagttgcacatgttttgtcttgtaatagtgaaatttgccactgaaccttttgattagtatgcacatagattcagttatgacttttggaaagggactctgaagtttgttgactgacatctgagtgctgaatttcttgcagggttgacaagaatgcagatggtcagatcactgaagaggagctcaaagaggtaagaaactggatcaaagcaacacaaaaaaaaaattaagcataatttttccatgtaatttgaagcagattgaggattctgaatttttcttgcatttttcaggtcctcaccctgactgcctctgcaaacaagctgtccaagatcctggagcgcgtcgacgagtacaccgcgctgatcatggaggagctcgatcccgatcaattaggctacatagatgtacatactctcaccctcaaatcctccacatatttgaaaaaatatatatatctgaatttgacattgttaagaacaagaatctatgcaattctgaatctgaaattgttcagagtactagagtagcagtatctgcaattctgaattctgacactgttcatggtcacctcccatttccaaagatatcaaacctggagtcgctgctgctgctgccgccgtcgcaggcgccgtcgaagctggtgacgcacagctccaacatcagccagctgatcagccagaagctggtgccgacgcacgaccggaacccgctccggcgggggctccggcggctgtcctacttcatggaggacaactggaagcgggtgtgggtgatggcgctgtggctggccatcaacgccggcctcttcacctggaagttcatggcgtacaagcgccacccgacgttcgacgtcatgggctactgcgtctgcgtcgccaagggcggtgccgagaccaccaagttcaacatggccctcatcctcctccccgtttgccggaacaccatcacctggctccgttctcgcaccaagctcggcgccgtcatccccttcaatgacaacatcaacttccacaaggtaacactctttcacacaagtatttttacggtgatctctactgttagtagaatatgtaccgctactagtattatcaccagtagaagcgatctaaatcattgatttataaattctactggtagaaacaatatcgtaccatcgatagttaaggttgtactataaatagacattgtccatttgacgagggagaaaaacaaaataaaaggttcagatttatcctattacaatattaccggtagagaacatcgtaaaaactcagtaaggtcattattgacagttgtcttctccggtgacggcaggtggtggcagggggagtggtggtaggggtggcgctgcacggggtgactcacctgacgtgcgacttcccgaggctgctgcacgcgagtgatgcggcgtacgagccgatgaagaagtacttcgggcagacacggatcccggactactggtggttcgtgcgcggcgtagaggggatcaccggcgtgatcatggtggtgctcatggccatcgcctacacgctggcgcacccgtggttccgccggagcaagcttagtgacagcaacccgctgaagcggctcagcggtttcaatatgttttggtactcccaccacctcttcgtcatcgtctacatcgccttcgttgtccatggcgtctgcctctacatcaaccggacttggtggaagcagacggtgagtgagccagcttctggtcgatttgcgcccgtcgggttctttgtggtctgaattctaaaaaatgttgctaacttttgtgtgatttttcagacatggatgtaccttgccatccctatcctgctctacgccggtgagcggattttccgggctctgaggtctcatggcttcaccaccgtaaggattgagaaggtaacccaactcttttttgtttaacatcaaaaagaaaattagttctgtagcactgaaagtttatgggaaaaaaaactttattagcacagaaagatctttctgttcactttgacacgacaatttctttccctgcaaatgtatactgatatggtactgaattctgttcaaggaaattgaattaaaatggggtaaatttgaaacgtgcaggttgcaatctatcctggcaacgtgatagccatccacatgaccaagccccatgggttcaagtacaagagtggccagtacatctatgttaactgcggcgaggtctcgccattcgagtggtaaatcctcaaattcctcaaaattctccggtcgcggcacgcgaaccaatactggttttcacctgacgattgttcacaactgatcatgccaatgcttgtgtcatgacaggcacccgttcaccatcacctcggctcccgacgacagctatctcagcatgcatatccggtgccgcggtgactggacctcgagcttcagggccatcttctctcaggcaagctgatcgccgagccaccatggcgaatcggggaaaatttcgggtgctctgctttgtgaaaatttgtggatgatgatggctaacaatgtggtgttcttggttgcagatatgcaggcctccgatgaacggccagagcggcctcctccgggctgactgcatgtccatggagcaccattcaaggtgcgctttttttccccggaattttgaacaaatttttagtttttgagatgaattcgctccaatgatttgttcttttgaaaaaaagggagtaaaatttaaaaacctacaactattttttgtcaaaattaccaatttgctgcaatttcaaaattcagaaaacaacaacattttttttgtcaaattagatatttgccacaatttcagcttggccaattcaagaggacaacaacaataatgcacgactttacctgtaagccggccctttcaaaaatgattttgtcagagagctacaataatacctaaagtcgcccgaataattgctgctttacgaaatttactccaaaaaaaatcattctgattccattttgacatttgacatttcaaaaacgattttatcataaagctacaataatacctaaacttattcaaataattgcaattttttttgggtgaaatttgctcgaaatatgaactcaaattttggcatcttgtgcaggttccccaagctcctgatcgacgggccgtacggcgcgccggcgcaggactactggaagtacgacgtcctcctcctcatcggcctaggcatcggcgccacccctctcatcagcatcgtcaaggacgtcctcaaccacatctacgacgaccccgagtccgccgcctcgccgcacaccaccaatggcggcggcgccgcggccgcggcgaggagggcgttcatgacgaagcgcgtctacttctactggtgcacgcgggaggagggctcgttcgagtggttccgcggcgtgatgaacgaggtggccgaccgcgacgccgggcgcgagttgatcgagctccacaaccactgcaccagcgtgtacgaggagggggacgcgcggtcggcgctggtgacgatgctccaggcgctccaccacgccaagaacggcgtggacgtggtgtccgggacgcgggtgcgcacccacttcgcgcgcccgagctggcgcgacgtgttcaagcgcgtcgccgtgaaccaccaggggcagcgcgtcggcgtcttcttctgcggcgaccaggcgctcacgccggagctccgccgcctcgcccaggacttctcccacaagaccaccaccaaattcgtcttccacaaggagaatttctagatcatcggattcatcgtcgtcagctgcctctccggcggataattgagttctttcatcctctgagcgagctcagattaagtgtacaattatatacagattaatggtgagagataggactacatattttagtgagtgattggttgttcgttcgtttgtttttttttctccttctgtgtaggtagaagaatggtagggggagtgatgattaagttagttgatgttttttttgtttcacaagtttgtacaaaattaccagaaaacgatgatat

SEQ ID NO: 24804 - DNA, 13958 bp, Oryza sativa
tatgggacggagggagtacatgctctctctaagtagataatacttcactttaaaaaaaaattgtgatcgctatattctattataatatatataaatatcaatcaacaaatgaatttattgaagtatattttaagattaaaatgtagatatgcatggtcttcatatttttaagatagatattttaaagattatttatcatcacattttctaaattttgttaacaattttatttaaaatgcgaagtactatcaatttgagaggagcaagtatcgattttttttcacgaacttgcaaaatgattgcacatcagtatattatattactccatctatcccaaagtaagtgtagtttgcattgtttatgtctaacgtataaccgttcattttatttaatgtttttatgattaatatttttattgttattaaatgataaaacataaatagtactttatgtgtgactaattttttaaatctttttaataaattttttaaataaaacggacggtcaaacgttagatataatatagatatttatagttatatttattttagaacggaggtagtagaagaaattgagttttgttcacaacgtaagataccaaaccgcaatcgttgccggttacaaggaaatgggatctaggcatctagcggaatagaaaacaaacagcaggagcaagttacaagtatctacgtatcactcaggtttaggtttataaagtgggtggtcctatatagaactccctttatattttaatatatgatattgttatcttttttactaacgtttaatcgttcgttttatttaaattttgtgtgtaaatataaaaatattcatatcaaacttaaagaacatttgatgataaatcaagtcacaataaaataaatgataattatataattttttaataaaataaatgatcaaacgttgtaaaaaagtcaacaacgttatatattaaaatatggatgtagcatttccagagaaaagcgcgtagactacgtggaagaccatccgtgctcctcgttgcaagtcttgtcaaaacttttttaagtagatattagcatctagtcgtagataattaattaagctgggcctgggaagcttcgaaaaaaatggctgcacttggaaagtttgcgtggttagtggccgcccatatcactatatcatcagtgccgatatagtacatcgaaaagggcaaaatcggtcgaaaaaaaacaatgtgcgaaaaggtgcaaacagaggacgaccgtacaccctatatatcgtcagtatcaataatatagccgacatgcttggatggtaattagactagccacgcctcttattacttaacaattggttaggttagtgcatattgtgtgatggtaggccataggcactaggcagcggcacggcatagaaaatacagaaatatgtaaagtatttttggcacgaagtctattggtcatgtaaaaaaaccaatcctatctataaatctagacacatatatatccagattcatatctagaattaagaattatttttttcggagggtgtagaagtactcatgctgctgatcaatattctctgattggttaacctatgagtcggctatgactaataacccgtagatatattgaatgaagcgatatggcacaatcatcattttgtttatactggttacataccacaatagcttattaacaacaaagaaataatttacaaataaaacttacatgcacgctcttatcaatttgagaacaaatgctgaaaaataaaccacgtaaaggaaaaaaaaaggctaaaatcaaatctaaaatatggttttaaaatctaaattttagctgcggcttgtaagctaaagggtaaacaatgtgaccttaacattttactggtaaaagttttatgcatgttaatttgtggtttagaaaataaggcagaaaaacattccacgataaaaccctagaaattaagttttaaatttaaattttagttgtacctgataatctaataaacagatgataaagatcacacttcaaccgtgaataccgatgttgcgtgtcagcttaatcacttttacccccatagtgccaaggcaagatatatggtactgactacagtaacattgtcgaatcatatcacaacacatacaaacatgcagacattatatgggcagcatccagcatattggcaaccctacacgtacaaggaaaggtatatatcaccttatctagatgtccctctttgtgcaaagccatattcattcactccaatcattatacctaatatttccactacaagtaaaggcaaatactccctctgttttcattggtcagccacctagctcaccttcataactcaaaatagctagactcctggtagcgatcagaggaccccgtgaaatgttagtacaacacatcgaggtacgtggaggaaacatgaaaataattgacacagtggagacacatgatatggttctagaagataagatgagtaatgggagtgatcgatcatcgatccacagttacacttttttttttcgaacacgcaaaaaatttacacattaatatattagaagaaaaatagtttttattacacaacgcaattggctagacagacctatgccgttgttacactagcacattctttcttcataagcgagatgagtatatttctacataacaacaattttagaactctaaacatgcaatgtaatagttatatcattagaattcaatagcaattacttcgctaaagcgtaatatctactcactccatcaaaaaaaactcaatctagaagtggatgtgatccctcctaaagcaacgaatctggaaaaaggtagtacatatttattgtcctagtaggagtcatattttctcgtagttgagtgtttttttttgaacggagaaagtatagctattcgttttggtatagcgtaataacggtcaaagtgtgatcatgctcagtcaaactaccaaaatgttgaggacaggagatcggggttatccagcaaaaccaaccaataaaatcgcagcttgctcgatcgatcacatgcatggacagtgcagaggtgtcccgggcgagtcaaggaatttcccttctgggtccagacacccgcgtccacgccatgcccgggggcaggccggtttccatccaaatggtgtggattcgttcggtcgtcgatctcgtccccgccggcctacggccgggggtgagcccccatgtgccgtgctcggacctgcctctccgagactctgatctccaggtctctcctcgtttgcatgccggtgcggttagctgctgcgtctcccatctcccgaaaacggcgaattgtcccgttccagtctctccttgtttgtccatctgcccctcatgtgtcgcggctgttggtggcaaacccccttggcttcatctacgtacactacccaagggattttcctgtaccacctgaaaaaaatactgtagcaacagggtgtcttgctccttttttatttttttttacctctgttcccctgaaagaaatgaggggaatgtgatagttggtctctggatgataatctagtttgcttaattattacgagtgtttccacgtttatgttcatgtttcgtcttttccgtcggagatgagaatgcttttagatctatgtatggatcttgtttggattgatacctaaggacatatataaaggtagaatctaatatgagctatctatattaattaatatcactagagactatccttttacaatggtagaaacaataaaatttctaaatcattattgcactaaatatttttttattatacttctttccttttctccaacctcatgcaacaaactttccgttaataaatactaagaatcgattctgagctgttgtcatgcgtagcaacgatgtttctcttttcttccctcttattcttccaggtcataaaatttacttgcatgacaacaaagagagtccgttattggacaccatagtacatgctctaaattctaaggaagggttaggagtaatttaacttcgtttttttctcatgtcgaaggagattgtcagtctcatttttgtctaaacaagatctatgaaataagggctaaattgaaagaagaacggttttcctactttccagttgtagtgcgcaaacgcgcaatctatcaggtggttattcatgtcaaacatttttgactagttgtcgtatcccaaagtagaaacgagtagctttgctttgaaaaattttcagctactgcgtcaaacattggataagtggaattcttccttactgtctagactttgagcgaatggaaaacgttgaataagatggaagagtcgtgtacaccttatcaagtgaatgagtcatatcggtggttgacatgggtatgtcgggtgattttctctttatcctcgtcctattagtcaacattttcgaaagatttcgcgaactaggtattgaaatgaaacgtacacatatatgctaagattaggggtggatctaggaaaaaaaattagagaggctcaattatagagtttcttcaacctccaatcatttagggacctttagtttattatttatggtgaaaaaaaatcaaagaggtgctcacgggggtatccatgaatcttgtgggtgtaggggggatccacgtcgaatcagcccctggctaagattgtgatgaatacatcaagatgactagggtcgagtttagttccaaactttttcttcaaatttccaacttttccatcacatcaaaacttttttacacgagcaattctacggtccttgaggaagtaccatgaggtaccaaaattttagtgtaaaatttggtacctcatagcacataggtaccaagaggtaccaaatttacaatagaaaaaatggtacctcatggtacctcctcaaagaccgtaaaattgctctttttacacacacaaacttccaactttttcgtcacatcgttccgatttcaaccaaactttcagttttagcgtgaactaaacacactctggtagtacagttctatgggacaaattaacaattgatatataagccctggcatcatatattgatgccacaaaagaacatagcgataaaacaaaccatgacactaaacagtccgattaataatctccagcacacctgaacactgataccaaacgaacagctttttttttcttttaccaagatagtgtgaacacaaagtaagctaaccccgaatgacaatgtacagtcccaagttacaggcttccagagctggtaagtagcagcagtaccactgcatggcttcccaaatcaccaggcccggggttttcatgtcctggcggtaagcgtggttatcgcgtagtaaccgtaataaatcgtacgaaaccatataaaattttaaaatattttttaaatttatttaaatttaaggagattactgaggtttttcttttatcgtaccccgcggtaaccgcgatcacagtttaggaaaccctttgcaaaaaaaaaaaaaaaaaaaaaaaaaactcactgccacttgcttcaagtgctccgctgcgttctacatcagctcacgcagatcagctttcaatatcatcatcacatacacttattaaccaaataatgtactacggagtactcactaccgagcacattaaccaaaaagtctccgtttgacattgcagtagccttacaaaatcaactgtgtgtgccgctatcattcggaagcatttctcggagcattaaaggctagattttatatctcctaaccaattgggactactccaatattccagtcaccctagggccatgtttagttcacctctaactaccctcaacttccaactttccatcacatcaaaactttcctacacaaataaacttctaattttttttccaaactaccaacttttctctaaacttctaactttttgcagaaactaaacacagcctagatgaaagagaaaacagccgaaatcgaatgacctgttcactttgatgctattttcgaccatagcattttttggtaaaattatctaaaaaatatctacgtttagtttgttgccaaatttagtaaatatataataaatcatgtcaaaattttagcaatattatcatcttgtaaaaagtttagcaatactaaaattgataaagtttattttggctacaatataaaaatgccctaaatcaacgagctaaagatcgcccggcacgtgatcccgccgcgagccgatcgagtcatcgagctcccaaccagaccgtgcagggcgcaactggccgtcccggcctcccaactccaaagtcaattcgcctacactcgccgcggcgatttccttgatcaacgactagtggtcatcactgccgtcaattcgctcgccatccatccccatcatgtgggcacgccgccgcccgccgcggacggcaaacacaacagcatcattaacaacttagcattaactaccacgttacgtcaagcccggagacctccgcgttattactacgagtatttatgtgctatatactcctcctctctcaatcccctcggtcgcatgcaatacggagcagatgggggttaaaaaacgccattggcccaagtggtttcgctgcaacggttttgacttttatatgacagcggcggcgaaaacacgcgatggatggatgcgaccgagcccaaatgtgggagtggtagtcgtgaactacaagtggtgggcactagcttttattgacgagcaataatactttccataggttacaacaactgggagaaattcagtgtcgggggaaaactgaaaattcccagtgaaaaatacgggatcgatccgatgccggctgatggaatggatcgatatgtgatcatccgagaccatcgggcatgcacgcctcgatccgaggaaaaaaaaatggcgccaaaagattacaagaaacgaaaggaatctgctactgctgctactagtatagtgtactgtgacgtagtaatgtactagtatgtgctactactggtaatagtaatggacatggtgtggttttgttcttggcgattatctctcggccttccggtcggcgatggacggggtgaggcggagcgcccacttgatggcgagcgggcagctgacgctcctgacggggacggcggcgcggcggagggcggcgttgtcgccgccgccggtggcggagtcgacgaacgacctgaggcgctgcatggcgacgtcgagggtcttggccgacatgttggcgaagcagacgcggaaccagccgggctcgcggcagtggcacgacgacccgggggagatgttgaggccgacctcgaacaccaccttcttccagagctccatctcgccggcgaacgaccggctccgcatcaggtggctcatgtccacccagcagaagaggccggcgttgctgggcaggcacccaatgccgatctccctgagcccgtccacgagctggtcgtgccgctccttgatccgccgcttgttctccgcgacgtagctccgggtgaagtccctgtcgccgagcagcgccgcgaggaggtactgcgtctgggacgacacgaggccgaagctggacatcttggtcgccgcggacacgacggcggcgttggcggagtagatggcgccgacgcggaaccccgggaggccgaggtccttggacaggctgtacacgacgtgcacgcggtcggacacgtcagcgccgccgccgtcgcgcccggccacgacctcgagcgcgctgacgaagcccgcgggcggctcggcgaacgccgtgccggcgtagatctcgtcgctgatgaggtggatgcccttggcggcgacgaagtcgacgatcgtctcgaggtcggcgcgcggcgacgcggtgccgagcgggttggacgggttggtgatcagcacccccttgacgcgcagccggcgcttctgcgcgcggcggtacgcgtcgtccagcgcggggcgcgtcacccggaacccgttcgcgctcgcgcagtgcacgggtacgatctccgcgccggtgcgccacttgaggtcgcggtcgaacctgcatccacccatccatccaccgttagccatgcgccaccatgcacgttgtcgcgtatggtaaaaaggtgtagcagcagcggcagtgccagtgcgtaccctgggtagtatggggtggggatgaggaaggcgtcgccgtggtcggcgaggcagaacatgagcgcctcgttagccgaggtggcgccggcggtgagcacgatgttgctggggtcgaacaccaccttgtaccctctctgctccgacatgaaccgcgccaatgcctgtgcaatccacgtgcgcatatgctcggggggttagccaactgtaacttttgacgaccgtgtacgcgaaccagagtacagttgatttaattaattacatttttgaaagccgggaggccgtggtagtcctggaacagcgcgagctcgcggaagacggaggcgccgccgccctctcgccggaggccgagcgcgtgggggttcttctccagccactcctcaagcaggtcgaacgacagctgcaacagccaaggcagagcaaccatgtcgtcagagacagtgtacacacatgtacaagtgtgtacatgcaggtgtggcacgcgcgtgtgcgtacctggttctcggcgaggcccatctggatgatgccggaagggttggagacggggtcgaacgggtttttctcgtactcctgccaccccaggaagtaggacgagtcctggccgtggctgttgcacccggccttcttggacagcagctgcggcttctcctcggcgaccacttggctcaccatctccaactctccttttttctctctctaacagccgatcgaatcaatccgcttgatgagtcggagcaaaaatctgtgagagctagtgtatagctcgaagaacactggagagacctgagctgctgctgctgctgagtaggagtagctagctagctggctgctgctgggtgcctcccaaggttggacgagctgcttatatagaatctggtgaggagagagagagagagagagagagagagagagagagagagcggctagtgctgtgatgtgatgcgagtgacgtttttcttttttttccttctgcttttgctttttgttaatttctcgggggctaatggaagctcgctctaaccgcgtgtagtacgcgactgccagtgtgcttagcgtcagtgaggggagaggttaacgtcgggacagcagcagagtgaggtgttactgcacgccgacagggatgccatgccatgccatcgttctcctcctcgtcgtcgtctacggggatggggttgttaaacgcgaacgaattaagaagcttctccttctgctgctgctgctgctgcttcgaattcgacccgtgagcaggggatcgtgcgttccgtgttgcttgccggctgggcgagcttaactttgctcttgctggggccggcctggccgatgctcggtgtcgtgctcgtgcatgctgctgccgaaagggcttctcgcgccgctccaattttgcggccgagtaatatgttacgctgcttctttttcatccaacagtggaacacgtccatgctatacaatgacatctgtaacaacattgtttgtttccttgggtatttatatgtgctttacagttaatggctgtgcatatggttttcaggaacaaaaataaatggctgtgtgcatcgtccagcacatgggctccacgcttgttcagatgtgccctgtggcgccggccgtgggctctgtagtctgttcctctgttaattgttagtattactgacatcataaaaatgaaatcatttgcatttggagcaacgattctctgttttggatagcaacaggtggtagcagttccaactctggctgatgtacgtacgtaagtatgttctctctcctgttgaggtacaatatgtatttcttccttctctcctttttatccccaggtcgcacaaaagtagatggcgatgatacagtggcaactttgatacaaatctcagaaaagtagatgacgatgataccgtgacaactctgttggatagtactttgcatcaaggctgaattatctgtaaactccacgtatggtggcgcagtattagatcctgaggataagttgtgggcaaagccccttttattcctgatgagagcaggtggatgtagacaagtagcgccgactattcagaaaacggagtccgtatcagaggaggggacgatacgaaaatggcagcctgctaccgagtgctctcttataccttaccagatgcttccttccttagcccgtagcgtttgttcctttgccttttcttttagtttcaaccattctagtttttcagaaatgaaaaagaaaagatccggccaatcagcacaggcctcgtggctgtgttatgatgatgggcaggtccattcaggtgtggactcttgttggttgctcaactcgggctgtgtttttgactatttgcactcgtcttcagaatgtttatcccatcctcatgtgttggatcaccagaatatttttgaaatggacgaagtacttaattaactgacagtttaattggtctgaccaattattagtagacgtgagataaataagtaccaccatgccacttgacacccaaaagaaaatctctattagaaatggagtgcatatcactatccattttctccctggtatgaggcccaaaggtagcaaaaattgggataagagccataggcacattgccaatgaggaacaaaagggttacaggtatgcaactggattatattcaaatcattgcaagatctattcaaatcaaccatgcaaatttacaatgtcacttcatgctttattggcatgagtaggatctaactgtagggatttttctttttcatactaagtttagtttgaagcaagagggcaatagggcatcatagtttgtctgcacatatgacagaagtaaaattagattcccacatacaagtagatacttgctcactcaattattctgcaatcgggcattggctgttttattaggtaagacttttctttagtcgatagtgcataattcaattaatgtcaagttgcatctcagcaatttttttccttatttaatgttgccaaattgtccctcgtagccaatcaaatctatccgtccggttcagtacatccatggcagaggagagaatgaaaattaataatcgcggcaaatttaaaaaagagagaaattagtatagcggtgcaaacagagaaaatacaaatttattttaaccaacaaattaaatgaagtgattaaaaatgaaaaattgcaccaaacaagtattcccacctctttttagtactccttccatttcatattataagttgtttatctttttctagtctagtgtctttaggtttgtttatagaaaaaaaattaacaatatctaccccactaaattagtttcattacgtatagcattcaatatattatggtaatatgtttttttagaaaataatattatattttttataaacttggacaaacttaaaaaatgtttgactagaaaaaaagtcaaaacaatttataatttaaaacagtaagagtaattgacaaggttgattttaatactcaaatttgttcaaaaatattttatgttgttctgttcttgtgttttttatggagaaaaactcgggaatgtatgacttaaggccatgtttagtttttctaaaatggcaaaaattttgctgtgttggagcattttttaccaaaatggatttaaacacggcaatttggcatttatcatttggtagtatagagtagtaaattttactaaaaaagtgtgttgggagccgtgctctctctatctttactattaaaatgacaaaactttaccatacatctaaatacgaactagcaaaacttaaatgccaaatcttttgccaaaaaaatttgccactagaccggataccgttatgtcattccttaaatattttatattattcttattcatctgccttctgcggagattctttttgttttgcatcgtactactttcatagttctgcataactcatgctacttacgaagatgccttttaaaattaaaattttatgtgataaatgtttaaaggatagtattaacaaagaataatttggctcggagaaaatgtaatagtagtatgagatgttatttctatatgaaaaataagactatccatcatttattcttgaagtgtcattatgcaaaaatttttttgaagagcaatacatatttctctggtttgtattcttcacatagtatatctcatatattagaaattgacttgtgggtattgataaaaaaaaccagcaaacttattctcgtaggagcatccgttgggctttatgattgagcagaaattatatagtttttgacaaatcatcatttatatcttatatgcatgttcttctcagggcaatgtactgactccggttctggtctcaattataaaagtgtgacgatgataccaggcaaacaaaaattgcatgtcacgaacttgagtaaaaggtaatgcagtttttcgccaacttcaaatgaagattcatatacaggattcaacaattaagaggtttatttaggtgttggcgatcattaatttgtgtttgcttcagtttatctaggtgtgttttataagacttgttgatgtgccattattattgagtgaatttgtgtaatatttagatataactcgttgagcaaaataccagaattttatttcattatcttaaaaaaacagtcaaagttggtataacttgttcaacgctgtcagttttaaaaacggggataaggtatctcagatcttgtgctctactgctctctcattggagcaaagaggttaaagaaaagcttcgagatcccccaaaaaggatcatgctcatgtcctcgtataactttataatgacatcgtgacagaaaccaaatgctactactacccaaaaaaaaaaaaaagagcatagaggtggggctcaacatgcttcatgcgagtttatggtgtttgtacagtagtgtacagctacctgggcacctagcaaagggcagaaatccgttgacggccacaagttttgcgatggcaaagctcattggtttgaaggtgcactaatgcacaaaatccaggattcgtagctaaaagacagcgattgaccagcagcgagtccactgccagcggggatactatacgaagttgtttgggacatgattgtcttaattgggcggtgctttgtttaagttaatctatcttttgtcgcttcacgtagtatttttaatgcaataaaaggctcccttcacatttcgtctttgatctttaatcatcatcgatgacccaagatcacacctaatggaggcggtggatgctctttggttggaatctgatggagagttggagagtggagacgaccctgttcaatttaatatctccaatgtttgcacatatcatgtacggaatgcataccctaccaaatgctgctatttacacaaaaccccggatactatgatttatgtttaatttgtaaaaacccacatgaactttaacatgtactcccttcttctcaaattaattatcatataagattatgcaccaaaaataaggacaatttaagtcacattaatcaagacaccatgcacattcttccgcaatgcatgcatcaattaaaaccccataccaattacaccctagcatgtgcatattctcccatactgcattaattgtattccgatggaatccgtatccatatagttatatggtgatcaatttgagaaattttgaattatattacatgatgatcaatttgggaaggaggtagtatcacataaccacgagtatttaggtgttaagctcttattaaaccgtaatgttaatcaatccatcttattactgtagcaaaataaaaattaatccacgtagaatactacaacatttatacgacaaacttaaaaaaaagctatatatttcagatataattttggaacttataagtattatatatttaaaaaataatagtggtagtgtggttttataaaattaaaaa

SEQ ID NO: 24805 - DNA, 3798 bp, Oryza sativa
ggggcgtgggcgacgacgtcttctcttgctagttgctactgatccgtgctcgtaatcgtacgtactgcccgtttggtcgggtacatgtacatgtactagtacgtgacatcttgcaatccctaaaagacttttttttttggaagaaccaaaagatagtgaactgcatgagtggaatcctataggatagttaacttgaatctgcaaacatcttaccaccaatcgggagattcagagtttcattatatgcagatgttgttgccctttctgtcacccctacatacttaaatcttttcgcttctgtaagtgggatgcacatttatttgcaacactcaaaagtttctgtaatttgctgatggatataatatcactattataggacatcctttaaaattaataatttgcctgagaacattttcggttcgattggagagaaaaattctttaaaaagacaagaatgcccctatgaccaaaatcttttaacctatagtgctggagtgaagatgaaatatgatgcatattctaatctatttgaaaattttatctctctaacagatcgaaagtgtcctataacatattactatttgtttatgtcttttagccatcacacgtttttacaatattcactagtaaattacataatctttgagtgacctatagcaaaaattgtctttaaaaaaaagagagatatacccaatctcctgcaatgaactaaatgtagaggcacgctttacaaattttcctggaaaggtatcaacattgtcatgcaaatatctagtacattatcaaccactgactataaaggtatcaacattgtcattgcctctgactataaaaagctgaaaaaacgattatcaaccactttttgacaagtttggcttcaaattagctggatggttaggtcgcttcttcacatcgtctagcagaaagacgctagtaaaatcagttcttaatgtcccgcctctctgataccgggtccacttacatctggcagcttttataggttataaactgctctcacaaactaacacaaatcttttctgcacactttgtcctcactcgtgcgcacttgggaagaatttcctgatcggtcgcccatcccaaatctgctccaagctaagcatgcttaaccttagagttctttcgagatcggcttccggaaaagaagttgcaacttgttgatatgagtattctattaatcctattaatccctgggccgggatgtcacagcaagagaataggctggattagaggatcctttctttggagaagtgatgacccacaaaatgtcagtggaggccacttcttgattaattggttccaatggaaagatcccgaaaaaccatgagtttatgaatattccctgtgataaaatagacaaaactttttaatgcctgcaccttgatcaccgcaagagatggagagaaaattaaattatggaatgattactggctgcagaacaaaagaccaaatgaaatagctccatctcttttcaagatctcaaaaagaaaaaaacaggagacaaacaatgtttggctctccacactcacagtcacatccagcattgaggagataaaccaacttgtgactaggaggcctcctacaacaagttaccttggatccaaatattcaagatgacaaatgtggaaagggactaccaatggagaatattcagcaaagagttcttacaaaatgcaattccaagaattgattactcacaataattgcaatgcctttcggaggcaaaagctcaatccaagcacaagttctttagacggctcataatacatcaaagagacactcacgaccgataacttattaggaaggcattggccctgcgcatggatctgtcgcctttgcaacgaagctttttaatcgacggatcacttgctcaaagaatgtgaattcatggtaaatgtatggggggaaatgccaatgagcaatggtttgacacaacacataagcctcaatgagcaatggtttgctctaaccaaactcaagccatagaacatgagaaaggagtggttgggggtccaaattacaacttggtggttcatctagctagagaggaacataataactttcgaggacactagccaaagtgaagagcagattgcttttacaatcatgcatgaattaaacgctcacagtcaagcacatagaaacaactaattctagcacaacttttgtttatggcttctttttacgggacaccagggggagaattgctcacttgaatatattacgtcaaacggtcttacatatggcaaagcttttagctatgcaaacacaggagccctggaagataagagaaaatacacaaggaaaaacaaggaagcgaaacatgacaagaacacaaccaacccggagggcactacatgtaacagttatgtaaaactattaaacttattttccccttctacctataaaacggcaaaattcctacttttcacctcaaaaaaaatatttaacacgaatcagctcacttcttgtgaaaatagtaatttaaccttttccttgatgtgcaacagttttcccgtcacagtacaacttcaattcaaattggagatttttaatttgcggctatacacgcttcactgagttgctttttttcgtagatagtgttatctttttcgtaactactgtacttttcctcgacatgtgagttatttttccatatgtcattgtcacaggagtgataatatcatcaaaatggcaatcttgcgtacttgacaaatcatcaaatttctctaaatcaattcaaaggaggcatgtatgatttgcacctttttctcattgtgacattgcttcccaacactaggccattcacattgtgggtttgtgcgaggctcttcattttggagccacgacaacggctcaaccaaacccgtgctctcaggaggcttctcgtgtccaatagagagcacaattgcctcgtcaatgcaaggccacttgtgcttgatgccatggctcatgagccacattgggcgaggttgtgcccaccctcctacatacatgtggttacaagcggttgggaaaaggtaggagcttgtcgacaccttcaatccatgttgcacggagctcatcgaaggcaaatcccaataacatcgggtggtgtggggagagattgcggcgaccatagaaggggcagccaattaggagtccatagaggggttatagggagtagggatgtaaactaggaggaacataccaagagggtacaaaccaagactataatattgattgtgttgttggatcaacatagagcttgcacagtctgagttggcacctatccatctcatcacagagctcattggtccacactatctcgattttcgctgcttaaggattgctcaacccacgccaccgaggagcatttagcccacattgttgtttccgatcagtcgttgtcaacgctttaattagatcaaccactgagtctgttctcatcacccgatctacgctaccaccaagcccttgtctaatctataccactaccaattcatcatcgtcatctaagagggagaggcagtgacaatgaaggtcgtcaccaaagatgtgagaggtggcaggaatggccgaagaaggggacaagcggtggttaaagggaataagtaagggagtgaacaagtgaggagagtctaagtattatattaatttgtaaaaaaacaaaaaaaaagtgaggactagaatagaaatgtgaggagtcgatatgaaaaattgaagctatcacttaaagtcggcatcatgagagagaaatgttcagatgtgtagcctcatactacggagatattttaacta

SEQ ID NO: 24806 - DNA, 7627 bp, Oryza sativa
caaatgtataagatataaatcacacttgaagtactatgagtgataaaacaactcataacaaaataaattataattacgtaaattttttgaataagtcgaatggtcaaacatttgagaaaaagtcaacggcgtcatctattaaaaaacggaggtagtatatactttatgtatatacgtataattttctatacatatatacagagtttgtagagtttgtatgtatgtatataaagtatacatacgtgtgtgtatgtatgtatgtatatttttttaagtatgtatacatttttttatgtataaaaagtttaaatatataaactttgtatacatacatatacaactttatatatgtacatattaaaaaaatacaaaagaataacgtatacaaattttgtatacatatgtatgtaaaatttgtataatatattcaaaactttgcatacatatgtatacaaagtttgtatatgtatatattaaaaataaaaaatccagaaaaaaactgaaaaacaaaaaaaccgatagaaaaatacaaactaaaaaaccggtcacgcgtcgccacagggaggtccccccctctctctctccgcgcgctacgtgacgcgccacgcgggggacggtgtgcgatcatccgctttttttcgttaatgtcttaaaagtagcaaaaagttaaatacccccgctctttgaggtcatccctttttgaatattttaaaatgcgtttgtacatatatgcttcttttaactcattgctcgccatcgagagatgaagggagctctgtcatcacctacctcaaaagggacctgcgtggttcgagcttcaagcattgatgctgttgcaatctttatcttgtccctcccaaatttcaggagaacaatcgagtatcgacatgtatgcttaacaagacgaagtcaaccccctctatcacacaataaatacatgtacatgtaaacgaatgatactagaacactgatgttacgcggctagttaccaagtcaaggtgtttttattatctcctacactcgaagtttcgtagtacgaacttgcaatcaagtggaactacgcaatcttatccgctattcgcgatgtaaaagaacaaagtcagaagttaacaaagattagtactacaatttctaatgtaccatcccgtgtatgagctcctgaatcttcggaaatgttcaaaatgttaccgatcactgctcgatctgtactcgagtagctgcacgtacgctgggttaatttgacggcgaattcgtgaagaaaccacacaaaacgcgggcgagtgaatctcgataatcagaggaaataaaatgacaggaagaatatggtgagcacactgcgttatcatttcattttgacaaatcttaagatgtcaaccggcgcaaattccacggcgtgatggatatatacagcagcgtggcctccattgacaacggggcatttaaattttgatgtgagaccaccatgacctgtaataaggctagctgtaggagtaatataataatgcttcagacctataataaacataagaataaacaaaaaataaggctgtagttgttttctgatcagaggagatgccatgccgcacggcctctgttgacacaacgtctctgctggtacatgctggtgtaaacaagggtgtgtttagttcacgctaaaattataagtttggttaaaattagaacgatgtaacggaaaagttgaaagtttatgtgtgtaggaaagttttgatgcgatggaaaagttgaaagtttaaagaaaaagttgggaactaaacaagggccaagtagccttgtactggctgtactatctatatctatttatctgtctatgagaaatattcattaagaagtattaaataaggaaaaaacacgcatatttaaaagttctataaatttgtcgataccaaatctgaagtccaacataatttcatttaagagaaaaaaatcaatttcatatgaatagttccctcttactattcactataaatttatcattttgttgctcttaaataaagttgactttgaatttaagattttaagatttgatgaaaatatatttcaagcttatacatatctctagtaaagattttttttctccatctatctatttatctatccttcttccattttaaaatataaaaatttataggatttaaatcatgattcacaatataaggaattttagcactattcatattactacttgtctcatcaaccattttgcatttaattctttttccatgttacccctacccaccctcccatctccatccatttcatatttattaaggagcattaaagtcttctctctttaaacatggtactccctccattccaaattgatctacatctagtttttttttgaggttattcttaaatgatctacatatttgtgttcatttattagagtctattcgttatttgtgcattggagtaaatggacattgatgcatgcatccatgcacacaagtatttataacccacatgcaatatcttgatttgctattggctagaaaatattggggatggtgcatgcattgagtttgttgctagagtaaatatagtatgagagagttattagcttttcttggtcttggtgtagctatgaaatatgtagatcaatttggaatggagggagtatgtgctaaaaacccttatgcacgatcttagagcaggtataatagtaggctattagctagctgtaaacatattttaatgagataaaagataagagagaagagcagcaggctataaatctgtagccagctgcaacacggactccaagacgcaatgtgtgtatgacaggtgggaccatatattaatagtatagtaagcaactattatatgaattggctattagattggctatagataaattagagctaataatgggctatactattaaactttgtcttatgcgcgttcatgaaaaaacagtgcaacagatggattacctcatgcaaaagaaggctactttcatgcatgtttaacaaacagtcacgtggattcaaaagctttaacgcatgcacaatacaaatacactcaactcatcttggaaaaaaaagcaaatagtaaaatagtaaaagacttttggatggagaaagtataaaattgaaaacctgatcatgatcaaattcgatattttttttcaaaaaatactaagacaacgagattactatttaataaaattcaaataaatttacgtgtaaaataatttagataatttcgtattggtactccctccatctacttttgatagtcatatttttaaatctaaaaaaattatttttgataggcatatttcaatccaacaatctatcattttaatgattttcttaaatttaatgcgtgactctctatttctccacacaagattggctacatggtatcgagaaatgtaaatattaatgaatcgtttgtttacgaggaatgactattagcatgtttaaatggatgataaatggaattacttatctttgatctatgtgccaatataaaatatgactatcaaaagtaaatggagggataattagctgaggcaattatacgtgccaccttaccagttgtaataatttgtacgagccaccggtgttggttcttgggcgtcgtcgctcactcgctctcgtccgggacgggtactgaaccttcatctcgcggaatcagtttcgcgaccgagacatggcccccctctcgttgacccatttaaaggcatcgttaacttgcaaaaccgaccgaagacattgtggcccatgaatgcctagttgccaacatggcccctcacaacacagggatgccgagtcaaaacctgcgtcgtcgatcgagtccagttgagaccgggagagagatggattatgcctacctcttgcgttttgaatgttcgttaaatgtatgggaataaaatttgaaaatatactgttcattgatctttctttcagaaatatactggatgttgtttgattagcataaatataccatcgaaatcgcggttagaaaacgcgataccgaggttcgctacgggaaagcgcgatatcgccacggtatcgcattaccaatgcgcgagagcgtgacggtctcgtgcgttgaatgggcgaggagatttgagctggcggtgtcgcttgttggttatgcgatatcgacgcggtatcgcgtttccactgagcgagagcgccacgtcataccgatttgggagcaacagctggagtggtgctatcggtctcgcttattggcagcgcgagaatgggatcgctaccaggtttagacgcgcgagagcgcgggcccgcggtctcacacggccaaatcgcgagagcacaatcggtatcgctctttcagagcgcaatagcggctgtggagtgggtcccactggatttttttagttgggagatcgggcagccgcggtatcgcactgtgggagcgcgatatcgctcggagggggggcgcggtctcgcgcgttggttttgcgagaccgaagctgatgtgacactgacaccctcccgtcaagcatgcactcacgcattatcaatacgcacgcatgcaatcacactagcaaaataatggaacaagtcaatagtaaactgcatccgaaaaagtttttcaattaagcggtgtacgaagattatcatgaaataagctgtacaccccttaattactaattgctcacgcgtgattaatttatttttatacgaagttttctatgtaattaacttaaccttaacaccattaaggcaagtactatagtctcccatatgttacccctaagagtgccacattagattgagtgatgaggtggaggagagaagtgaggagagagaagataagctacctctaaattaagaggcaacatccacacaaatttcaagaaatatgtgagagtattagagaaattggtatttgtgtattagaggtgatacattgtatgagttgcctcttagttcatgagtaaataaaatagataaatttgaaggtggtagtcacatctaccatagcacttgcccttaggcgcgcagtggggctcacctgaccgctctcgcgttcctctagcgcgagaccgcgccatcgcagtcagggggcccaccgctctcgtgttcctgtagcgtgagaccacgtgggtcgcagtcgcaacatttgcgggggcccaccggctcgctctcgcacttttagagtgcgacaccgtgcgctctcgctattcggcaaagcgatatcatagcaccgcctaggccaccgcgtgcgctccgtcctcgctgactgaacgagcgatactgctctcgttctcgcgcctcaatcgtgtaagaccgcggtctcgctcaacgaaaccgcgacggcggtatatttttgcaaatcttcacgcgttcggtattttcttgcaaattctacagaaaatacgtatatttctaaatttttttcaaatgtatggagcattgaagacatgaatgtactcactccgtcccaaaaaaaatcaatctaatattagatgtgatgtgttctagtataatgaatcgtgatagaggatgtctgaattcattgtatcataaaatatttcatctaatacttaattcttttattttggaactgagagtgtacacatttaataccgttaattttcaataataagtaatgtagtcatcgacaccatagtgatttccttaaagttatgttggtcggatttttcatatgctcataaagataaagtgtgtatgtgtgtgttcgtccaaataaagtgtacatttctaaacatgaatacacatatctagtaccgcaatcttctctctgatattcttttttctgggagaagaagtctattgctatctcatgtgcgactggggcatgccatgcatacgcaggtaaacgcatcacaccggccggcagtatcattccctacaagcgatcatggtggcccatgtgggctttggggcgctgcagcatgggtgggtggggtgccatcccatgcgaggttacgcaggaagctaaaggcggtaggcacccactgctgcatccgtagtctgacgcggaccgacggatcaagtcgacggccaccaccacacgccgtagtttgataaactcagatcgcaagcgccgcgccgccgcggtgctttgaatgcgagagaatttgtcgtaccgcgcgcgtaaatgcggcgaccgctcgcacgtcgatcggccagaagccgtcaatgtccagattcataattatacgatgagtctgatagaaaacgataggtaaataaatgataaaaaataatagattaataatagaagacacgagatttaatatggaatatttttcttaagtaagagagaaaaaaccacgggcatcagccagcaaatatcttcattatatcaggtgagattacaacaccgaatgacagcttacgtgtgcgattgaatttgaatcacaaactcaacagagtcttaatccattttagattaaagtaatacgtattttagaatggagagagtacttggacacccaacgtgcagtgctgcatcctccggggctgcgccggggggcgggggggggggggggtggcggctgccctatccatcgccggccggccgggagaggcagcgagggaacacggggggtttcgccgtgttccgcgggggcgtgcagggtggtgtacccggccgcgcgcgcgtatactctggacaggctcaggtgacgggttcccctactccctgcacgtccttgtgtatgctttgtcttgcgcccccgcgccgcgcacgtcgcgatttagggctgttattagtactactacgagcaatcgagctcgatgagaattcgttcttctcctggtgcgtaatgcgtgattttgctgtttctctgtcgccgtcgcgtgattttctcttgcggcgatactatggtagagaaaatgaagtgaaggccccggcccatgggtgctatgggcctatggggccacgacagttcgattcattcctgaggtgtaaagcccagtagccccagcttgtttcgatttagcagttttcagttctagagagacaagttgcacacgtagcacgcacatagacccatcgcggtatttacatactacatttgtcccaaaatatatcaatttttatctatatataaatatagacacatagttctccagatttataaccaaaaatgtttatattttaagacggagggagtatgttgcaattttcggttaatgagatttatttgtttatttttttaatcaaaccctaactttcattactcattagcttgggaaaatatacagtggaaacctgaaaacgattgttagataaaaaatagacgcatgataaaaaaattactacatgagtatatctgcgagtaaaatttttagtcgggataacgtggaagaatctcagacgtccatttttcgatccgacggtagttttcaggtttccactgcatatgttgtttccatcgcatattttccccattagccgagatatcctcaacaatccattagccgaggtgtcctccacaaccaagtatgtaatacatgatggtatagagacgagcactgttcagaatctgccaagcacaaggaccccaactcagcgagtctatggactatcatatttccttctattggcttatactccctcgatcccccgtctctaaaaataaaggattttggtgaga

SEQ ID NO: 24807 - DNA, 7426 bp, Oryza sativa
ccaaaatcccttaattttagagacgaatagagtaactattaactataactataactatagtattacgaatctggacatacctctgtttagattcattgtattagaatatgtcacatccagttctagattcgttttttgggggacggagggagtatgcttcaattcccatatcacgctgctgctgttggagagatcataattagatgataaaatagccacactgaagtatggaataagaaactggatggatagaatgaacagataaaacgacccatatatgttaaaatgggcctccaagatgataatgcatcaccgcagtccatggcccattaaataggcggctgcattgtatttggattcacgtttgagctgcagtgaaacttgggaagttaagtgataaaatagttaagcatgtgtttgtttgaaaagatatttttagatgggaacaaggttagatgagagagccagagaaggaatattccaaaaaaaaaaaggctggatgagttcatccacaaaattagccggatgaagcatctcctttgctagtcttaatcattagtaattagtttgtgatgattaatatattttgttactcattagtttatggttgtttcttgttgtggcctagcctattttcaattacacaatgtctactgtccaccttaaagaccttaaggaggttacttttttgcaacattgtggttgcccttcaacttgttaagattagtgttgatagagaaaattagtccattttattgttaatttgtgtattatagacatattaataataattaatattttgtattataatttaaaatttttattgttttctatccattttcattcatccaaccaaataagaagaaactggatcgtccgatctactcaatcaaacaaaaatttaaaccactatctaaagaaaatgtggacatatcgtgagatatcttgacgataaacaaaagcaccctaacattccagtgagagtcaaatgaagtgataaaatagttacgttgtgacaaagaatgtggaagcaaatgctatagcttgcctaagtagctaataggtccttcatcgagaatttatatttcactattatttacaaaaggacggttaattttaagtggggacagatatattattggagtttgcaaaaacataaggaatggctaaaagcaagtactataaacctttaatcacttacctcaaaattccacataagcccatatgataaaatggagaaaagaagaaatgagaggcggtagaagacaccccttatgtaacgggcagtttccacatatgtaacgggcagtttccacatagacttcaagtaagaaaaaaaatgatttgacaaacaaaattattagaattagtgtactagagttagtgtgcatgtgatatattgagtacatactacctcttagtttgtatgaataaaattagaagtagcaactatctcttctataaaacttgatctaaggatttaattaagcactagtcccaatatcatatgatgagtaggaggatagaagagaggggaaaaagacacccctcataaaaaatgtaatatctatacaaacattaagacaaaaggagggagaggaaccgcagtacattggaaaaataaatattagaactagtgtattagacttatggatataatatattaaatatgctatgtctaaatttataagtatgcgatatggaaaaaaaatataggtaataacaaccatcttactaatccctttgttccataatataaaggattttggaagaattagacacatattgtccatattcgtagtactagaatatgtcacatctctccaaaatctcttatattttgggacggatggaattctatataaaacttgctttaaggcaccgtttgaatgtgaggttgggttgagttgtggcacggaaaacgtaatggaccattagcacgtgataattaaaattaaccagtccctccatcacacaaagccttcattttttgccttcttcatttatccgataatttgagccaatcaatgtatttgagtttgagaaatttgagaacggatgcaatggagttttcttaaaagaaggggtcaaatgtgttgaggtttaataaagtaggagttaaatacatcggagtttgaaaaagtgaagaacattttagccttttgactttatattaatatgcgtgagataggaaaaataaaatattttagacagagatagtgttataagtatgaagaatatatttatttgttttttttaaacaaataaacttctgtctactaccttcttcaataaaaatcatttttatatttttcccgttccaaaatataagcatttatagctatgaatctgaacatctgcccgtctagattcatatataaaagttgttatattttcatatagaggtagtacatgaatatggataggtactcttgtatgaatctagataaatggttgtccagattcatttataaatgttaacattttgctaacatagttgaaaatatttgcatgaaacacaacatttaacagcttgagaaacatgctcatgaaaaattaaaaaagaagcataagttgataaaatgatgacataaaaatagagcctctttggatggagggagtaaaagtgtaagacaattaacatgacgattttggtgggattatatgtttctggcacacgagtaagagtatcgtttaacagtttgagaaacatgctcatgaaaacaaataaaaaaaagtagagtaagctgataagaacgatgactagaaataaagtctttttagatgaatagagtaagacaattgacatgacggctgttgtggggctacgcttctagatacgactgatagagttgtgtgcatgtctagattcatgtataaaagtaaattatttttatacgaagatgatataaagtatttgcatgaaacatgccatttaacagtttaataagcgtactcacgtaaaataaaacaaagtagcataagttgataagaatgatgataaaaaataatgttttttggcggtagggagtaagacaattgacatgatgttttctgtgagactagatgcttctggagacgtctcatagagccgtatagctattcagatttatatatataagtgaattattttttaacgaagacaatagaaagtatttataagaaagactatttaacggtttgagaaacctgcttacaaaaataaaaaaatagcttaaactgataagaaagatgacaaaaaaataaagtacttctgtcgtatgaagtaagacaattaacatgatgattttgatggtgctagatgtttctagacatgaccgaaagagttgtatacattcatgtctaaaagtgaactatttttcttttacaaaaaaataatagaaagtatttgcacaaaccgttgaaccatttaagaagcgtgctcgctcacgaaaaataaaataaaaagtagcgtaagctgataagaacaacgataggaaaataaagggtttttagacagagagtaagacaattgacatgatggtttcagtcctactagatgcttctggacatgacggatagagctgaatacctgtccaaattcatatataataatttaaaatttttgctcaaaacataacatttaaccagttgaaaagcgtgttaaaacataacatttaacctgttaaaaagtgtgttcacgagaaataaaaaaaagtagcgtaacctgataagaacgatgacgtaatttttttttcgaccgatacagttggtatagtaatggtttgggtccgactagatgcttctagacacgacgccgtatcctctaggaggattgccgtcctcgaaaacccgtgctgagggtgtagcgcgcgtaggcctcgagcccatctcactatcaaaacgatctatcggatttcccaagtagaaacacacgtctcctgaaccaaccaggtgcacgatgcacctccccgcggtgccacacaccctctacgcctggatggtcaccaccaacaacgggggccccatctgccatgtctgcagtagaagcgaaaccccacgagaattcgaaaccatttcaaacctcccccgccagcgcaacgccgaaaacgcgaaaataagacagttcccacgtaaaaacttttcacgctatcatattaaatattaaatatgtaatattaaatatagaaaaaaagcaattacatagattttgtgtaaattacaagacaaatcttttaagcctaattacgccacgatttaacaatacagtgctacagtaaacatttgctaatagattaattagacttgataaattcgtctcacagtttacagacggaatatgtaatttattttgttattagactacgtttaatattttaaacatgtgttcgtatattcaatgtgacacgcaagatcaatatttttttttttgccaactaaacagggcctaaaccccgtttcccgctgatttcgcctcgttttgcccccaaactcgattcgaaaccatttcaaacctccccgcggcgcaacgcctaaaacgcgaaaaataaaccccgtttcccgctgatttcgcctcgttttgccccccaaactcgcgtccaccacccgccccgcccaaaaatcgcccaaaacgaaccgacgctacgcgagccaagccacccctcgcgcggcaggtcgcgaaaagttggggcaaatacacggaaagaaaccctccatagtacgcgcgcgaggggaagccgaaaaggcaaaccaaatcaccaacaaaaatagtaggccgcccccgtttctccctcgcgccgcctcgccgcggccgaaatctcaaacgcacccccccccccccgcccccccaaaattttcgctgccgcgccttctcgcctcccttaagaacgcgcctccccgagttctcctttgtctctccccgcgccattgccaatctccgacgcgttgtggaggtagttgttgtcggtggtccggctatgccgtcggccgtggtcgtccgccgcgcgcgcgtgcgcgcccggtcgcagtcgccgccgggggagttcgattcggcgcggcgcacgcggccgcggatggagggggaggaggagatgcgcggtcgcggcgggaaggcatcggcgcgggcccggtctcagtcgccgccaggtgggtccggttccgcggcgcgggtggaggtggaggggatgggggcgtcggcagtgcccgacgacatgctgctcgaggtgttcaagaggctgtcgccgctggcggacatcgtccgcgccgcggcggtgtgccgccgttggcggctgctcgtctccggcgccggcgggctccccgcgccgcctccgtacttcgggttcttccgcaactacgcgccgtccgcgcttccccctttcgtccctgcagccggcgtcggcctcggcctcgaccacggggcgctctcggtgtcgcccgcgtgcggcgccctcctcgtcgactgccgtggccggcgcctcctgctccgcgagctcggcgccgggtcggcgagagagctcaagctcctcgtctgcgacccgctgaggaagacgtccgtgtccctcccctcccgcttcgtcgccggacacaaggtcgcctgctgcgcgctcctacctggcgccggcgcggcgttccgcgtcgccgtcgtcctcttcggcgctgctgcccacttcgacattctagtgtactcttccgccgcctccgcatgggaggcggccaccggagcgctcaagaagtccatgaacccacaccaaggcccgacggtcgtcatcggcgacgtggtctacaagctccagagcgaagaagacaaatacgtaatggcagtcgacgcgaccaagatgacgctctcggcggtgccattgccgaacaccgggatgctcctgtacgccgggaaccactggatcggcaagacacacgacggccgtctctgcttcttcgcgctgcgggagcagctcgttcttgcgaagtgggttctcgagtcgccggggaaatgggtggagcagccggcggtggacctgcgcgcgctgatgaacccggccaccgtcggtgacctctcccgaatcaagctctcggcgaaaatctcggaccagctgcgcggctgcaagctcgtgagcttcggtggattctgcgagggcaccggcgcgctgttcttcgtcatggccgactgggtcgtatccctcgacctcgcgacgtggaggtttgagaggatgtggcgcaacaccgatgagtcgaggccgctcggcgacatcttccccgtcgagatgatggtttggccaccggtgcgccgcggcgatcttggcgagaaggaatgaggtgcaaggtgttcgacaaatggcaggctacttgaattgaaggtgtttttttgctgtaggcctgtagcgatgaaaagaataacaaattaagaatgcagtttgcgaatttgtcgtcaatttccattgttactcaaaaatgtgattaacaatgtgatacaattcactgaatcatactggaatggtgaaactttttcttttttttttttgcgggggaatggtgaaacttttgggtggttttatctttgtgatatctctttcatgaacatatacttagtaagagcattcccttgcatgttgccgttactcataacgaatcgcttcgaatgtcactttgacctttgaaaggattggttcattatgttgagtaaatcttgtgaatgctaggagtaaagccgaccgtttctgccatttttttttcatttaccaggacgcattatttgactgcattcatcactgatagccataatgtaaaactcgaatattaaaaaaagaatgacgaaaattgcccccttttttcattcaaaagaacattgtctttgttgctaaaagttacttccctgttatagaataactttatttgttatccatttcataatactaatattgacggagcgtggggctcctcaccgggagaccgcgcaggcccccctttgccagttcggccgggggccctgtgtgaggttctaagctcttggtctgtggaaagttcgcgagaatggaaacacacaagacacgggcgatgtatacaggttcgggccgctgagaagcgtaataccctactcctgtgttttggtggatctgtgtatgaagaagctacaaagtccgagccagcccccctctcgttctaggatcgttctcctcttttttccccctttttctaagtgggcaaggtcctccttttatatctcaaggggataccacatgcaccatctctccctctctttcttacttgacttctcttcattaatggacggagatttgtatggctgccgtccgaatgaccttctgatgggacggcccatacctacctccacttccgccggaagcagacgcgacgtgggaacatggctgtctgctgacatgaccattgtcagaccgatcacaaatcggtcattcttgtccaccacgtgtcagtttaa

SEQ ID NO: 24808 - DNA, 16195 bp, Oryza sativa
ccgcctgtcgccacctaacccacgatctgaccggtctgtgaccggtcacagcacgaataaacgagcgcgctgcactgcgttacatgcggcgtgacgcgctcgtccaaaccgtaataaatgtggttaggtgagccccgctatgctcacctaccccatatacgcggcgcaaaacccacaaggggtcggggcgcctcggccctcggggccgaggcggtagcggtccgacccctcggggagacaaagagaagggcggccgtatcaccctcgggcccgacccccccgagggggttaggccacgtgggcgatcgtgtctgcctcaagtctctaagtcatgatactcctggtcccatgtcaccgacagtagcccccggcgttatgccagggcgatcgccctcctcgagggaagcggtcgggcgtgacgccacttcctaaggcctggtgacaggtggggccggtctaaaaatcgggacaagccggttcgtttttcctggagatatgatgatggcgcttcggtcggcgagcgtaattaacgcgcgcacgagatgttccatctagactgccacagccgcatatccacctcatgcaccgcaaacgggcgaatgggattagtggaagcgtgggcgcgagaaacgagggggcaagatagtgggcgcgagaaacgaggagccgggcacagcgttggcaagggtataaagtcgccgaggaagagatttgcttccttcctctcactattattccccttgtcttcgccgcttgcgccctaactccttgtttcctgtgccctaccttcgccacacgcgctcgctctcaaacatctcttcttccggcgtcatggcacggggctccgctccgcttgatggtagcgtgctgccgccttcccgcatcgtgagcgagagacaggccgagctgccgcgccgcttcatgccggaatctgccaccggccgggagatagtctcgctgggcgagggatgcccggcgccacgctacccggggcggtccgtcttcttcctcccttttgctatggcagggctggttccgccattttcttctttcttcatggatgttctggagttttacgatctccagatggcgcacctcacccccaacgcggtaatgacattggccatcttcgcgcacctgtgcgagatgttcatcggggtgcgcccatcccttcggctgtttcggtggttcttcactgtacagccggtgtcgccgccgtcggtggttggtggttgctacttccagccgcgggggccggtgctgaaccactacattccctgcgtcctccgcaagaagtgggatgactggaagagcgactggttctatacccccctcgccgacgaagcgcgcctccgacttccgagccagcctccagcgcaggcctccaactggcgggcgccggtagatctgggagatggctacgacgccgtcctcgaccgcctggcgggcctgcgatcccaggggctcacaggggccatggtgttcggcgactatcttcgtcgccggatcgcgccactccagcggcgcgcccggggcgcctgggagtacaccgggtccgaggactgtatgaggacccaccagggggtcagatgggactgggctcctgaggacttcaagatagtggtccaacgggtgctgaatctcagctccgtggaggcatccctcatttctcaaggagtcctccccctctgcagcgatccagaccgtgcctccatcctgaccatcatgcaggcggtcagggcgtcggaggagcgggctcctcgaggccacgatggcgcgggcgggagccgcaggggggaacgatctaccccgggagggggtcgtgcttctgggccccgcgacgggggcccggggagcggccgccctgccgacgcccgggggaagaggaagcaggaaggaacccctcccccatctcctccccgagggggcggggcggcgcgtgccagcagcaggcgcccggagggggccacgccgacgtcgcagcccgaggggagcggaagaagaaacggccccgcaagatgggggggacagaaccatcccggggaaaccttatttcccctccaaggtggtcgtttaaccgaccccctcgcaggttcgtcccacgcccatcgtggccgtattcattccctcaacgcgagttttcactcatccatcttgtttgtcttctggtctttcttctgtttcagcgagatcccgtcgcgtccctcccgccattccaagtccggccagtctgaggccgaggacccggcgaccacaaaggctcggaggcgggaatctgaccggcgagaagccgcggatcgcctacggtaagccgaggaggccgcccaggtggccgtccgagctcgccaagctgaagaagccgctcgggaggaggccagacttcgccaggccgaggcgacgacatcctccgaggcgacccgtgaaactgaccggcaagaggccgcggatcgccttcgagaagccgaggaagctgctcaggtggccgtccgagctcgccaagctgaagaagccgctcgggaggaggccagacttcgccaggccgaggcgacgacatcctccgaggcgacccgtgaaactgaccggcaagaggccgcggattgccttcgagaagccgaggaagctgctcaggtggccgtccgagctcgccaagctgaagaagccgctcgggaggaggccagacttcgccaggccgaggcgacgacgacttccgaagcagctcgcgacgaggccgcgggcgcatcgcttgggcccactcactcgtgcgacgctcaggacaaaccaggtccgggggacatccccgagtccggcacgtccatcggcgggccaagccgcgcggcatcctcttcgaggcggctcttccccacgccttccgttgctccactgagcgcagaacctcttctgcaggccttggccgtcgctaacaccacggtgttggacgggttaagtgcccagatggaggccttgcaagcagagcgggtggagctcgacgccgcatgggcacgtgtcaaagaggggcgtcgctcggtggaggccatggtggaggtgggccgcaaggcacaccgccggcacgtctcagagctcgaagcccgtcggaaggtgctgggggagatcgccaaggaggtggaggaggagcggggggctgccctcatcgccaccactgtgatgaacgaggcgcaggacaccctccgccttcaatacgggagctgggaggcggagctagggaaaaagctcgacgccgcccggggggtccttgatgctgccactgcccgagaacggcgggcggcggagaccgaggcggcgtctcggcggcgcgaagaggccctcgaggctcgtgccatggcgctggaagagcgcgccggcgtcgtggagagggacctggtggaccgcgaggccgccgttgccatccgggaggcaacgctggcggcgcacgaggccgcctgcgccgaagaggagtccgcgctccgcctccgcgaggacgcgctcaccgagcgggagcgagctctcgaggaggccgaggccgcggcgcaacgtctggcggacagcctgtccctccgtgaggcagtgcgggaggagcaggcgcgccgtaatctggaaggtgcccgcgccgagagggccgcgctgaaccagcgggccgctgagctcgaggcgcgggagaaggagctggacgcgagggcgcgcagcggcggggcggccgcgggcgaaagcgacttaaccgcccgcctcgcagctgccgaacacaccatcgccgatctgcagggcgcgctagactcgtccgccggggaggtcgaggccctccgcttggcaggcgaggtagggcccggcatgcttcgggacgccgtctcccgtctagtccgcgccgggcggcaggcgggtctctggggcgggcggactgtgaagtacgccgccaaccaggggggcctcgcccagcgcttctcggagatggccgggactctccagcggctccccgaggagctcgaggggacgattaagtcatcctcgagggacctcgcccgaggagcggtggagctcgtactggcgagttaccaggccagggaccccgacttctccccatggacggcgctggacgagttccctcccgggaccgaggacggcgcgcgcgcgcaggtccgggatgccgccgaccatatcgtccacagcttcgagggttcggcccctcggctcgcgttcgccctcaactccgacgaggagggcgatgacggcggtgtgggcgacagtggcgacgaggctggcgacccgggtgcatcggagtgagcccccaggcccccgccaatctttaaatagtttcttcttttcttcttccgaggccttcgggcccccttcttgtatagactaatttaatctgcaatcaaataaagaggaaattttttgtgtcaattctatttgttgtgtgtatgacacgaggatgtctgtgccgcggtccttttgtgtcttggcttgaacaagggctcgtgcccaggtcctagtcctcaaatggctcgggtcggggctagtgcctggggagatccacatgtcgagactggccaggccgggagcgtggtgaccgagggttatgggtgacccgattgtgggtttttgccgattcccccccggagttcactacgccccggggcacggctcggttctgggccccgtttggcgattttagccgacccgagcccccgagggcaggattgaacacgagtgacttatttcaagtcaagatccttcaaaaggaaacaacagcacagatacagcctttaggaaattgaaaatgtttttattgaaatacagatacaagagatataagaatatgcatatgtggtagcccccggccaaccctgcacgcccgaggggggtgcggggttggcctgagcccgaaacctgacacccgatccccctttaggggtagaagcgatgaaggtgttcgatgttccacgggttaggcagctctgtgccgtcgcccgtggccagccgaacggagcccggccgggggacgccgatcactcgatacggaccctcccacattggtgagagcttgctcaatccagcacgcgtttggacgcggcgtaggacgaggtcgtcgacgcagagtgatcgggcccggacgtggcgctgatggtagcgccgcaggctctgctggtagcgcgtggctcggagggccgcgcgccgccttcgctcttccaagtagtcgaggtcatctctgcgaagctgatcttgatcagcctcgcagtacatggtggcccgaggggaccttagggtgagctcggatgggagaaccgcttccgcgccgtagacgaggaagaaaggcgtttccccggttgctcggcttggcgtggttcggttcgaccagagcaccgttggcaactcctcgatccacgaatcgccgtgcttctttaggatgttgaaggtcttggttttaaggcctctgaggatttccgcattggcgcgctccacttggccgttgcttctggggtgggcaggtgaggcgaagcagagcttgatgcccatgtcttcgaagtaatcgccgaaaagttcactagtgaattgggtgccgttatccgtaataatacggttaggcactccaaaccgggctgtgatgcccttaatgaatttaagtgcggagtgcttatcgatcttgacgaccggataagcctcgggccacttagtgaacttgtcgatcgcgacatacagatactcaaacccgcccggggcctgcctaaacggtcccaggatatcgagcccccagacagcaaatggccatgaaagtggtatgatctgcagggcctgggccggctgatggatttgcttggcgtggaattgacacgccctgcatcgccggaccaggtcgaccgcatcattgagagctgtcggccaatagaaaccttgtcgaaaggcggagtgggatccgcattcgccttcatggatatcggcaagaaactcgacgccttgttcccgaggaatgcacttcaggaggattccgttagccgcgcgccgatagagggtcccttctaccagcacgtagcgtttggagatgcgctggacgcgttcactcccttcgcggtactcgggtagagtcttatctgtgaggtatgcttggatctcaacgatccaagcaatcaatctaagggagctgggagcgctcccctcgggtcccgaggcctggactccgacaggcctcgggggcctgtcaggcgcgtccgtctcccctgaggggtcgggtcgcgccgaaggctgggcaagcctttcttcaaaggcgcccggtggggtctgggctcgcgaggaagcgagccgtgagagctcgtcggcaaccgtgttatcccgtctgggcacgtgccgaagctctatcccgtcaaaatggcgctccatacgccgtacttggcgcacgtaagcgtccatctgcgggtcagagcaccggtactccttacagacctggttaacgaccagctgggagtcgcctaacaccaggaggcggcggatccccagtccagctgccaccctgagtcccgcaaggagtccttcgtactctgccatattattggtggcccgaaagtcaaggcgaaccaaatatctgaggacgtctccgctcggcgaggtcaacgtgacccccgcaccggcgccctgaagagacagggaaccgtcgaactgcatcacccagtgggcggtgtgaggcagctgcgaggggcccgagctggcctcggggactgagacgggctcgggggctggggtccactctgccacaaaatcggcgagggcctggctcttgatagcgtggcgtagttcaaagtgcaaatcaaactcagaaagttcgattgcccatttcaccacccgtccagtaccctctcgattatgcaagatttggccgagggggtaagacgtaaccaccgtgacccgatgcgcctggaaataatgacgcagtttgctcgaagccatcagaatagcgtaaagcatcttctgggcctgagggtatcgggtcttggcgtcccggagggcctcactaacaaagtagacgggccgctgcacctttcggtggggccgatcctcttcgctaggggccacgtccctggggcgctctttgtccaagcggcctcgcggggtgcactcgtcttctgtgccgacgacctcggggtcggaggacgacaggggcggccttcccacagtggcctcggggccgtcctgggggtcgggggctcctggcgtcgtcggacaagcgggcaaagggccaactccggtcgtcaggggccttaggccaccgttcggctcgggggcctcttctccctgctctctcccgggtcgagtcggcacagggttagcctcggggtcagagggcgataggtgcggccttcccgcagtggccctcgggccatcctgggggtcgggggcacctggcaccgtctgacaagcgggcagagggcctgctccggtcgtcgggggccttgggccaccgttcggctcgggggcctctcctccctgctctctcccgagccaagccagcacagggtgggggtgcgcggaatgaggactgtcctcatcgcgctccacaaccaacgccgcactaaccacttgcggggtcgccgctaagtagagtagcaagggttcatttggctccggggcgaccagaactgggggagagctgagatacgccttcaactgagtgagggcacgttcagcttcctccgtccaagtaaacggcccggagcgtttgaggagcttaaataagggtagcgccttctctcccagcctcgatatgaaccgacttagggcggccatgcaaccggtgacgcattgcacatccctaagcttgctggggggcgcatctgctctatagctcgtatcttctcggggttggcctcgatgcctcgggcagagactaaaaacccgaggagcttgcccgcaggtacaccgaacacgcatttatcggggttcagtcttatgcgggcggagcggagactctcaaaagtttccgctagatccgagagtaaggtctcttggttgcgcgtctttacaaccaagtcatcgacataagcctcaacattacgtcctatttggctacccaaagaaattcgagtagtacgttgaaaagtaggacctgcattctttaacccgaagggcattgtcgtataacaataagttcctatgggggtaatgaatgcagttttttcctcatcctccctagccatgcgaatctgatggtaacccgagtatgcatctagaaaacacaaaaggtcgcaccccgctgtggagtcgacaatctgatctatgcgaggcagggggtaagtgtccttaggacatgccttgttaaggtcggtgtagtcgatgcacatccgaagcttgccgttcgccttgggaacgaccaccgggttcgccagccactccggatggatgacctcgcggatgaatccggcctccagaagtcgcgccacctcctcgcggatgaaggcttgacgttccggggcctgccgccgtactttctgccagaccggccttgcgcccgaccgcacggcgagacggtgctcaatcacctccctggggaccccgggcatatccgccggtctccatgcgaagacgtcagcgtttgcccgcaggaaggagacgagcgcgtcttcctatttgccgtccagaagaccaccgatccgtgtggtcttggacgggccgtcgcccagggcaacctccttgaccgggacctcgtcacatgtgactatccgctgcctcggggcggcgggggcggaggtgccaagcctctcgtcgccaccctcgggcttggacgcggcggcgaggtggtccgcgcgctgctccatacaagcaagcgcgactttgaggtcgccatggacagagatggggccaccggggcccggcatcttcatctggaggtaggcgtagtggactgccgccatgaacttcaccaacgcgggcctccctaggaccgcgttgtagggcagactgaggtccgccacatcaaagttcacccgctccgtgcggaagttggcggatccaccgaaggtgaccgggaggtcgatatgacctagcggccaagtgtgacccggcgtcacaccgataatcggctgggacggccggagcaccatccccggggccttgatggcgtcaaaggctgcgggggaaaggatgttgagggctgctcctccatcaatgaggacacgccccagcttcacgttgcaaacagtgggggaaaccaccattgcgatctgtcctccccgggcaacgcacggtgggtggtcggtctggtcgaaggtgagggcaacctccgaccaccgcgcccggcgcgtcgcctcatgagtaggggccgcggccagaagctctcgcttcatggccttgaggctccggcgagaaacgtgagcacacgctcccccatcgacagtggcaatggtggccccaggctcttggaaacctaggtcatcatcgccgtcatcgatgtcctcggcgggggccttctgtttggcctcacttcgccgattgccggaaggaaccgccggggacttgccctctcggcgctcctgcctcctctcctcctcccacttcctcgtccgcttagccaaacttttgactgcgcggcagtccgcgaggtcgtgaagggaagtgttgtggacgatgcaccacttgccggttgggcgctccctgctgggagcgccggcctccttctttttgtcgcccgcaggcctcccttttcgggtggcccgcgaagcgccctcgacggcgaggacatgaccctcgtcgtcggtatgggctgacctcttcttcctcctcctgtcacgccgccctgtctgagcagcggatccgggggcggccgaagctgccacaccggaaccggaggggttccaggtccatgcctcctccttacgagccactcagtccgcaagctgaaaaagctccgcggtagtctggggctctttggaggcgatcttttcgagcatgcggttgtgccgcacacccccccctgaacgcgtagatcaccgcgtgtgcagggatgcatggtatggtgttatggacttgacagaaccgctgaatgtacgagcgaagtgactcatcatccattcgctgtactgcatgtaagtccgcttcttcacctgggcacggatatgtgccttgaaagttcatggtgaactgttggcacaaatcctcccaagagtggacggacgcgggtggcaagttcattagccaaccccgtgcctgtcccttcagggccatgggaaagaaattcgccatgaccctgtcgtcacccccggcggcctcgatcccggtcgtgtagacctggagaaactcggcggggttgacgctcccgtcatatatttcggcgatgttggcccgaaccttgggggccaacggacgttccgaaggctcgccacaaaggctctacagccgacaccaccaaccgggggcacggagggctgatccccgcgtccgtgttgatgtgacactccggacgaggaggcgccctccgttgcgtgggcagcacgtcggccattacgccggcgctcgatatcgatgtgggcatccggccccccacgcagatcttcctgggtcggaggcgctgacgaaggagtggcggccgaatggcgagcaacagccgccgctcgccgcgccctccgccttgacgatacggagccggtggtagcagcgccagaggtcttggtggcggaggaccgcccaccagcacctaggcgctgccgtgccgtcatgaccaagttggccacgtcgtccagccaacgttgggctggagactccgggtcaaggacaatgggcgggtgacgtaggagtgcgcccgcagcttggagcgcgccctggggcgtgctgccgtcgccgtagacgaggaggcgacgctccccatctcgccgcccttccccatcacccgtggatgtcgaagtcgcggatccttcgaccctctcgagcgcctcctcccgcctaggactttggcgtggagggggcggtggagtacgagctcgacggcgtgggtttggctccccatcgtcgccgctaacgctcggagagaggttgtgcgcctttgcttgttcggccattgggctgaacaggaaaagcttggcgcacacgaaagagtgcgagagcttagaagaacacacgcagaaccccctacttggcgcgccagatgacggagcgtggggctcctcaccgggagaccgcgcaggcccccctttgccagttcggccgggggccctgtgtgaggttctaagctcttggtctgtggaaagttcgcgagaatggaaacacacaagacacgggcgatgtatacaggttcgggccgctgagaagcgtaataccctactcctgtgttttggtggatctgtgtatgaagaagctacaaagtccgagccagcccccctctcgttctaggatcgttctcctcttttttccccctttttctaagtgggcaaggtcctccttttatatctcaaggggataccacatgcaccatctctccctctctttcttacttgacttctcttcattaatggacggagatttgtatggctgccgtccgaatgaccttctgatgggacggcccatacctacctccacttccgccggaagcaggcgcgacgtgggaacatggctgtctgctgacgacatgaccattgtcagaccgatcacaaatcggtcattcttgtccaccacgtgtcagtttaacaatctgcatgttcacccttcttcatacaatatcttgcctgtaatggttaggataaagcctggcatatatctgaccggaaccaacgtgccatctccaggagctaacacgccggttccggctagggacgagtgcttggaggctctcgtcctgacgggatggggcgaggcgtgcgtcagaccgcctatcgccacctaacccacgatctgaccggtctgtgaccggtcacagaccggataaacgagcgcgttgcactgcgttccatgcggcgtgacgcgctcgtccaaaccgcaataaatgtggttaggtgagccccgctatgctcacctaccccatatacgcggcgcaaaacccacaaggggtcggggcgcctcggccctcagggccgaggcggtagcggtccgacccctcggggagacaaagagaagggcggccgtatcaccctcgggcccgacccccccgagggggttaggccacgtgggcgatcgtgtctgcctcaagtctctaagtcatgatactcccggtcccatgtcactgacaaatataaaagaaaaataaattatcccaatatcctatactttatcaaattctaatacaattactcttaattttatctagtcctaataaatttatcccctatttctgaaagttctaatataaatatctcttaaaagttgaagtagtaatatctactattctgtaaaaaaaaaacgaattcctagctacgaatgtaggtaggattggcctttttttttttggcacaaagggagtatttatgtaaattttggatcagaaaccactcttttttacaatagaaggaatcaaaattttcagttaggaaaggtaatgtgatggtaaaggagaagttgctagtataaggcttcgtttgataggagagattgctgtgagattgagtagaaaacacctcgttttctgcgcgcacgcttcccaaactactaaatgatatttattttgcaaaaaaaattatatagaaaagttgctttaaaaacatattaatctatttttgaaatttaaaatagttaatactcaactaatcataagataatagctcaccgcgttttgcgtatcttctcaatctcctcttttcctatcatctcaaacttagccttagtagcatcgcagtccgaacaaccaggtgcactcattacatccagcagggaagtaatgaagttattcacttaggctgtgtttaaattccaaaaaattttagccaaaaacgtcacatcaaatgtttggagacatgcatggagcattaaatgtggatgaaaaaaaactaattgcccagtttgcatgtaaattgcgagacaaatcttttgagcctaattgcgtcatgatatagacaatgtggtgctacagtaaaaaattgctaatgacggattaattagacttaataaattcatctcgcagtttacaggcagaatctgtaatttgttttgttattactctatgtttaatactttaaatatgtgtccgtatacgtcaaaaaaaaatttggccaactaactaaacacagccttattctacaaagtacaacgaaagcttttatgttgggtgtacttgtttgtttaaatgttaccacctctgtcgcaaatcacttctgaagttattaaaaaaataaaaggagagtaaaaattaaattaaagatgatcgttattgattgagaaaagaaagtatgtgaaaaaaataaatgaaagatggttatgattggcacaaaaaacacttcattaattaagtatgatgtggggagatgatggccgacacgtcgacgacttaccagagttccgcgtgtgggccattgatcatctcaatggtcgaccggtattggagcattggtacgatggccacacgtcgaaggtgttcggatggtggcaaccgtcacatatgactggggcacgacagcatgcgagggaaggatgtttttgggcgacatcctggtctgcttccaggttgacagcggcgatgcttttccatttccattttctaccaatctcttatgcagacgatttgtcctcttgcggcgacgcttctgaccgccacaaaatgaccatgttggtgggttcatgtgagggagaatggatccatttctctatcgccctctccctctacaacaaaaggacgtggatggcgttgagtgtagataaaacacgacgcttttgtttgtttccttagaggggttcgctttgttgtaggcgtgtgatatggcttgttgttttatttttcctgattatagtcatgatctcccatagctatgatcttgtaacttttttatcctatatcaatatgaacctcacactatcttgtgtgatttgattgaaaaagtaaaccattgtaaatttgaaaatggatttattcatcttttcaataaacttttatactatatccgtcccaaaatacttgtcgatttgagttgttgtctgtaacgtttgaccattcgtcttattcaaaaaattatgaaattattatttattttgtttgtaacttgctttattatcaaaagtactttaagtataacttatccttttttttatatttgcactaatttattaaataagacaaatggtcaaacgtagcaagcaaaaagtcaaaaggatcactaatttgggatgaaggtggtatataaagttttttttaataaaatcaaatgatgccattaattttggaagcaggaacatacatgtgtttggtagggagtacgtgtttgtccatgggttggtgcatttaagaatgtttaagtcaatgcacaaaatatgtgcttctctattttttttatatacgacgccgttattttttttacacacattcgactatttatcttatttaaaaaattttatgtaaatgcataagatataaatcatacttaaaatatgccccaaaaaaatttttagtgacaacaacttacagcagaataaataataattatgtaaattttttaataaaataaatgttaaatatgtgttaacaatcaaagtcatcatctatttaaaaaactgaggtagaattaggaccagcagagttcaaatgtggtatgtgctgactacgtggagtgaaaatacgtaaggtgaatctttagcatatggttaattgagtattaattattttgaactagaaaagatgatttgtataattttttaacgcaacttttatataatttgttttataaaaccgtttagtagttcgggaagcatgcgcgtggaaaatgaggcaaatcttctctcaatgttcttttttttaatcaatctctcactgttcttcaaaagtacattggggagttatgattgcatattactcaatccaacaagatcatattctatttactaatactccctccattccaaaatactccctccatctacttttgatagtcatattttcaaatctgaaaaatctatttttgataggcatatttcaatccaacaacctatcatcttaatgactttctcagatttaatgcatgattctccattcttccacacaagatttgttgcatggacatcgagaaatgtaaatattaatgaatcgcttgtttacgaggaatgactagtagcatgtttaaatggatgataagtagaatcacttatcattggtctgtgtgtcaagatgaaatatgactatcaaaagtagatggagggagtataaggcacaaccacccttaacccaaagaataagaaataattattatcacttatagtttgaattaccctaataaatagaatgcatacacccaataaaattagagatcttgatggtggaagctttaaataataatatttgagtggaaaatatgtgctagttaatgacatgcatgcatgcacgccttatattatgaaacaactttaaaaagtagttgtgacttatattattgaatggaggaagtatcatgtactgataatatattgaaccaaacaaatcctaaatttgtcaacttaagcctcctctgaaatactccctccgtttaacaatgtaagtcattctggcatttcccatattcatattaatgttaatggatctatatatatatatatatatatatatatatatatatatatatatatatatgacactcatatggggcaccatggtgcccgggcaccatgatatcaaatacacaaaatcactcaaatttttcaaaattttcaaattgtgagtatatacctagttataataactcgattcatacctatacctatcaacaaaacaactcagatttaactttatttcacaatccatgattacatacctaactaattatatgtatggatgctatatacctagaatcaaaatctaacaaaaacaagttcaaattcagttcaaacttgctttgaactagttagtaaagtagctaatgttaatatctaagtaattgaaaaagtttcatactcatttgaattaggtatatactcaatttcaacaatggtgcccgggcaccatggagcaccaaacaaatttactatatatatatatatatatatatatatatatatatatatatatatatatatatatatatatatatatatatat

SEQ ID NO: 24809 - DNA, 4160 bp, Oryza sativa
gtttttgcacaagtatgaataggtcggatgagtgaaggctaccaatcactaccaactctagttctctcattgtctgcttttgggctatcaatggcaaataaaatttaacttttgaagcttaattggagttgattttgaggttttcaacggaagaaaaaattatgcaagagatcacatggatgcaaaagtctggactacagcgtgaaaacaggcttccaacagcaaagttttacctggtggagcagactgattactgaatctctttaaaagcacaatctccttcacgatgcgaataggccaaatacaagcacaagaattagtcatgccgaattaaaggctgtcgagtaatgcattgggttaaacttctatcctgagaattttcaagctaccgatgattgctttgaatatcatacatacacgacagctttattacttccgcatcatccaactaaactctccagcaaactgactgagtataaacacctgtaatgtactaatgtaaggagaaagtcctcttcgggacgtactagtagaacgattttcacgaggatcacttcaattcctgtaggcataaacaaaaattccagcattccaaactgcgccaactttctgcaaaaacttttttctcgaatttgccaaccaagtcatcgggcattgccttgatgggacgactcaggtggcaattttcgggcctgaaatgtcaggcacatggagcgagaagatacaagcagccgatgtgcctcgaaccactccttggctctttgccacatgaatcaaatgctgaaaatattagtatgcgaatttcatatagcagtagaacataaaagaaatatgacaaaatacattgaaaactaaaaaaattaactgtgctgagggaggcaaaactaaatgtcatttaatgtaaaccatcgttagggttgtactatacacagctttagtttcaggaggtaactgtttttactgtggcaaagggctctatagctatatgcagaacatatgtaaactttagcaaggactctgggtcaatgcatgtgactttaatcttcactggtccacgtagtagttcataacagaattaagaaaatcgatatttttttagtacaccacagtttttttcccctcatatctctgcctcatactaatccacaagttaaataaaacctggttatgctatgcctgaaggcttcccccccatagtcaagactcaaaaccacaaaccttatttactggtggattgtagaaggccaaagattatgtagaactaacatctaaacatttcttaatctgtttaacctgaactataaagaagacatcatgcaaagttgcatattcattgcatataaagccagaaatgggtggacatatttagaaaaaaggcaataacatacctactgttctgcggccttttcaccaaccacagaagaagatgggctccattttctatcaaaaggcccatagcttctctccacaatagtttgccgctcggttagtttcttatctattagctccagtaactcttgcaatcctgtccctgtcactgcagaagttttcacatgacaagtggacattggttgtgttgaactgcagctatctgtactaatagtttctggaccacaaagctctccaaaacaatcttttgatgatgatgatactgagttcattgctctcatctcactaggctcaagtgaggatgatatttcaccattgttgccttccaaattttcctctgataaatattcggagtctgttccatcatccaaggactcaaatgatgattcttctgcaggcacatcgttttcagaaaataattcttcctccttatcctcctcaccttcggtcaggaaaatctcatcttcaatatcatcagttacatcattatcattgttgtccacaatatcaatctgaagaaacaccataaaaaagtcaagttacatgaaaacccatgctaccaacaattcaccatgcaagtgtgacagtcacagccaaattaaatttcactactaaccttattccaaacttcgatcatactgttgattttatcctgtgaaacaccaatctgttgcaatacttgcagaacagtagaacgatgttcctcgatattaggagcactagaatctaatacatgctgcaccaatgcaaataaagagacatacaatcaactctatttctcttttttttattaagtaatttatcttaaaacaatttctgaaaagaaaatgtacatggctgaagaactatttgttattaaactagcaatggaaagattttagaagctgtcggagatatgggccgggggtatgcaaagtgaggggaagttaccttcccatccagccacgtggctctacagtctggccctaccccgcacctcgcgagtcgcagaagcggccggggcgcctcggggcgccacgtcatgcccctcgggctctcgcgttgccttgccccgaggccctcccccggctgccatgtggcgggggagcgagaggggaggaaacccaggctgaacagccatcaatgcgcggcgccccaactgtccctcactgcgtttaatgtggtaaggacggacgtgcggtgccgcaccactgacccacgtcaatcgggtctgaccagtctgtgatcggcctgtcgccggtcacgttcgactgaatgggcggccgtgcccccacgtcgcctctgtatccggcggagtggaggtaggtatgtcccgtcccatcgaaaagtcattcggagttccctccgtgagaggaggaccgccacaagtcttcactcatttatgagggaatgacagggctgtcccccgtgtcaggctggggggggacgttgggtcccgctcaaggacggactgctgcttagcttccgggcgaaggtacgggtcgcagtccggtcaaggtagtgggtccccctcccgtagaagagtaggcagaggcggtgcatgcggtatccccttaaactatacaaggatgaccttgcccaccgagaaaagggacgactctcagtaagcctgaactctaggagaagagaagtgggagcgctctccggagtttaggaacccttgtaacactccataatctcacacacaggagtagggtattacgctccatagcggcccgaacctatataatcttagtgcccacacgcgttttagtagcattgagggcggattcacgatctccccacgcgagccttttcccccggccgaactcactaaagggggatctcacgatctcccgctagagaggatcactcctcgacagctggcgcgccaggtagaaggaattcgcgcgcttcaaagggaagtcgtttccttccgccccaagttctcctctaccttcgacgatcatggtcgaggtcttggaggaagaggtggtggtgcacacccccattccctccgggagtgaggatgctagcgggagtcgcggcccccgtcaccgtcgccgcaactggcgaactccgccccgtcgcgaccccccgcggagggaggatcccacccggtcgggtggctcggccctctccccgcctcccggcggggggaggccacggcgcgtcggagcacgtcgccgcctgacatacggcgacggtgactcgccccgaggcgcgcttcaggcggcgggagcccttctacggcatcctccggtgaacgcggagcatcctcaggttggtgacgtcgccaacctggtcaccactgcccagcgacagctgaccgcgggtggccgttccaccgccactggtacgtcacgtacccccaccaccctctcctcatcagcaaggaggagggcccgtcggtcggccacggccttgaggcgatccacggccccaacgtcgtcgggggcctcgggaagtcggaggcatcacgatgacctctacgaggagcaggacgctcgaatcaacatcgagcaacaccgggacgagcgccgcgctgcccgcatgggagaaggcgcctcctcgtctggagtgccgcgttcctcctcgcgaggcggcccgccccccacgttcacccctggagggactgcttgtagggccttcgttgtgagtctccggaatgtccggtgacccccgaagttttgccccaacctcacggagaagtatgatggcagcatcaatccctccgagttcctccagatctataccacgatcatcgtggcggcggggggggggggggggag

SEQ ID NO: 24810 - DNA, 21591 bp, Oryza sativa
cgtttatacgtttcggaacggcgtgcggcacaatcgcatgctagagaagatcgcctccaaggagcccaagaccaccgccgagctcttcaagctggcggacaaggtggctcggaaggaggaggcgtgggcctggaactcccctagcaccggcgcggcagctgcggctgcccccgaatccgttacccgctctaagcggcgagatacgaggggcaaaaggaagccagcccgctccgacgacgagggccacgtccttgcggccgatgggccctcacgggccccgcgcaaggaaaaagccaccggcgataagccgagctccaccgctccctccggagagggtcggtcggcagacaagtggtgctcggtgcacaacacttatcagcacagcctcgccgactgccgctcggtcaagaacttggtcgagcggtttcggaaagccgatgagaagcggcagaatcgacgggagggcaaagcccccgcgacccccgccaatgactggcgaggggaggccaagaagaaggcccccgccgatgacggcgatgatagcgaggatctggaattccagatacctcagggaaccgtcgccactctcgacagggaggcttgcgctcacacctcccgccgcggtttcaaggtcacgaggtgtgagcttctggccgccgtcccaactcacaaggcggcacggaaggcgcgctggtcggaggtgaagctcaccttcgaccagagcgaccatccaacaatgctcgctcggggagggaagttggccctcgtggtctccccaaccatccacaacgtcaagatgaagcgtgtcctggttgacggggaggctagcctgagcatcatctccccggctgcttttgacgcgctcaaagccccggggatgaagctccagccgtcactgccgatcatcggcgtgacctcgggacacgtggcctctgggtcacgtttagctcccggtgaccttcggcgactccaccaacttctgtaccgagcggattgacttcgatgtggcggacctcaatctgccctacaacgtggtcctgggcaggcccgcgttggtgaagttcatggccgccacccactacgcctacctccagatgaagatgccgggccccagcggccccatcaccgtctttggcgatgtcaaggtcgccctcgcctgcgcagagtagcgtgccgacaacctggcggcagccacggagccgcaggtcccgaaggcctccacgtcccgcgcctccaagaagcgcctcgcctcggccgacgaggtgcccgtcaaggagattccccttggcgatgatccatccaagaccgccaagattaacggtaccttggacgccaaataggaaagcgcgctcgtctccttcctgcgggcgaactccgacgtctttgcgtggaagccgtcggatatgcccggggtccctagggaggtgatcgagcaccgcctcgccgtgcggccggatgcgcgacccatccggcagaaagtacggcgccaagccccggagcggcaagccttcatccgagaggaggtgacgtggctcctggaggccggcttcatccgagaagtcatccacccagagtggttggcaaatccagtggtcgtcccgaaggccaacggcaagctccggatgtgcatcgactgcacggacctcaacaaggcatgccctaaggatcccttccctttaccgcgcatagatcagatagtcgactccactgcggggtgcgaccttttgtcgttcttagatgcctactccgggtatcaccagatccgcatggctagggaagatgaggaaaaaactgctttcaatactcctgtagaaacctttattatacaactatgccttttggtctcaagaacgcaggtcctacttttcagcgcatgactcgcattactttgagtaatcaaatagggcgcaataggcgcaatgtagaggcgtatgtcgatgacctggtggtaaagacacgccaccaggacacgttgttgcaggatggctgagactttcgacagtcttaggtccacgcgcatgaaactgaaccccgaaaagtgtgttcagtgtgccggcgggcaaactcggttttctagtctcctcccgaggcataacccccgcacatccttcggcttgtgcaggcttggccgagggctaccactgttaattatgttgtatcttttcccttccccagcaataaatttttccgctcaagcggaggctattgcgcgccctttcttactccttcctatggctcgtcctgcttcaaaggatgattcgcgcttatcccggaccctaagtggcgttgggcgacctgaaaaccgccgaaagggagcctaaacgcgggccgcgccccgggctgcggcgaaccctgggggctcggaagggcctacacacggccatccccgacccccggtcgtcgtagcctcggtctggccagacctgctaggcagctccctcggggcgacggcattgcccctcgccacctaggtgccacgggccgagcgtgagtttcccttttcaccggaacaagcccgaggagggacataaagagggtaagaacggcaacttaatcataagaaagtcaattgaatacgttcgctttggtttcttcttctttctttgccgcagacattcaaaggagaaagcaagaatgtaaaggcgcgaaggagaagctttgtttacaaacagtatggcacgatgacctaaagtttgaagcgttcaccgcgagcacataacaaaataaaagaagaaaagcggggatagtcacggagtgcccgggaccccgagtccggcgccgctgaccacctcgtcccagtcctcgccgccgtcatcgccaccactgtcctcgctcccctcccctcgtctgaagcaagcgcaaggttgaaccgaggggccgacccctcgaagctggagacgatcgcgtcggccgcctcctggacttgctcccgagccctcgcctcggtccccggggggaagtcctcgagcgcgcgccacaggacgaagtcggggtcgcgagcttgatgacttgcgaggaccagttccaccgcagcccgcgccaaagaagccgacaacgacttcacgacctcgccgacctcctcctccagcctctccaaatccgcagccatcccgtccagccggagcgcgagtgccggctgtgtgggcgggagcttcctgtcccgacgcacggagatgcctacccggcgccccgcgcactccagccgttcgacggcgtcggagagttggccaggtccgatctcgttggtgaggcggagggccgcaatctctccagcttggtcctgcaccaggagccgcaggtcggcgagggtgctttgaaccgcggtgagttggctcatcaactccgcgccgccgggctgcccgcctgccgccagctccttctcccaggcctccagctcggaagccctcgccgccatcgccgcgcgctcagcgcgggcaccttctaaatgccgggcctcgcgcccggcaacggcctcctcgcgtttcgcgagttgctcgcccagccgacgcgccgccacctcgcggcgattcacctcggcctcgcgtgcggcaagcgcggtgtcccgttctcggcacgcctcctcccgaagccgcaaccccttcgcgcgatgagccaccgaagcctctgcggcaagggtggtctggttgcgctcggctgcggcctcctggcggaggcgaagggaggactccgcctcggccgccgttctctcgggcggccaaagtggtctcgcgctggtctagcatgcgcgcccgctcctccagcacccgagcatgctcctccagctcccgggctcactgcgcctgttcccgactgcgcccgtcctgttcgcactggttacggtcgaggacctcaatccgtcgatggatcgtggcctcgaactcctgcgcggagcgggcgcactcgtctaaggccttgcgattggcctcgagcgccgccaaccgagcccgcagcgaggcgtcgacctccgacgcccgccgctcttaggcagcagccgcgtcgaggactccgcgggcgtcttcgaccctcttcgccagatcctcggcgtgggcctcgtactgcaagcgaatgtcgcccagcgcctcatccagtacgctcgaagagataagcaccgcctgccgctcctcctccgtctcccgcataaccgagtccagcgtctcttcgcgcgcctagttctccgccagttgggcttggcgcattttgcgccccacctccaccatgtcgtccacggcgcggcgcccctcatcgactcgcgcgcggtccgccgcgagctgcgcccactccacctccagggccgcctgctcgtccgctagggcttgaacttgggcattgagcccctccaggacggtggagtcggcagcggcgagcacctgcaggagtggctccatgctcacgggagtcggagaagaaaaagacggtccgcccccgagatgacggagtgctgctggaccccccgcgagactgggggctgctctcggcccctcttccgcgcggccagccccgaggacgccccaaatgcagaggggaacggttgcccccgtcaccccccgcctcggcccctcgggcagactcggcctcggcctcgagttcgggcccgcccccggcctcagcctccaggccgtgccccgcctcggcccccggagcgtgttccacctcggactccgagccacgacctgctttggcctccgcccccgagtggcgctcctcgtaggtcgcgccctcgggatcgcccccggggggacgccgtcgccgttgctatcacccgcggatggttgcacctcggctgtggcgggctcggaaccagacccggcgtgtggcccgggggccccaccagggtactgcgaaggccccgtgacaccgggttggccgggtcccggtcgatcccaccgctcggattttgacccctacaagggatcggacgccgagaccccctgggaaggaatcccgctacaggagaaccccaatcacgttaaaaaaaaaagaagaggaaggaacaggaggccgagatggatagagagcaccgagtcggatgctggcgatcattcctgcgaggagggcgtttgaaggtccacttccggggctcgatgaagctcccccggcacggctccgtttgccctatcttccggagccgcttcttccgtccagcctcggacgcggcggggcgtttgtggcccgccggtggtcggtccgccgttcgctcggcgccccctccacgcgggggagaaggcagccgagattcgaacgccttccgcttccctttcgggtcgccggccgagtcccccccgggtccatggctcggaccgggcgcccaggagccgacgcccccgccggagccgccggcccggctgccgcctacggtcgcgccgctgctacccgcgccgtcgccgccaccaccggcgccgctccggcgggaccgacccctgccagcaccgactgccgacatcacagccaggatactctcccggtcgcggtcgctgcagagggggaggatcccgtccggaatcagcgtttgcttgatagtgtccaggcccagcactcgccggatcaccgtcttcgcgtcctcctcgccccagtcccagcgctcacccacgtgggtgcgcatgggatcgttgtgcccagtatactcccacgcgccgcgggaccgctcctggagaggcgcgatgcgacggcggtagtcgccgaacaccatcgcccccgttaagccttagcttcgcaggcccctgaggcgatcccgcacggcgtcgtactcctcgcccagttccgaaactgccaaccacgcggcggatcgttcaggagggccgacggggagccgaagtcgcggatgatccggtagcgcggtgtagaaccaatccttcttccaatcctcccacttcttgcagaggtggctctcgatgtactaccccgccattcccggccggggctggaggtagcatcctcccaccgccgcgccttgctgcagctgcgggatgaagaaggactggaacagccgcatcgtcggccgcaccccgacaaacatctcgcacaagtgcgcgaagatgaccagcgtcatcacggcgttgggtgcgagatgcaaggcttgaatctcgtagaaatccaaaacctcatggaagaacctggaaaatggcgggatcaaccccaccatggcgaaggacaggaggtgcacggatcgctctggataccacggccgcggccgtgactcccccaccctcacggcggcgtcctccggcatgatcttgcggacgaggctaagatgcatctctgccgtgatgcgcgacgccgggagcacagcgtcaccagcgtcatgggccatggtgaccggcggggaaacgacgaggagcttggtgtacagaatggcgtggagcgagagaagcgatggggcttgaagaacgagtgagcgggcgagcagtcggcgagaagaaggggacgaactcgcccccttatccttttatccccgcctcgcccgcgctcgtctcctcgtttcacgcccccgcggttgtctcctcgattcatgcgcctcatcgtttctcgcgtccactcatcacgtcgcccactgaatccgcgccccgcgttcagtgaacctgtcagcggcacactcagcgcggggcgtgcgatgttcgtgggcgcggattaggcgggcccgccgtcggtcccgtcgcgtgcctggcaggcgagggagtcgaggcggcgtggctgacgattctgggcgtggtctggtcgaccccccgattttcgcgccttaggcgcccccatcatcagcgcggttaatggcggtcaaatcgccattatggctaatgcgccagcctggccgcgcggcggcaaccgtcaggattccccgtcgggcccacaacctcggcacgggaagacgtgaggcgccacgtcagactgccctcacaaggccgatgtccgacgtggtgccgggggctactgtcggagatatgggcccgggggtatgcaaagtgaggggaagttaccttcccatccagccacatggctctacagcctggccctacccccgcacctcgtgagtcgcaggtcgcagaagcggctggggggcctcggggtgccacgtcatgcccctcgagctctcgcgttgccttgccccgaggccctcccccagctgctatgtggcggggggagcgaggggaggaagcccaggctgaacagccatcaatgcgcggcaccccaactatccctcaccgcgtttaatgcggtaaggacggacgtgcggtgccgcaccactgatccacgtcaatcgggtctgactagtctgtgaccggcctgtcgccggtcacgttcgactgaacgggcggcagtgcccccacgtcgcctctgtatccggcgaagtggaggtaggtatgtcccgtcccatcgaaacgtcattcggagttccctccgtgagaggaggatcgccacaagtcttcacccatttatgagggaatgacagggctgtcccccgtgtcaggcggggggggtgcgttgggtcccgctcaaggacggactgctgcttagcttccgggcgaaggcacaggtcgcagtccggtcaaggtagagtgggtccccctctcgtagaagagtaggtagaggcggtgcatgcggtatccccttgaactatagaaggaggaccttgcccaccgagaaaaggagcgactctcagtaagcctgaactctaggagaagagaagtgggagcgctctccggagtttaggaacccttgtaacactcagccataatctcacacacaggagtagggtatcgcgctccatagcagcccgaacctgtataatcttagtgcccacacgcgttttagtagcattgagggcggattcgcgatctccccacgcgagccttttcccccggccgaactcactaaaggggatctcacgatctcccgctagagaggatcactcctcgacagaagccatcttcaacctatgaatgccaataaaaaatgaattggagataagttaattatacataccactaacatatctgcttcaacaacttcttccaaagtagcatgaaatgcttccactagctgcacaagaaaggttactatattattactgtcaccacagtagttgaaaaaggctttcatgcatcattaaggttcccctggaggcctagaccaaagtggcatgatagtgctgtgattggcagcaacaccacaagggcagggagagatagagtaaggaatttcaggtcactcttgcttagcacttcatgagctaagacctcatgttaaaaagagcattcctaagataattcaatctaagagataagataatagagaaactaggaagtaatgaatatgtgaacttcaaaccacatacttgcaactaacttgcagtgccagctcttttctctcttttactatcaactctgcacagttctaacctagtagcacaatgtaatacaagcctctctgcagcattttcttaaaaaaatgtattaaccaaatctttatagtaaggtgaatgttggggtttagcagaggtcggcataacagatggtttcgctttaaatcgtgccagcagtgctgttggcagagtacaaaactatgcaaaataaactaataacttgtatgcaaaatggtagacgctaaatccacgattgtgtcaaaacaatctgcaaggtcaaaattaaatcaagaaagctacctgcacaggcaagtctgagatgaagccaacagtatcgctaagaagtgcttttctcctgaatagcatttgacaaaaaaaaaagattatatactgaacatgcactaatcacaaatcaaatctactgacatacaatagatgaatgaaaaatctattaaggtaccctgatgggaggatcacactgcgtaagcggggatccactgtagcaaatagcctgcatggaaacagtaaaatgatttggctacacagtgcacatttaaaatagtaagctatacagggaaaagttctcatcatacctgtcatcactgtatagatcagtttcagaaagtgcactcactagagtggattttccctgtaaaagatagcatcaaaggaaggagtttgtagaaagctcagatatatttcgctgtatttctggaagagcatagaaaatggttgtccaatattaagggagagaactgcaatggcagatcaacgtactgcattagtgtagccaacaacagcaacagttacaagctcttgaccaaatgagttgccatgccgttttcgatttgagcgttgtatcgctctagttcgacgtacatcttcaatttgagctaacaatctgacacggcattcctggattctacacgagatgcagtaaaaggaaaaacgatgagaaatttctgataaaaatcaggttcaaacaagattctatcaatcaactgttaggcacctcctccgctgtagttgaagttctgtttcaccagcaccacttatgaagccacgtcccccacttcctctcctaaaagccacaacagtgaattagtcaagatcaggacactagacacaataagaaataagatttcaacaaaaatgtgtttaagatggccacaaattcttagcaactacaacatcagcacagtgatgacaaaaggaaatgtatgtcaacttccttttttatactagcttcaattatttccatgcacatttaaaactgtgtatagtaaatacaaacaaaacaagtaataacaatgaagattgacaagtggatctatgcccattttgaatttgaatacttcatgttatcaaatgcataacaaatttacgtattcaactagcaaatcacacgaggcacataccaaaatgaacatgcaacagccacataataatgtttctctgaaggacctgtgcagctatgttagaactataccagcaagtacatcgtacttgaactaattgataaggaaacaatggcagcaccacttttacattagcatgctaaatctatgccctaatgtatccacaacataaagaaaaaaaaagacataacactctagttcttgcaccaaaaatagttaaaaaccagtgtgaccatagtgatcattttcttatagtgggaatttcatcttctgcagttacaaccgtaccaggaatatgcatgattatccagttgtgcatgataaaaatgagttcataattctaaacgatataaacaaagagcaatgttgatgtcactacataagtgtataagtacaatttaaatgttgaaatcttgcaggttgaaatcaactacaagaacatgcaagtttaccatgtttcaaaatgtggaccagcacaggttaaagttcatccttgacattacaatatcattgtaccaaagatggcatccacattaaattttgctcatcattcatcaaacaatattttaccaccgctgactatgattaagagcagacataccctcgagcacttacaacttcagcttcaccactcgaaccaaaagttaatcgtccacctggaccacggacacggacaagtctagtcttcatgtacatgagagctgctaactctgactgtgccaagcaaaacaatagagcaattaaacaaatatccaaatgtcacagcatatttccatgaatattatgcatcaaagagaaccatatacatgcactcaaaagatctgacaagagtgacattttggtcagatatcaaaatggaatggacctgtaattttgcttcttttgtttcagcgtgagcattaaatatctcaattataagcccaacacgatctaaaaccggcttaccccaggcaacctgcaaaataagatatcatcatgaacaaaaaggacaggaggctcagaaattcagaatgcggcacaataattgaaacttcgacaaaatctaacaaaaaataagcaggagcacttgcctccaagttcctttgttggattccagtgagaattgcattaacaaaaactgcatctactccttcctgttagattcaaaggaataccagataaatggcgcttaaggcatactggaatattttccttcatatatcatacatgtcggaattgaccgtgcaatagaaaagaaagcataagcaagtgcgatcacaacacaaatggaatatataatggatcatccggggtgtaaaactacaaatgaagttacaccgtagtcatgtttatgtacaagaaacaaataaagagtgcacctctgattccgatgtcctcaggtagcacttaacattatccacagttccaggtccaaaaaatttatctgtatgacaagttgtcacataaggttaaatcctataatccaagaaaagccgacgaaagactctcctaggtgaacagaagtatagaactatacaaatgctggcaaaaagttctaacaaataaagttacttgatagcacagctggaagtgtcaaccagtgaagctcaagacttcacctatttgcttattgatcgaactctagaaaattcagtctgggttatgaagttcaaacattgcaaacaaaaaactacgcatatttagcaagaaagtggttagcacctcaggagaaaataattttgacattttgaaaggattaaagactcaaaggtacaaatcaacttcaccactaagaaaatgtactacaaccacatcttcagagcaacatagaaatgccaatgagggtcttccaaagaaacatgacttattttataccatttccagtaaaaataactggcagatctatagaatgtattgcatcactaagcataccctaaccttaacagatgcaattagaaataacctcaagccaatctagccagccttatttcccgttttctcaagacagaagaataggtagagtaatgcgcctatatgagtactcatgagcaaatctcacccaactctgtatgcacagccctctagtatgtgccatccaaaaagctcagtctataagtaaaattcaaacaatcagattaaagccttacaattcgctcttcattcatacaatgctaaaagtgctaacctaataatcttataagtaaaattcaaacaatcagattcaagccttacaattcgcccttcattcataaaatgctaaaagtgctaatctaataatcttataagtaaaattcaaacaatcagattcaagccttacaattcgcccttcattcatacaatgctaaaagtgctcgtctaataatcttatcacaacaaaccccaggtgtgccagaatttaaataaaaatcgctgcatatcgcatgccggcatgcagaaaagacctaaaccttcgaaatacaattacgattaaatacactcccgcttgagttaaccgctggaaatgaacaaaagattgccacataccgacatgggagcggccgcgggatgaggggttctgggcgacgaggtggggcggggcgcccttggcggcgagaccttccttgtagaagccgtcgcgcggctcctcgagggagttggcgaggttgagggcctcggcgagcttggagtcgaggagcgagcccgggcggaggcgcggctgcaccaccagcagccgcggcgggcgctcagggtcgcgggggagcagggagaggccgcgcggggagccctcgtcgtcggagtcggcgggcggcgacgcggtcggggaggagcgcttgccccagcgggtggagagggagcggagcggagcgggcgtcacggagggtaggccgtggtggtggtgggcgtgagggtgggggtggaggtgcgcgcgcaggcgggagacggcggcgcggagcatcgcgaatggcggcgcggcggcggcggccggtggtgtggcgttgggtcccaccggtctagcactcgggcactgatggaggagagcggttggatcgagtccacgagggatcgtgggacgaaccgcgacggtgcgactgcgcgaccgtgcgacacgagtcggtatggcgagagcggcagcaaaaggtggaggatagaattgctatcttgccatctttcaacaagggtttcctcatagttgtgccgtctattgttatatatcgttaaattatcattttaaacattgtctatacgaatactattataaacaaaagttcacttgaacatcacttctcctttcctttaaacacgtcaatgtgtttgtcggcagcaccaccgaatgccatgaccaccatcactctcaccgacgatgcactgcgctccacttcatcagctcaacccacatcacttcctagttgtgccgcctaatcaaagccatctccataatacatctgtcgtcatcctgcgaactccccgcacatgtctctctttggcactccgtgcgtcatggcggccttcacgtcgtgctgatagaaaagccggactgcacagcttggcggtgcacaattaaacgatggggtgccagcggtgggctggctaggtgtagtgtactcgtccatgtcccttttcagcagcacgtgacgatgacggttcaagccagtgtagcaaggccatcggagttgaaagagaaacagagaacgaggacatttcagtctatttatatggcaaatggcactctaacgtgcaatgtctatttgaaattggtaatttagcaaaatcaaaatgcaagacaacattccggtgaaacccatatttgaagatggcacactaacaattttctccatgtagagaggccaacggtagaaatattttaggaatgatcttttatgcagaggtgttcacgtacaacctgggtatcccaatgaaccaaaccgcttgactagctagtttttacgcgctggattgggttaggctataaacccatctaaatcatttgtatatatgtaagcacaattttttttccgtccccaatttcatctcgtctgtccgtaaggaataagcagcaagttagaaaaaagcatcattttttcgttattgttgccgccgccattgtcattctccttgtcgtccttgttgatcgaaacaaagagcatcatgtcaggccaggtgccacaaccaccatcgtcatcgtccttctcattgtgcttgtcgcacgagaaatggagcgctatagtgataatcgatggtaattgtgaatgtattcgacgtttttttttacttgtgagcaatatgatacattagaggagtagaagacggatgcaacaaggaagggctcaccatttgcttcatgttttacctgcttgtcatttgtcagtcacaacgttctccttgtttttttcgatgaatccgaacgagaaagacgacagcttaaactgactaaaacaaatcatataaaatagttattagtggttgggttatagagtgaactcatcgtaaacccaataagattctactttccaaacaaaatatattgtgaagagaaattcttgtgtttgaaagtaccgtttaacttggacggccataaattaatagagctaggaagtttctaaaagctatcaaatggtgaatatggtctatttaaaatcatgttttcttgaagtacagtgatgtcaggatatatatttacttatgatatctaaaaattaatataatcatctaaaaccaggtgggctttcttaagtagaagatctggaagatcttactcaaaatacaatgattacaaaaaagtttttattgctgtccctctactactccctccgctccaaaatataaacatttgtttatcgatatggtttttttatgctactttgactaacagtatctacaaatctacaaaagtaagatgttttaaataaaaagagttatatattatgatggttcgtttaatgatacatgattaatctttttaaattttttgctattagtactccctccgtccgtttcacaatataagactttctagcattgcccaaatttatttagatgttaatgctaaaaagttttatattgtgaaatggatgaagtagttaaaatttagaaagtttgacttgacactattctaaaaatacttatattttgaaacagacaaagtaagatttagttacatctagagcttatctacgaatagtacttgcgtttccatattgtataagtgatgaggtagaattcatacacgcgaccttcgagcacattttgaatagaaactagtttcgcttacggcttcgctatcacgacacatatccgtccgatctctatgctacagtctacagaatagatatcccgacgtcgtcaccgtgccgccgatcgaaccttaccgaagaaacgccacgattttttcaccccgtgccacgccacggccacggccacggtcggccactcggttggcgcctccccgacgcacgacgacccgcggttccctcccgtccccggccgcctcctgcctccacgcgcggctccacctccacctcccctcccctcctcgccgcgccgcgccgcccagcaatccaactccgaatcatcctcctcaccccgcgcggcgccgctccgaccgaccaaccaaccaaccgcagcggacgccacgcgaggggaatcgaagcggagacgtaggggcggggggaattcggccgaggggaagcatgagcttggcctcccacgcgcctagccgtcgagctcgaatcgcgtgagataaggggccgcgagcaccgtggtgggagagggagatggcctcgcgggaggacgaccgcgccggccgcggtggcggcggagggcggacggagcaggagcggcggccgtccaaggcgtgggggatcctcatcttcggcctcatcggcgccaccaccgccaccttcgcggtgagcagagcatcccctcttctctgttagtctgttacttttgtgttgattgatagtcgatgacctggttgattgattcaatacgaatacagtcctgtttcaagtgcccagcttactagctttcttgtttagtttcacgccttccgtgatgacatgactgtttccatttagttgttgctttgatgaaatttgctcctgtatctgcaattcggcgtcaaatgctccaattaggctgtttgcatcgtttcatgcccaaggtagtggcaccttcagtgcttctttttaaagataatgcaagtttttattgaacccggtcaattatatcaaggtgatacaactgcactgagaacattcctagcctctgcaaggatttagtggttcttatgcagctccttgtggcaacgaagcatgtggctctttaaacctgttattagtagtaatgctcttggcttcatatgtctctttgctgaccaaagccccaaggtcctaaatgctatcttaagattgcacgagcactgcagatgggtaaaccttgtgctaggcaggtacttactcccatcctcatgtttgcgaggtgggttgctaaggattgttgctattattggaaatcctttcgcatctccgttcaactgtgatatacggttattgtttttgctggaaacaaacccttgttgtaagctattgttacgacttacaagttgcaaagatcacctgtgcttgacctttctgtttcttcttaccatgtaattttcaggttgctcaagttcgcagaagtgttgattgggtctacagtcaggtatccaagttagcatctatctgtttgttgattggtcaaatgcaaactgttgcttttctttgaactaataatatgtccatgcggacattgattcattggcccatatgattggcaatgggtttggattgtggctgcgttacgcgcgtggagggggtgggggggggggtatgtatggggcacgctcctctcggtgggggtgcggaggggaggagatgggcatctccactttttaagtagtagagaaatgtagacatcccaaactaaatgtcctgttccagctccttatctaatcaggattgttctattcaagcagaatgaattgaagcgaagcccccaaaactttatggtttgagccttgtacagtatagagacatgatctgtgttgtggggtggaacattctttttaggttaaaacaccatatagggttttttttacatctaatagtcggtagttactccctcagtcccaaaatgagagttcgaccattaatacatggaaaaatatataggttagctttaataaatagtattgaatttgtcttgccaaatgctttcataatagtattgaatatgacttacatttttggatgtttgggagtaatagattgtttgctcaaatgtagtacagttcggcaataacaaatttaatgtgtctaccccatagacgagcattattatgatagaccagtagggtaagattcctgtcaatcctctctccctcgtcagttctactccaacaatggatttgcgtaggaacaaactcttttcttgctattgcattcaattattatttgattatttctcagtctccctgctatatgtcggaatccctttggttatattgttatcccaacaaaaatgctgtgtagtcaggaagctagccaataacagatgactgatttatcatcctatgtctccgctgtatgcttatacttgtctgtattttgattctttccatcatttacttatatgttccttttatgtctccctttcaaaagttcaataagatgcagacaacatcttggaggaatgcaagtaacagctctaaccgtggaagtttcagtgaggatgctaggagaagatattaccaacgtatgcaacaggaatatgaggaggaacaagagagagttgtaagttttaaataatgcataatccttttaacttctttatattccaagacattcatttatctttggactttgaatttggaagtcggacattatatgaatgctgcctatacattgtaactgctgctgttaaggtttagaaattatcgtgagctatgttttaattaaagttatacacattcacgaggaacaaatgattcctatttcatcccttaaatgtctcaattcaacatcttctcaggtccttttcccatttcccttcagtatgttcactttttatttgcttttttgcagcaaagaataagacacatgcaaagtgttttcaacagagagaggaacaagtttaggagaagttatgaagcttggagggagaatggccctccaggtggatataattatgtcccacgggacgactggtactggcagacagatacatcacactcggaacataaaaataggcggacatatactcctgcaggacctagggtgtattctatgtcacatcactatacagtccttggtctcaataggtatttgtttaagtctctagctgcatacttctgttcatctgttaatatactcatttcatggtacagatatattttactgccatactcagtattaagtgatctgtggtttatggtactctgaagtttctcaaatcaatctaaattgctaagagcctcagacacatgttgtaatatagtggagctgaaggtttagtattttggattagaaggctctgttaaacatttcatgtagtattgacccatggacttccttgtgtatggtataatctggctaatacactagtcagatggtcattcctttttttgcactgagttcttgtgtttttgtttgaatctggctattacgtcttctaaaaatagaacaagcctgctttgcttcaatactaccattttatgaacccagctctatattacctgaaatccctaaagtggtcctttggtagtaggaagctttcattagcatcttgcagtcatctggcatgcgagaggttctattatgggaccagtttctcattgctattttttgctatataatcaaggtcaaattggcattgctatattgttctgtatattcatgttagtttcatagtttttttaccaattctggttatctggtgaaacatttctgctattgataataaaacaagttgtcaattagttggtatccaaagtagtacactagaagcctttataagaagtgacggaagcacacgtagcacactataatcagtagtgaaatgaggattgttgatccttaaagaaaaggataatcctttgtcaggacagacatcaaggctatctgagctcagtgaactaggatattttgatgtacagacaagtctattatgagtttaaaagataatcttggaaatcttatatgctgtatactggtgctgcgatgtttatcccttttctttacgcattcagtagtacataagaaatttcctattgcatttctaaaagtttttttttgcaatctaactgttgatactcatagttcttgatggaaaggaacaaataaactatgatgtcgatttcatttgattaaacacaatgatgcttttatccccatttttttcccttccctcaactgcctttgtttgagaataaccttcacaatagtaggatgtgctacagatataccaatttgtcctaacaagccatgtcctcctttgtaggtcacggacaacaccatacaccgacgcagaagtcaaggtattgtattcgaatatctgtctgtcatgctattgttcctccagacttgtactgtagtatgttttaacttgtctcagctgacatgatagtggcatttcctctgatggtttaattacctcctttctgatcctggatggaagcctaccgcctgttccagctttctttatgctttcaactacctcttttttacatcccctttgttgtgctaaactcttttgctctttctgattcaagagttttcatgccttttcttactagcaaagaaatggaaacattatgtttgtgattatttatttttgttttaccatatcacttatcaaatatccaagctaactaaaaatccttcagctagctatccagaaatcataccctgttaatttgtatggatgttgaggattttgcattgtgccgtccccaattttcctacgatggaacaactctctaaccgtgtttttcaataattcttacgtgatctttgattccaccaatcaaatatttcatattttatgttctttcctattgtatatgaatgtattaagtggctttttgggaatatctggttataaagggaatggccaaagaccatccggttcatgaaagaaattgaaatttttctcatttcctttttcaagagaagatagccccaaaaatctagtagggatttgttgttctagatctgcagaccgaatttgttgtttggtatatttaccatgtttgctgtgtgtgatatgtagctgagtatctaacgtcaggaatttacttgctgcagaatgcttttagaacaaaagcaatggaggttcaccctgatcaaaatcaagataatagaggtggctaacaactccatgctttttttttcttgattcgtcatatatatgtatcgtgttgttatgtatccacgaataccatgaacatcttatgttgtgcagaggctgcagaagagaggtttaaggaggttgtcaaatcatacgaagcaataaaactggagagaaaaaatgatgcaagttgaatgtgaatatgtagcttcactggagctcattgggaagattgaaaggatcaatgaagacagtatcagcaggccttgcaatcaagtggatgatctgttaggttcggctgtatctgttgatagcctgtaagcacaagtttttatttgcgagtttttttttttgggagcacacggccctgatgtagactaggatattgtcgacaaaggtgcaaaaggaaattgctcatttgtgcttagccactaatttggggtgcaaaatctggactgcgggtgagcatttttgttgtgtacacctgctggtttattttttattagtagaaagtagagtgaagatctgatagaaaataataagtagcccataatattatagcagaaaaacaatgtttattacgacttactcagttactctgttgtgcattagagctgtggttagctcaaaccggtgctgcctatcatctatatgcgttaaatgatgcatggatatgaattcggtttgttacagctgaccctgttgattctgcacagcagatcgcagtatcagactgaaattgtgagtgcaatctagccataaaccaacatgtcactttcgaaatgacaccgtatgatcatactctgatacgtggagagtactccctccgtcctataaaaaatgaatcttcccataaaaaatgaatctgatttatagtaatagaatatattaaatctggtactaagttgttcctataatcatgttgccacgaaaaagaaaaataaaaaatgaaccaaaaagaaaagaaaaatgaaccgggcaagcattctgggcttgcgcagttgcgccacactgccacagtccagcccaccatgcggcgcctcctctccgctccgctgcgccgccgcctatgcacggcggccgtggccgcggcggcgcccgacccggccctcgcctcctccgcggagctcgcgtaccgcctcctccgccgccaccactccgaccccaagaggctcaccgccgcgctctccggctcgggcctcgacccgacctcgccgcgcctcctcgacgccgtcctccgccgctgcggcgccgcctccgcgctcgcgctccacttcttccactggtgctccccgtcgctgccgccgccggggccgctcccttcctccctcgcgctcctcgccaagtccttctcccgcgcctcctccgcgccgtccccttccctcctcgcgccgctccccgcccagctcctctccccgtccctcctctcccccgtcctccgccgcctcccgcccccgcgccttctccccttcgcgctct

SEQ ID NO: 24811 - DNA, 23713 bp, Oryza sativa
  unsure (1)..(23713): unsure at all n locations
gtccctcgccaagaccggccatgtcgccgtctccgagcagctcgtcgaggagctccagcccaggctcccgctctcgctccgccactacaccgcgctgctctacgggtggtgccgcatgggcaagctcgacgaggccaagcacgtgctcgcccgcatgaaggccgcggaggtcgccccggacgtcgtcgtcttcaacaccctcctcgccggcttcgtcgccgacgggcggttcgaggacgcgttcgagctggcccgggagatggagcggcgtggctgcccgccgaacgccgtgtcgtacaccaccctgatgcaggggcttggcgccagggggagggttgatgaggcaatgcgggtgtttgtggaaatgcgcaggaaggggtgtgcaccggattccgtcacctatggcactctggttactgcgttctgcaaggctggtaggatatcacagggatatgagttcttggacgtcatggcaagggagggtctgcgggtggacgccggcgtgtacctcgggttcttcgtcgcgcacgagaagaaggagcagcttgaggagtgcttggagttgatggagaggatgagggagtgcaggtgcccgccagacctcagcatctacaatgtggtgatcaggttggcctgcaaactcggggagacgaagcaggctgtggcattgtggaacgagatggagaccaacgagcttagtcccggggttgacacatttgctatcatggtgactggcctcgttggccaaggcgtgctggttgaggcctgcggttatttcaaggacatggttgggaggggactctttgttgcaccccagtatggggtgctgaaggacctcctcaattcattggtcagagatcagaaacttgagcttgcaaaggatgtttggggatgcattatgaccaaaggctgtgagctcaattttggcgcatggacaatctggattcatgcactgtacgcaaagaaacacgtcaaggaggcctgcatgtattgcttggacatgcttgacgctggtctgatgccgcagcccgacacatttgcaaagctgatgaagggactgaagaagctctacaacaggcagattgctgctgagatcactgagaaggtgaggaagatggcggaggagagacatgttagcttcaagatgtataagaggcgtggggtgagggatcttgaagagaagcctaaggcaaagagaaagaaagggcagaaaaggagtcgcttgaggcaggctggtcagaatcaatccaataggcatgctgacaaaactgacctttttgatgattttgatgatgaataatttcatgcaaggactagtttttgccttctgatagttgctctatatagtttcgacttattactctagatcattctgtgtgaggtttaatattttttttcttggggaatcactggatctagattgtaaagttgctaatccaaacaagtcaataaacatgtcacaaaaaaatatattgttttttttttcatatgcaactagagcgaactgtaaaatcttacacgtgcagagaaataggtagtctgtaatgatctactttatgtctcttaagttgttgcatgcagtatgattgtgatcataagtatatctcattgtaatttcaatttgtgataactggtaggttgatgtatacgtagcagtatttcttttcccaagtttgatgggcattgaatttctctggtttcattatatattgtagtttaaagtatcacgaatagtattactttaagttacatttgtttaagtatttcttaattgaattcctcccttaagaaatacggagtactgcactaaagtaatgttctttgttctagggtggtgaggagccgaagaaacatggtttggttttctattgttcgtttggttaagccaacaaaaaccagatcgggtgttttgactatgtgtacctgcggaaaacgttggctagaagaagaaaatgactgtttgcctgaaaattgggatgaatacatacatttgtcgtgtagtaagaccccccttaaaacgcacgatagaaaaacacaataggttcccggcgaaaaaaaaacacaataggaaaaaaacgtaataattgaagtattatgtttttccaatcctatgaaaattgagaaaaaaatatatataaaaagatgagtaaattacacccgcggtacatgaacttgtgtggtgggtgcaaatagatacaacaacttacaaattgctcactttgatacaataacttggctagttggtgtgaaccgggccaaaatgatcacacaagtaaaattgctctaaattagtgcacactaatgacataacaacatatacatataactgtgatttggagatcttatttcgaatccaaataaaaatgtgcaaaagtttatttttcatgtccatggtacaatatttgtttcattttttggaaaaatttgatcatctatataactcgtctaatgtttatttatctgttcaagaccaagacaatttttatatgtactattaactactaaaagaaaattttaattttcatgttcatgttctgacactttcatcgaaagtgtattttacaatcaggtatttttaattattttgctttttcgttggtctagatcttaaaagtatcatgcgactaataatatgtgtcagtaaaaaattttgatgtgtaacaataattacacactagtacgtatcatattacatcaattttacttgtgtggattagtttggcccatctttgtatgaactagccaagttattgtaccggaataagcaatttacaagttattgtacctaattgcacccaccatacaagtttgtgtatcgtgaacgcaatttactctaaaaagatggactctttgattgcatcacaggaaacattcaacaatcaacgaagaaaagtttcacaagagatctaacctcttatttattttcatatggaattgaccataggaatggaatcctatggaatcaaaggactctagaaaaaaatccttcaaaatttctttgctaatcctccatttcaaagggtccctaaattaccatttggacaagattttttaacaaagtttcactttgaagtctttgcgctattctaaattctatattttatataataaagctaaaagtatttacatattttactttgaaccactctctaatgagcggattacctttgtaagtaacgtgtgggccaaaagattatcaggcccacatggtagtaagaaaggcaatccctaacgactaagagtaagtataatagtgggctataagaaggctgaatgctgaggtggatgggagaaaagaggagagagatgagaagcaggctgtaagtttgtggagattatgggtaccccatacccacacggcatggttatccgactagttataggggataacttatatatatgaaatatgtaacagattatgacttgggtattacgtttccctgtatattatggaacggcctaaagtcctggtttgataagattgtaaagtagatttaggaaaccgataccgtgttggttaaggtttctatcttgtaatcctgcccccatcctatataaggtgggcaggaggccctctagggggcatgagacaacttgatcgtcagatctatactacacccggcggattcaaatccccaaacaggagtagggtattacctctcattgagagggcctgaacctgtctaaatcctttgtctctgcatccatccacttttaggtctcgtgcgctaccccgttttattattgccgaattcatgtttcgacagttggcgcgccaggtaggggctgcgtcgagttttccgtcgagaagtgcgatggaactttgtgccggcatcatcggtgctactcttgtctttggccgtgatcctctcaacaaaagggcagggtcttcgtcgccaaaaattctatctggatctggtcaatcaaccaggagattaatcaccgatcgaatcgatctacaaccagcttgttaccgtcaattttacctccgtcagtgagatcaaatccgtcgctacaatgctgccatatctgttggtccgtcggtttcgtcaccagggcatgatttgaagcaatcagcaagcagccgccgccaaaatcatgcgaagatcaccgttggttgagcctgtacatcaccaagtcaatactactcggatacgtacggcaagacacaaagtccaggatacaaattaaatatacctggtcaaatctgtggtcaaggaaattaatccatacacaaatcagctattacatgcacaaagtggtctccaaactaatccgtgcatgtgctaccgacgattacatgtctacacggctgcatgacacggctgcatgctacggttcatccattgacaggcctcgaatcaaagttggatcacaaaccaggtttatcgttctaaattttcttatataaattagaattaattcacagatcactaattattatttgatctattattttatacatgtaccgccggccgccttcgtcgctgccgattggtttcatcgcctccacggttggtgtgcgccgctgccgttgcnnnnnnnnnnnnnnnnnnnnnnnccggcctgcctccgtcgccgccgactggtgtcctcgcctatacggtcggttggtcacaccaccgttgatgggcatcgtcatctacaccgccggcctacctccgtcgccgccgactggtgtccccgcctatacggtcggttggtcacaccaccgttgatgggcatcgtcatctacaccgccggcctgcctccgtcgccgccgactggtgtccccgcctatacggtcggttggtcacaccaccgttcatgggcgtccacgtcttcaccgaccggctggccttcgccgactggtgtttccgcctgcacggctggcctattatgccgccgctgttgggcgtctacgacttcaccaccggcctgcctccgtcgccgccgactggtgtcctcgcctatacggttggttggtcataccaccgttcatgggcgtccacgtcttcgccgaccggctggccttcgccgccgccgactggtgtttctgcctacacggctagcctattatgccgccgctgttgggcgtctacgacttcaccgccggcctgcctccgtcgccgccgactggtgtccccgcctatacggtcggttggtcacaccaccgttgatgggcatcgtcaacttcaccgccggcctgcctccgtcgccgccgattggtgcctccgcctacacggctggcctattatgccgccgctgttgggcgtctacgacttcaccgccggcctgcctccgtcgccgccgagtggtgcctccgcctacacggctggcctattatgccgccgctgttgggcgtctacgacttcaccgccggcctgcctccgtcgccgccgagtggtgcctccgcctacacggctggcctattatgccgccgctgttgggcgtctacgacttcaccgccggcctgcctccgtcgccgccgagtggtgcctccgcctacacggctggcctattatgccgccgttgttggacgtctacgtcctcaccgccggcctgcctccgtcgccgccgagtggtgcctccgcctacacggctggcctattatgccgccgttgttggacgtcttcgctttcaccgtcgaccgccttcgtcgccgccgactggtgtcttcattgttattgatggacgactttgttcccacattggccacttctgccatcaccaaggggaatattataaagctaagtcatcatttattttattctttatatgatatttttccttttcctctgcctcactacaccaattggtcttccattgagtagtgagtcgggggctacagatgttatatcatatttttcataatatttatcttgattgcttgcgacataatctgagtacaaaagtacctatcgagttatggagttctatcttcctatgctttccgtttggtttgccaatggatggttgcctttgggccgattcctagcacccgggggctcgttggatggaccgagtaacgcaaggtgctaagtattattcggaataaatcaaaagcatagagatgagataaatttattttctgctcttaataattgcaaaagtacccgagtagaaaattctgatccgtgaaactttgttccattaatgacgaactcatgtcactcatatgcatgtttgggaagtgcctaggccgactcccggtgcttgatggttatgactagtcggacagagtgtttaaacgtacagagtcatctgctcggggaaatcaaaattgacaagaggagaaatacatatttataaatattttaaaatacttgattttttctcgagtattatatttatatcagatactactcatcctatatgtttgttctgcaggatccagatccagatatgcataaaagggattcatggctttaagcttatctcttacgctccaggaatggatcagtcagaacgtcaccaccggctcgcctcgaccgccgccgactggtgtttccgcctgcacggctggcctattatgctgccgttgttgggcgtctacgtcttcaccgaccggccgcctcgtccgctgccgactggtgtttccgcctgcacggctggcctttatgccgccgttgttgggtgtatacgtcttcaccgaccggccgcctcgaccgccgccgactggtgtttccgcctgcacggctggcctttatgctgccgttgttgggcgtctacgtcttcaccgaccggccgcctcgtcgctgccgactggtgtttccgcctgcacggctggcctttatgctgccgttgttgggcgtctacgtcttcaccgaccggccgcctcgtccgctgccgactggtgtttccgcctgcacggctggcctttatgccgccgttgttgggcgtctacgtcttcaccgaccggccgcctcgaccgccgccgactggtgtttccgcctgcacggctggccctattatgctgccgttattgggcgtctacgtcttcaccgaccggccgccgcatccgccgctgactggtgtcaccgcctgcacggctggcctgttataacgccaactgatgctatcttcttcacggctggctacatcgctgtcactactaataggcatcagtatcttcaacacaagctgcctacgtttgtcatggctgccgactggtttcttcacttccatggctgcatgattctgccagtgttgattggccttaccatcttcatcgctggtcgtctcgtctgctgctgactagtgccctcgcctctacgtctggtttatacagctaccactactgatggacatcatcatcttccgtcgccgactgattatgccgccgccgactggtgcttttatcttcacaactgcgcgtcttcactaccggtttgcttctgttgccgccgacttgtgttcacttcattacggcaatacaactttgtcatcatggtggagcgacttcatctttattatcttcggcaccggcaaactctattgttgctacttcgcaagttttactacttcaccacccacgacgtctttgtgaacctcgacatctcggcatgcaatgccatgttattttactacaacaagtggctctccaatattcaggatttctacttggacatcttcaacacatatcttcaatcaagtgatgactactcgacaacaagaagctataattctcgactctatgttcagttgtttcccaactaatcaaagagtcgggggctacacaaatacatggctcaaaatttgacaagctttatgtcaagatgaagcaatcaattaatcagccaacaagtcaactctgggagtcatcaattttgtcttcgcttcagagcagtaggtcaagattaaatttacatgtctgggagtttggagtcatcaaccaatcaactcatatcagattcaatgagttgaacaacagcatatactttcctccaagtgaagcatctacaacagtttgatggattattgtcactgacatcatcaccagcacatctgcttcatcagctctgacattccgccgttgctaatggatgactaagactttgccaacttgctattccgccttcacggttgacctactatgcaaacgctgatgagcgtcttcgtcattatcatcggctattacaccgctattgactggatcaccgacatcgtcatcttcatcaacatcctgtcaaacctctttatcatagcttactctactgctattgataggcaacttcgtcatcatgtttgatcatctctgttgatgcttatcatcattactgtcggttacgtttgtcgtcgccgactattttcctcatcttcatgattggtggatttcgtcatcgcctttgatctgcctcgtctgtcaccgactgattatttcgctgccatggctacacaactttatcgctgggcgccttcatcttcattgatggctgacctgactgttgccgactggtttcttcgcctccacggctgtgcaacttcatcacttttgattggtatcactatcttcactaccaccaatatttttgccacctctgttgggcaatattatctctatattggtcgtcttgtctctatgccaactgcgtcagctaccatcaatgaacaattgtgactacgtgctcaggggcttactagctcaaatacaagtattatatcttcaatttggacttgctccggatatatgcaacatgaattcatgatcatgggtctattttatatgctcaaagactggactatttattattccccgtaagggttatcaactgaatacttgcgccagtcgggattcaattgttatatctattttggagtatcccataagggataatcactcagatcacatggtctatatcacccgggagcatgttacatgtgtcatcctttaaagggtatcgaaggcatattttttggcctaggcctaatatgtctgcagcccatattttcaggtgtggcctgtcacgttcttttagggacttaggcactttttgcttaggccaaagtgcgcgtgatcaagtgcccaataccttaaaatccttttataccgcagttactcaactttttaggagttggtacaatgcatcttaaaaggtgtcaaacagtaaagctttatatagctgccccgctggcttttttatatagtcatggtgctgtttgggtttttaagcaattgattggatacaatatcattgctttttgccacgtaagtgtgcatttttattgaccaatattatggcttaggctgattatatattgtggtcatttttcaggcggttggtaaatcctttatgagtttatttactcggattttataccacatatgccatatatttccaggtgtggtggaaccatgtgtcttctagggacttaagcacatctgttaaagcagtgtgcgcatggcgtatgcccaatactttgaaaatttctttattcacaacatacaagcttctttatagctattttgctatgtgaattttcaatgatgtagccaactttaggttacactcatcatattttacaaagcagtcggtatatcacttggatcatattattcagggattcacaccgcatatgctacatattaatattaagtcgcttggttgactacaattatcgaaaccactcggtgcatctagtcgatgcacctgactttatttttcagccctccacagtcttcagatttggtaaaaatactcgggagaccatggcaaagatgattgaagtactcggttttggagtaatctagttcgagagaagattatcttttcgactgtgaaggtctcaggggctactgtggagattatgggtaccccatacccacacggcatggttatccgactagttataggggataacttatatatatgaaatatgtaacagattatgacttgggtattacgtttccctgtatattatggaacggcctaaagtcctggtttgataagattgtaaagtagatttaggaaaccgataccgtgttggttaaggtttctatcttgtaatcctgcccccatcctatataaggtgggcaggaggccctctagggggcatgagacaacttgatcgtcagatctatactacacccggcggattcaaatccccaaacaggagtagggtattacctctcattgagagggcctgaacctgtctaaatcctttgtctctgcatccatccacttttaggtctcgtgcgctaccccgttttattattgccgaattcatgtttcgacaaagtttacagccggcttagacataggaaccaagaaaatctgtaagacagacatgtggatcatatatttatagtgaatagttaaccactatatgagtgagctgatagatagactataactaagcagctggatgtattattatcttgctctaacgagcaccggctgctgggctcctctccccgtcgctcaacggtctattggcccggtctaatagtagggtccgatcttttttggtccaaccgatcgaccgaaccgggtctgctacgataggtggaagtgtgcccatatccactcctcggcaatttcgcattccccccgaaaaatttgaaatccttttcgcatccctctcctctccgcgattccccactcccggctgcagggcggtgcggcgatggccgacgctccgccgccggtgctgacgctgcaggtgaagaagggccgccgcggcggggagacccggcagtggcgggcgggcgccgtgctccgcgtcggccgcgtcgccaccggcaacgacatcgccgtgcgcgacgccggggcgtcgcagcgccacctctccatcgagttcctcccgccgccggcctcgcggtgggccgtctccgacgtgggatcctccaacggcaccctcctcaacggctcccccctcgtgcccaccgtcccctccccgctctccgacggcgatgtcatcaagatcggggagtccagcatgctcgtggtctccatcgcgcccgattcggatcccaaccctggccctaggcgctcctcgcgccaatccgccgcagtggtgggggagcaggagaaaccccctgcggtcacccgccgtggcggacggaagaacgctgcagcggcggcggtggcggttgagccgcccattgcggagaaggaagagccagagccggaggaggctccagtggtgactcgccgcggtgctcggaagaaggccgcgcaaccccccaaagcggaggagcacgaggagggcgaggaggaggtggtcgcggcggtggtgacgcgccgctgtgggcggaagaaggccgcagagccccctaaaccggatgaggaggaggagcaagagaaggggaaggatgaggaacaagaggagaaggaggaggaggaggtcccggtggtgacgcgccgcggcaggtcgaggaaggcggcgccggaggcagccgttgcgccaccgccgccgagggcaaggtcgacgagagctgctgctaggagaggcaaggcagtggacacaagcctggatgagagggagagcgagatggccggaaagggacggggaagggctacaaggtctaatgcaaggaagtgtaggatggccgttcctgaggacgatgacgatgatggggaacagcaagagggggctactgctgtggcagaagagcagataaaggatcaaccgagggcaatggcggtgactgacggtgaggaggaagatgataaggtggaagccatggatggagaagttgaacagaatgacaaggcatcagaggaggaggaggtgccagtggcgcggagaggacgggcacgaagagctccaaaggggaaggctactgcaagtagtaatgctcatgctgcttcggacaacgcggttgaggaggaagacggcggtagaggagagggagcggctgtggaagtggagggggagagttctgggagcagcagcttggaaaccatgacactgagggagtggtttcagaggatgaatgtgtacctccctaggatgatcaatgaggctgctgaagaggcgctttcagccctgcgggagaggcatcggcgtatagatgagtacatttcaacgcttgaggattagcgtgattcatggtatgttcatctctcaagagaaatctttgtccttctgttacttctcttcagcaagttcagttctctttatgaaatttcctactgctgtcagaatgttctattatgttcgaatagctcaatctttcaggtctagcaatgacttttctgcattgcccagtaattgataattcattttaattactagatacagtatatgtataggaactgtacttgaatgcagttggtattggggccgtatctgcataaatttactatgccatgcctaatgccttattgctgactatcaatctggattgcctcaacatttgcttatgttaaagttttctcgcaacaattttgtaggatcatgtttattgagaaagttcttgcataccaaataacttcatcaggtgctcttgtcatatattttatcttcacttcataagtctgatttatgtcctctcccagcaaaaaccagaatgccgagtgcatatctggctaatctccagtgcaaccattacccattattagtctccaacatatgatgggaacaattacgatgtagttgacagttactgtttagatctgaaatgaatgtgtaattgtgaagcaagtgtgatctattcattcttgcatattgaataactgtttactgatcaattctagccattgaggtgtagcaattaacatagacaattactctctccgtttcataatgtaagacattctagcatttcccacattcatattgatgttaatgantntnnatngatntatatntanattnattaacatcaatatgaacgtgggaaatgctagaatgacttacattataaaacggaaggagtagaacatacttatatctgcagtttgttctttgcctgtaatgtttcccttttgcatccataacatatttacatgtaaaagctgcctctgtcaccatatgatgtgcctatttccatactgctagtgctatgacactccacgttcctgatctgctactatgggactgaagtttcatgagtgatctattacacaaccgaacagataattgttcagctgcagttctttgttctgcttgacgttttgccacagccaatgcttgatgccttgaactaaaatgacaatgttgaagaaattttttgcacgactctttcaagatctaaaattgccttttggtgccacaccgtcttattcagcaagctttacaacccagtgacacagaactcgcaaatagtttttcacagtttcagcgtttccgtttgagatgctgaaaaggaagatacatccagtggatcatatttttctgtgtaatccttgctcccatagtctcatgtattgagctgtggcagaagtacggtttattttgctattcatctactaatgcttgtgcttagcttttatccacaatttgcttaacatgccatctgtctgcaggataattaggagctatttggtcaatctgacgtaggggtgatgcctggagataacattaattggaggcaatgctttgctgaagcgccacaaagatttgctgaagcgccacaaagagccattaggtgatatttcactgggatcatctcattatcgattccagttccaccaaatgccgcaaaaatcattgatgcaatacactgtagcactcttcatgtttactctagttatgtagtaccagtactctagtactcatgaagtaggacctgggttcgtaggcctctatgcaaaggcattcaacatgcatcgcagatttcattctgtaaattgcctctctaaggtgatgtttattcatgcctaacctctatctggaatacaacgcgacaatgttttgaatgtatatgtcgtttctaccatggctgctattaggagtcagaactgattattttgcccctcccccgttttttacttttgaataacgtgttcctggatgatcagtatcaactgttgggaatttgttggtgaagatgagttctcatgttttgatactaaatcagaccaccttctagtctcaatgacctctctcatctcacttggaaaatgtacctgatttgttgcagtgatcctcatattgttaaaacccactctttaatgggatccttcgatcctctacatgcaacgctcagtaataatctcaggtgaaaaatgaacgaatgctcaatcttatctttattttcagcgatacgaagcgcacaatgcaatttcacctgcacagcatgaactgttaaatcgaatggcaacacagaagaaaggatcagatgcaattatctaacaaagaacaacacacgcatggcaacatctggtatccatgccattttgtggagaaaaacacacccatcacccccagctcattcagtgccatgtactgatgtacagactcacagcggaagacatttccaaagggtttaacctgctcatcgggagcacgcagtccacattctttttgcagatgcagaagcattgcttaacttcatacaatgaacaatctaagttctaagacctaccatcagtaactcctagctcaactagaacattggcagcaagagtcatcgttttctcttgccatgagtctttgacttgttctcaaggtcatttcctggtggcgccttaagagacttggatgcaactgctgagctccacagcgctctctcaacatcagaagtagtgaaaacttcttctcctgagctcaattcctaccagagaaacaaaaaatatgaaataaatgtcaatcaagcaccgcatgtgttcatcttcagacttcagctaacagtccaaatgttcaacaatctataattttgatatggaatttgcagtttactcggtgttattctagcaatgcggacgttacatgcttgcattttgcaaatataaaagcataacgttcaagtactaatcagcttatcagtatattaccctattgttgcagctgctgtctggaataaaaaggcaagcagctgaaaatttggcatacgatttttgtaatgcatactctgtaaatttatgagcctggcatccttgagcctattggacgttatgatttagagaagcatcagcaaacaagaaaaaggtgttatctttctgcactagttcttgaacagtactataacaaaaaatatgtggtggtatgttctatttcaatttcaaatgtcagctaagatcaattcttctaaaatgactccacacaaccagctaccttttgaagtccctttcagtttatctgcattaaatcaaccacatatttgaagtgtatcaactagaaatctccacacaagggaatacaccgtatttttttcccctttgtctgaactcaagtgatagtcaccgcaaaacaatcctaaagcattaactaggttcagacttgcagctgcctagcaaaccgaaggcttattatacagacacttcgatcagcacaatcaggaaaaacaaatgctatcttaacaacagtttatcacacatcacaaatgcagaagcaataccttcgatttagtttgcaacttttcagcaaaagcaagatactgcttcagagtgtactcctttgcattgcctaaggctgccaccatagcctaaacacagtccatccatgtttacaacatcaaagatgcattcatctcacctggaaatgcagaactgccaaaacaaaattcacaaactcacctcatcagacatgaacggtgcaacatcaggcgcgtaggcagcgagaacagcggatgccgtggcagggccaacgcccttcagcacggtgagctcggtgatggccttgcggaggtcaggcagcgctgcgaacgccttgcacgatgctgattctaccactgcatcctccaagcccttgacgaaatccatcagtctcggcctgcacaaaagaacagagcaacaatatgattattttttcccccaacgagtttgataataacagggtagtgtaggagtatcatcaactaaccaactagggtaatgattgatttgccaagaaaacgagtccctaaatcaatggatcaaatcagtccaagcacccttaagatactagcatcatccaattgatccacacatttcggcacgatttctagggagatttgagcgagaaatactactacaacatcacacgcccctgggaaccagaagttcaagtgctctaaagaggaacaggaaagaaaatctaagagcgggatgagacgacctccacttgccgcgggagagcttccattggaggaggcgcaccagctcgggcttggcgaggaagggctccgggtcgcggcggcgcaggagatcggggaggtcgcggcggtagaaggagtcgacctcgacgaggtcgggcttgcccagggccgcgagccggcggtcgtacgccgccagcgccgctcgccactccgccgcgtcgccgctcgcgaagtccaccgtctcggccatcgtcgttaccggaggcggcggcgcggtggaagaggtcacttcggcgcctcaagagccaggaatttcaaacagactagtatctacccatgtattaatatctctcgataaatacaacttcggcacatatcattggatatctactctattatattatcatcggtcgattggattgattgttcaagttcttctattgtctttatatcattatttatctgagcgttagaatttacctcggacatatagccaattgttcaagaccatatcaaatcggcttattggctgatcggttcttttatcatcaatttatctatcttgtcagttatagtatcaaactgactgacacgtacaaacctgatattttaggacttgcactggagcaaagcacgtatagatgatgtcagcacaagcccatctatagatagatgtttgttcctccttttttttgcaagcgtcctgtgcgttatattcttattagacactctttaggcccattcgtgaatgatcctatgtaaatgtaagcttctctattgcctttatgcgtacaaaaagattattccgtataagccttttctagtcttatttcgataccttagttatcttctagagttaggtataattatgataaataattatttctaaagtgtgaatgatattgtccattcaaatatactccctccgtaaaaaaaaaaagacaaactctaggtttccgtgtccaacatttgaccgtccgtcttatttgaaaaaaatatgaaaaaaattaaaaagacaagtcacgcataaagtattaatcatgttttatcatctaacaacaatgaaaatactaattataaaaaaattcatataagacagacagtcaaacgttggacacggaaacccagggtttgtcattttttgggacagagggagtttgatccaaatgactacaattattctaaaccacaacaaaaataatgatgttggcataatatatatttaatgtggatgttttttattttaccaattttcgtttttcgtgtgctggaacacatcaatttctcccagtggcaacgcacgaacacctacctagtgtaaaaaagaagagagaatctactatatgctactgagtttgtctcagttcaacgatttgctactgataatgtctctttgtgcaatataccgatgggacactgaggagagtacaaagttcaagaagattgcaatatatcgatgggacactgaggagagtacaaagttcaagaagattatttgagccagtgaacatatcattatgatcatgatggtgagcagcgtagtggatatatgtcccacgccataaaagaactagtgtgcttcttggaggagcaactccagcaaccccaaaacacctcagaccacgtatccacccagacatatctacgtaagttcgataagcatatcagtcatggtaactaattattttagtaaacaacaacattgaacaaactctccagattaactcggaataaaaccataaaaaagtgggaacaaactctccaacaaacattaacctgtaggacagaggcttgacataagacatcgggacatagatgataaacattaacctaaaggcaaggatcatcgatgtgatgctcgccacgtgaactacaatcttcaccctcttgatctccatggttttgggttgctcgtcatcgccaatttgaaccaccatacttattttctctaatatctattttgtcatatataagtcaacttaaacgcataccacctatacacgattcttggtagatgagcactacgcgaccatccgcagtagctagtagcgcctcctttatctcactctctcccgcaccgtcgttgcaacagtgcctaagagcgaagtccacgacaggcaataccccacatgcccccctacgctcataaaacaaagggtaccttatagaaatagttgatctccatggttgtgggttgctcgtcgtcaccaatggagcttaagctaaagtggaggggaaacctatagaaataaacatcaatatttgaataaattgatcaaacatttaaaattttaggatgagataatcaatttaccatttattttggttaattacaacactttgagctaacatatatcacttgaaagaaaatagataacaggatgacaaaaacgaatcatccacaataagaattaacagatatcacacctgaaaataaacttacactaataaatataaaaagggtttgttggaaccatgctaaatttgagatatgccacccgcatctcaatgacatgtaggacccacgagtcaatgacatgtgggtcagggtggcatatcacaaattttgcaaaatttgtgtggcatggttcaaattgtcccatataaaaaatgcattatcatttgcagcgtaaggaaatcaaacttaatatgaaatgcattcctcagcacgagacggtagatgtgtacatagtgctaacacaatcagatgtagagtacatatatcatcctaatcctcaagacgaaaaatacgtgtagttttatagatcctcctacttctcggcacgaggaaatcggcatcgaagatccatagcatgcctagtgccttgacaatgctacgatcgtgttgtctagcaagtagggcagtacccaaggctgcaattagccctacctcacgtgcagcacatgagtacctgcatgaacataaatataagttaatcaaattagggggcgtttgagagggaagtgagttgaaagacctcatttacatggcaagcattaaggcccatataaataaaacattaattaactctatccatttccaagatatagttagttttataaataatttctgacactattccaaagccaagtacactcatccactgttgtttaaaaatgtatttgttgtactacaatgatgaggaaagtagtaacattttcaacccaagacaaatttattatgaaaatatattcaattattgatgtgatgaaactaatttagtattataaatattactatatttgcctataaacttagtcaagacatatccgtaaggtcggtaaggataccagtcatggtaactaattattttagtaaacaaaaacactgaacaacaaactctctagattaacttgaacaaaaccacgaaaaagtgggaacaaactctccaatgaacactaacttgtaggacataggcttgacataagacgtcgggatataatgataaacaccctgatgacgaggatcatcgagcacatcctcgccacgtgaacgacaatcttcaccctcttgatctccatggttttgggttgctcgtcgtcgcaattcgaaccatcaaatctcactttctctaatctcgtcatatataagtcagccaaagcgcctaccacctacgcactagataagcatagcgcgaccaaccgtggctaataacacctactttctctaatctcgccatatataagtcagcctaagcgcctaccacctatgcagacaagcatagtgcgaccaaccgtggctaatagcgcctcttctatcttgccctctcttaactagacaagcacaacgcgaccaaccgtggctagtagcacctcctctatcttgccatctccgcaccgtcgttgcaatgttgcaacggagcgaagcccacaaggggccaatgggggcacatgcctttctatgctaatagaacaaagggtaccttatataaatagttgatctccatggttgtgggttgctcgtcgttaccaatggagcttaagctaaaatggaggaggaacctatggaaataaacattaatatttaaataaattgatcaaacatttaaaatattaggatgagataactaatttaccatttattttggttaattacaacactttgagctaacaaatatcacttgaaagaaaatagataataggataacaaaaataaatccaaaataataattaacagatatgacacctgaaaataaacttacacaaataaatataaaaaatatattatcatttgcagtataaggatatcaaacttaatatgaaatgcaatccttagcacgagacgtagatgtgtacatagtcctaacacaatcagatgtagagtacatataccatcctaatcctcaacacgagaaatatgtgtatatataatactgcgtatagttttatagatcatacttcttggcacgaggaaatcaggatccgaggatccataacgtgctagtgccttgacaacgctaagaactccaacaaacaccgctagcacagatccaactaggaaccgtgtgcactcaaccacgctgatgcaaagatcatgctgtctaccaagcagggtagcgctcaagctgcaattcaccctacctcacgtgtaacacatgagcacctacatgaacatagatataacttttactctatataacttaatcaaattagggggcgtttgaggggaagtgagttgtaagacctcatttgcatggccagcattgaggcccatataaacaaaacattaattaactctatccatttccaaaatatagtcagttttataaataatttccatgacactattccaaagccaagtaccatcatccactgtttgtttaaaaatatatttgctcgtactacataacgaggaaagtagaaaaaatgttagtagtgctttactactccattcattgcccagcttattttggtccatcattggggagggatctttcattgcacggcttattttggtccatcattgattggggagggatctgaggaaaagacattgaaagtatttcattttattctcaattttttctaaacaaactattaatacttgtactttgaaactgagagagtagaatttattgattatcgtcatgctctatgcatattaatcatgagattataaagtataaggagattatttgagccagtgaacatatcatattgatcataaccatcatgatgtgcagggtagtggatatgtgtctcacgacacaaaagaactggtgtgctgattggaggagcaactgcaggaacccaaagcacctcaaaccacatatccaccgagacatctccgtaagagcaactccagcaaccccaaagcaccgcaaaccacatattcaccaagacatatctccgtaaggtcggtaagcatatccaccaagacatacctacgcacgattctttgtagacgagcacatcgcaaccaaccgcgaatagtagcgcattttctatcttgccctctccgcaccgtcaatgcaatgatgcaacggagcgaagcccacaaggggcaatggggggcacatgccccttaagctcatagaacaaagggtaccttatagaagaaatagatgatctccatggttatgggttgctcatcgtcactaatagagcttaagctaaagtggagggggaacctacagaaataaacatcaatatttgaagaaatcgatcaaacatttaaaatattaggatgagataagcaatttaccaattattttggttaattacaacactttgagttaacagatatcacttgaaagaaaataggtaacatgatgacaaaagtgaatcatccaaaataagaattaacagatatcacacctgaaaataaacttacactaataaatataaaaaatgcattatcatttgcagtgtaagatatcaaacttagtatgaaatgtaatcctcagcacgagacgtagatgtgtacattgtactaacacaatcagatgtagacgtgcacattacagtacgactgtgtacatataccatcctaatcctcaacatgagaaatacgtgtgtatatatagtactatgtatagttctataaatcctcctactacttgtcacgaggaaatcgggatcagaggatccataacatgtctagtgccttgacaacgctaagaactccaacaaaccccgctagcacagatccaacatgatataaagggcattaagtggaaatcctctatgtttaactttgaaatcaactagttcttgagaggatttacaacatgtagttgaataaatttggaattcttataatgaaaagggttctagtattgacaaatgcgttggagaatgcaaatgataggaaaaaggctaaaaggatagaacatgaactgagatggtgaatacaaatggaaaaaaaggtggcaaatgaagtattcatatcaagattcggatagagatgagccaagagaagtttggagtggagggactgaagtttttgtgtgctcctctttttggcctgatgccgatggatgcaggttttctgccctagcttatttgtagtttttttggtagtcgatttggtcacacctgaaccaacgagaattaggccaacaccttttattttctttcttgaacttaatttctcttaatacaatgatgcataattctttgccgtattccctgaaaatactttcactgaactaaagtatataagaaggagaaatagtgatcaagctaataaatgaaacatggtgtaataaaaaaaaccataaacaaacatgtgagattgtgataaaaagcaattgtaactatatagcagctcatccctcatgcggagagagagataatggggagaggggtgtttataataaggatgagtatgcattcatgataatcttaacaacactaaacaaccttgactaacctggccaacagttcttgtgtgcacaatccagaggaaggcactaaatcactacatgccaatcgatagaagagacaaatacttggatgagcccctacaatatgtccacaggcaaaaaaagttgacagacttgcttaggagcacaccaaaagccagatcaagtaaatacaatcaccaaacatctattttgttttgtattttttatacaaccccctaatgggaataaactaagcatgttcttattgatttagttgattgacatggatgagccattgaaatatttgttaaatataaattactttccattaaaatataataacaaaaacaaggaagaaggtttccgcatgtaaaagtactaaaaagataattcaatatgtattcaaactttagtagtacctcaagaaacatttcatcgagcagttcttgagcaccaaaaacctctaatgcgttcctcctcttccttgttctctttgtatccttctattctctagccatggcagcagtacacggcatcacatacatcatgaggtcagcacagagcagaagcaaatcaacaacaaatcaaaaagagcaatgcggaggcagtaacataatagcagcagcaacaacaacaacaaggataccaagacaacaaggaagaggaggaacgcattagtggtttttggtgctgcagcggaaca

SEQ ID NO: 24812 - DNA, 2189 bp, Oryza sativa
ccagttacgtacaacaactgtcaggcgactcaagctcgtgctgcccaccggtggtgcttccattttttcccctttgtccgcaggaaaccgccactatggccgttaccatctttcccctttgtccacaaaaaaccatcgctatccccatcctttgcatctgtagtgatacatggatggggataaacggaagacaatggatcattttataagatttcatctcttcctcctcttatggtgacgacgttgcggcctgctacctagtcccgctttgctcgccctagggtcacactcggccctcaacccatgctcactgcgttccttatggcgaagatgcggagtcgaggacgacgacagatcgacagcaccgacagcggtgggcaggcggcgatgtcgagcggagttgatgtgtagcggccacagcgcactgtgttgaggggaggtggcgacatgggacaaggtgacggtgctgggctaaggcgcacggtggcaggcctgttggtgagccggcgacggcattggatgagggatggcagtggcgatgagccacatgggaaggaagaggggtggttcaaggcggcgacgaagtggaggcgtggggtgctcaaagcaaggaggttgtccattggtttcactaatcctactactaatccatctgctaatccaactcacaatgtaggtcgttagatgagaggatccaacggttaggaatgatctgggtatattttgttaattcgttttgactttttccgtagccaaacttaaccaagttttttgataacatatttgttttgtatttaaaatgctatgctaacttgattaaataaagtttgattagtcaaaacaacttataatatgaaacagagagtatatgcctactaattactaattgacttactatactagtaatatgaacgtgctaacgctacggtgatatttcataaaacaatggtgatagacagaaaaatagaatcatgttgagaatcaaacaactaattatacttgttgctcaaagtatattgatttaaaacccattgcatgatcagtttcacttgagcaatcaaagcgtaaggattctttgaaaaataaaatcaaccacatacaacagtagtgggagaccatagtttacagggtcaataatcatgttttctccttttctagcctccaaagataggaacattgattcaattgtttttaaaagagtaaaatacacggccggtccttaaacttgtagggatgtgttatctaggtcctcaaaatacaaatccaggtcctagaacttgtcaaagtgtgtcatgtaggtcccaaatcgtcacagctcctccaggatcttacatggcactgatgtggcaatgacacacagacatgacatggcataatattgaatgacaaatgagacccacttaaaaaattttcatttcccttttttattctcttttttttcctttcttctccttttcttgctctcactgcagctataggccaccgctacacgggttgctcaggtcacagagaaaagagaagagaataaaagaaaaaaaaagagaagaagaaaagaaaaaaaaggaaaaggaaaatttttaaatgccacgtcacgttcgtgtggcacgccacatcagcgccacgtaggattttggaggagttgttgcgatttgggacctatatggcacactttgacaagttctgggagttggatctacattttgagagtttagggacttagatgacacacctctacaagtttaaggaccgcctgtgcactttactctttttctaaactcccaagttactttagaaaggttgattttgaagatcatctgatttctaaccaacattttttaagatgttggagaggtggttgaaaaccaaagacataaaaattacatgatttggtacaagacaatcacttgttaagcatccaaactacccttcatcatgctcagaagtaaaagagagctgaaactcacagattcagaagtttggatcactgaaggctgcaacatggactgttcacttcagaaaagagtcgacacttcaaatttatctacactgatcacacaacctaatagattcaccagacaccaatctaatgacatatattttgacaaaatatgtagcagagaaagtactaatcattcataaattacaccatgaacgttgcttaccacgtagagcaacaatcgacagaaagc

SEQ ID NO: 24813 - DNA, 540 bp, Oryza sativa
cgtctacgacttcaccgccggcctgcctccgtcgccgccgattggtgcctccgcctacacggctggcctattatgccgccgctgttgggcgtctacgacttcaccgccggcctgcctccgtcgccgccgagtggtgcctccgcctacacggctggcctattatgccgccgctgttgggcgtctacgacttaccgccggcctgcctccgtcaccgccgattggtgcctccgcctacacggctggcctattatgccgccgctgttgggcgtctacgacttcaccgccggcgtgcctccgtcgccgccgagtggtgcctccgcctacacggctggcctattatgccgccgctgttgggcgtctacgacttcaccgccggcctgcctccgtcgccgccgagtggtgcctccgcctacacggctggcctattatgccgccgctgttgggcgtctacgacttcaccgccggcctgcctccgtcgccgccgagtggtgcctccgcctacacggctggcctattatgccgacgttgttggacgtctac

SEQ ID NO: 24814 - DNA, 895 bp, Oryza sativa
aggacaacccttcttcgctctgctgaagaagcaagacaaatttgtatggacacaagaagccgaagaggcattcgttgcactcaagcgctacctatcaaaccccctgtacttgttgctccccaacctaatgaagaattattcctctatattgccaccacgccatattccgttagcaccgtcattgttgtcgagagagagaaagtacaacgaccagtctactacgttagtaaagctctccatgacgtaaagacaagatatccacatatccaaaagctgctttacgcggtaatcatgacatcaagaaagctacgccactactttcaagcccacagagtcacagttgtctcctccttccatctcggtgaagttgtgagaaacaaagacgttgtcggccgcattgcgaaatgggtagtcgagctaagccagtttgatgtccactttgtgccacgaacagccatcaagtcccaggtactcgccgacttcgcagctgattggactatgcctgataacaaatcagacaaccaaatcgacaacgaaacgtggacaatggcgttcgatggtgcactcaacagccaaggagcaggggcaggattcatcttgacatctccttccggagaccaattcaagcacgcaatccacctcaacttcagagcgaccaataacacagccgaatatgaaggactactcgccgggataagagctgcagccgcacttggggtcaagcgactgatcgtgaaaggggactccgagctagtcgcgaaccaggtgcacaaagattataaatgctctaaccccgagttatccaagtatctcgcagaagtcaggaagctggagaaaaggttcgatgggatcgaggtccgacacgtatactgcaaggacaacatcgagccagatg

SEQ ID NO: 24815 - DNA, 605 bp, Oryza sativa
aatgccggaagagacgcgacgggttttcgctgaaacaaaagaaaacccagaagccaacaaggatgggtgagtgaaaattcgcgttgagagaatgaatacagccccgatggtgagagacgaacttgcaagggggtgggttaaacgaccattttggaggggaaatgagggtttcccgaaaatggttttgtttccccattctaaggggcccgttttttttggggttccccttggggttgggaggtggggcgggccccttcggggggctggttattggaagggccggcccggccccttggggaagaaaatggggaagtggttcttcctggtttctttttccccgggggttggcaaggcgggtgcttcccggggccctgttggggggccaaaaaggacgacccccttttggggtaaaatggttcccccttggggttccgcctgggccgttgggggcctttggaggttggttcttttagggcccggccgccattaataatgttaagaaggaagggcggtttggatggtgcaaaaggggaagatccctctgggaaataaggccggcttttacgaagttaagattcagcacccattggaccaatatcttgaag

SEQ ID NO: 24816 - DNA, 553 bp, Oryza sativa
ttctggtcctcaaaaggcgcggttcgggggtagtgcctggggagatccacatgtcgagactggccaggccgggaacgtggtgaccgagggttatgggtgacccgattgtgggtttttgccgattcccccccggagttcaccacgcctcggggcacggctcggttctgggccccgtttggcgattttagccgacccgagcccccgagggcaggattgagcacgagtgacctatttcaagtcaagattcttcaaaaggaaaaaacagcacagatacagcctttaggaaattgaaactgcttttatagaaattcagatataagagaaataagaatatgcatatgtggtagcccccggccaaccctgcacgctcgaggggggtgcggggttggcccgagcccgaaacctgacacccgatcccccctttaggggtagaagcgacgaaggtgttcgatgttccacgggttaggcaactctgtgccgtcacctgtggccagccgaacggagcccggccgggggacgccgatcactcgatacggaccctcccacattggtg

SEQ ID NO: 24817 - DNA, 19920 bp, Oryza sativa
  unsure (1)..(19920): unsure at all n locations
aacggttaaatatatgctaaaaagtcaacggtgtcaaacatttcgaaacggagggagtatgtcgggtcctaatcgtgtgggatatgtatgatagaaggccgttgaaaaatgatcgataaaaaattaagaactaatttataggtaaaacttttgtatttactcatgatttaaaatccaatagtagtagcttttaaattttaaattttggttgtgcaggctgataaaatatcaagaaaacgacgagggacgtttttttgcacatgatgggtgtagacaaaaaattgtgaagcggagataataactacagaaaattcgagattttagcattattattgatttattgtgtggctcaaatgggagattagaccggagaaacaatgcatgccatggtcaagattgagcagagtccatggtctatatgcatttgttttttgaactgtggtctatgcatatatacatccaaagactactaaacttgtgttacacggttttgaacttggacaagtatatacaagcatgctaatagccagctagtgcttctagtgtccaagacacagagtttcgtcaccgtggagtttaattaggtctaaatttaggtcttcatggaacattccgttaaaggtgccttctttagaccaccttggttaaactaattttacaaattattacaatggctaaactgattaatctaatgttatatattttatctctttgagaaaactaaaattggaccgcattgcaagctaactagacgttttttttttgcaagctttctctattaattcaaaatatgtaggtcagtggcggatcgagaaaatcgatttattgatgtcataatatgtctattggtgttatagtatgctaattatatttagatcatgatgttatattatatggataagcagtttcgctataggttttaccgaaatttgtcggtgtcgcctgacactagatccgtccctaatgtaggtctcaaagcattctccgcttttcgtttttttccctaaaaagaacttattttgtactgtacgtggtttctttgcacttaattttaattcttttgttcatgttctattttccaataatcgcacccctaaatgtccatttttctctttgatttgatgatgactaaaatgtcttcacgtacgacttctactctcgtctttgatccatagctagtacacaaaggggacaagaagaagttgaataatccctttttgataagatgggtgaaaagttaagctgacgttgttgggttaggcgtgacagataaatgccaaacagagccgctcatttcgtaaagatatactacttgacttgaaatcacaagtacacaccaaggacaaagctagatggttagtgagatcagcagtcgagagaaaagacaacttcataagtgatattggaagataagtagtttgaaatctgaacctctgaacatggcatgaaacttcagaacagtttcgtgttgtcttcaagcttgcaaagactattcaaagttttcttaaatgaaaaaaatatattctggccttctggggttcatgagatcgaacggtaggcacggcacaggtgtgtatcatcatgcgaagatgatttgattatttgattgttaatcacgcttaccaagtgttcctgccattcagattctgttggaaaaagcagaactacttctcacaactttctgttctgaacatcagaacatggacaactcatgctagagaacatttgatggagttgcaggggctggagctttcagttgaacttgtctctataaaatggcagttgaatggggctgaaatattgcaactgaaacagatgattttgctgtgaaggtaaaggagtttaggaaactgaatttcatcttgtcagtgacagtttaaggagttcagtttgctccaacatcttacctttggagcctcaaccgatagtggctgcaaatatgtggagatttaggccgcgttctaaactgggtttcagctgtactaattcatcgtttaaagtgagcaccctttccaaactgataaacaatatgttttgtggtaaaactttatatagataagtttctctaaaaaatcaaatgaatccatttttaaagtttacaatagataatacttcctccgtttcaggttataagactttctaaacatctatataaatgtggacaatgctagaaagtcttataatctgaaacggagggagtacttaattaatgctaatggcttatattattttttctgcggctaactagctatcctaaccgctatatagagcgcacccttacttggctagacatcgcatccaaaatctttggcagaacgagaaaagatttggttctctgtagtatctcatgttcacttgccaaacaaggatagtgcagagcagtgatttttaacttctgttcttctaactttctctgaagaaccttgcttggaagctgaatgtgtaagtaggatgggaccaaatcttcagcagttaataagtttcagttaagcaattgattactagttgtgaaatcttgaggacactcttgccaataggtagaatgttagcttggaattggatggagcaacgcttcactgatgaaacctggttctcctcatgcaattctcagcattcagtagtaatcatcaatcaagctgctaaacagaatagccatggcagttactacctcagtcctaaaatatataaaaatctataatcaaatgagacattttctagtatcagattcgtattactaaaaaaaatattccatccgatactaagttcttatatattttggaacggagagagtaagtcggaatgcatcaaacggatcccaatgaaattgatccgaatctacgagagcgcaagcgaatattactacagaatatcaggggttacatgcaaaaagttcttcttcccattcccctgaaactgaaaaagatttggcacgaatcgaaccctccaatccattgcttgcccttttttgtgtcctccagcttctagaaacttctagaacccaagtaagtccaagccgccgccgccgccgcctacagttgcttgcaagccgcattggcccaggtaacacgcccgcgatgtgctggtcattctggtgttgataggaattcacagttttgatctctctgctccattctgtagcctccaggtttggcgctcaccacctgttcgacgaaatgcggcaagagggagcagatgtgcgcggcagccacaagatcaagaagacgactgctgatgtggaaggcgggggtgaatggatcaacgccctcccggaagaggtcctgcagcacgtgatgtcgttcctgccggcgaagcaggccgtccggacctgcgtcctcgcccggcgctggcgccacctgtggaaatccatgcctgctctgcgttccatccatggtatctgaacaagcacgatgtcaggaacctgaacaggtttatgaattgtttgattcgctaccgggaccgcagaatgccactagatatgtgcgagatcaaaatcggtgcttttggggagggctgtggtgaaccacaggttgactcacttatcagatatgcctctgttgcgcaaagctcggataatgaaggtcgaattgcatgagcacaacgataactttttctctagccaagctgcctcttatctcccagcgcttgacgaggttagagcttagtaatgtgccattattatgtggttttgttgattctttgagcttcccagcatggaggccctatggatgaagttctgctatatagacggtgagaagatatcgtctcagtcacttaaagagctgaccatgattgactgtatattttttcgccaatttcggatttctgctccaagtttggtgaggttggaaataactgattgtgtgggtaaagctcctgtgctggaaataatgccatctctagtaaaggcatttatcaggttccgagactctagagatatttgtggtaaagaagaatttgggggtagttgtactaatgctagctgtgataattgtggtgctaatggtgttgacagtggagattgtgtgcttctgaagggtatttcaatggcaaaaagcttggagttggtagctgaacctggtgcggtatgtttttgcctactttgtgcttaattctgttgttgtgtatgatcgactgtttgtgttgtgctatctgtatcgttgttttatttgtttagtatatgtattctgtaaattagcacaatgtggcttatgtgtgtggctaccgataagatatctttaatgtcatgctacatcaaggtggtttatctgtgattactagtataatgtcttgtgttgcaatagatcccaactaaaagtctgaaaaataaaatactacaaatgaataactatgctcaaatataaaacttacatgcatttgtgtatgagaccagttggctacctatgtatactcatctgcaaaaaaattacaactgagaaatctctaaatatttagtatttacaacaagattttcaagtgggggtgggtgtagagcataccgtcaccccgactccctcttctaagttctgaaagctgtgcactaacactatctgtaaggagcatacgctgtgcaatcatgctaaggtccaataatcaaactaaaattttctgaaaaatatcccggtgtactccggcaatagtcaaatactccgtatcatcggttattcagaggagaggaaagcactaacaaaaaaaaattgactagtcaacaggctgcagtcccaacaggatctctgccacgtgtctatccgactggcttaactccaaccgacagcagcagagcagctgcactccggcgaattcgggttaatctgcgtggacgccggcgtcagtcattgagcctgatacgcttcgtcaggccagggaagcagaggcggtgcagcctctgcgcgggttcgtcgtcttccaggctcggagggcgctcgtagtagagcccaactccggcggcattgtcgccgccgcgtcgctcctggaactgcacgctcggcgcgcgcttgacctgcgacaggtgctcgagcaccttccccttggtgacctccgtgctgctcgacctttttctcgccgccgtcgctgtcgacgtcttgtaatggagcttgttcccctggttcttgtacatgagctcgtagccgtggctgggtatctctatgtcgtcggggagcttcctctccttgccgacggcgaccgccgtctcgtagcaccacgcggaggcgacgtggttgatggtgtagccgccgccgccgacgaggagcagcggcaggttgaacccgcggaggaagctgacgcactccgcgtggccccgcaccgacagctccatgccgccgaggcggtcgccggagagcgagtcggcgccgcactgcagcacgatggcctccggctggaacacctccatggccttgcccacgatcggcttgaacagcgtgtggtacacgtcgtcgcggacgccggcgtccaggggcacgttcacgctgtagtgctcgccggcgccgtcgccgatttcgttgatggcgccggagcccgggaagaagtccttgtggggcgtgattttgccgtaccggtggaacgacagcgtcatgacccggttggagtccaagaaggcgttctgcacgccgtcgccgtggtgcgcgtcgatgtcgacgtagatgactcgcctgaaggtgccgaggagctcgttgatggcgagcacgatgtcgttgacgtagcagaagccggtggccttgcaggcggacgcgtggtgcatgccgccggaccagttgatggcgatgtcggaggcgccgtcgacaagcgcgcgcgccgcggcgaacgacccgccggggtagccgcggcagtacttccagaggcggtcgaaggcggggcaatcgtcgtcgccgccgatgccgtggtcatcctccgccttctgccgaagcgcggcgtcgttgaagtagctctccggggtgaggtcgcggaggaggtcgacgtactccggcgagtggaagcggcggatctccgcctccgtggcgggtctcgtgcggaggcggcgcatgtcgccgagcatgccgtagacgccgacgaggctgtgcgccatggcgacgcgggcgggcaccatgacatggtcgtcgctgaatttgatgtgggcgatgccggggtcgtagtagtagcacacccgccgcttcttgtcatcggcgcacgacggcgacggcagcgagttcccgccggtggccatcgctccaagttccttcttggaagatcgagatcgaacagaatgcagcaatggtgcagaaatctcacatggatatacaaaagggacacatgagtctctgtccgagtcggcaacgaaaaccgtatcgtaaacaaacaaactagctagtcgagataagttttaacaaccagtatgataaccaattgagaagtaccgtgtgctagttttctgtaaccaattcgatcaaagctgtatttctatgagcttcagcaagcaacagtgttagtattaattcttgcagacccaaagcacacactttcagaattcagataaggacttcagcatggacgtcgtcagctcgatcaatcatctgctagatctctgaacttctcagactgaatcctacacaagcacgaagagcatattagttcagataacctttggcatatataaaaaaactttgaattgcatgataagggactttgcagttgataaaagtatatactatagaaattattacatgctcccgattactaaggctctgttcttttggttgagttgggaacccatccctccggtacggaaaacgaagcagtccattagcacgtgattaattaattatttgctaatttttttttcaaaaatggatcaatataatttttttaagcaactttcgtatataaactttttgcaaaaaacacaccgtttagtagtttgaaaagcgtgcgcgcggaaaatgagatgggggagttgggaactccaggaaacgaacagagcctaaatgagctgtgttttctcctaacagaatcattgaagagtatgatgttgaaagtataggtataatgaatgccaaagtacgggccagttcaggagtgatgtactcaagtcgccaatgattcatttatttggtcatgcacaccagttaatggaatatatatgttcctcataattggacgcaatctagttgccattgttttaatgagtgcatccaataggtgcgaaatgtgcaagacaaactagacaataagatttgggtatcatattttgattggtttctagcaagaatgaaacgattagaagaagatatttgttncnngtccaacaaaaagtacctcgaggtaccggtatctcataatgcccatcatgcccaggtagatccaacgatcggaaacgatttggtaccgtgagataccggtccctcgagatactttttgatggaccggaacaaatctcttagaagaaaacatgaatatttgagacagtcttttagtaatcaaactagactgcatgattcattttaaagttttcgatccactcaaggagaaattactttaatccattcatcgtataaacatgaatatttgagaagtctgttagtaatcaaactattcatcgatcagccctaaagttacagttcgtatcaaactagcctcccgtagggtccctcgctagtaagtactagccgtgagacgtttggaggctaggttgaagggaggagggactagaaccttcattgcttaactaaataaaatagaatactatcacttttagtgggatgattaaactcctgagaattaaaatctaacttaaagaaataaatttaccaagacaagcattcaaactaacaaaaccaatcgtatcactaataagaaaaccttccaaggccagtctttgtttacttattgataagattgctggcttgctgtttatttgcctgagaggaaagcatctctcatgaatcgggctggtcagctgtttatggtaaaggtggttcttacagctgcacgcccacacctgtatatcaaatgattgatatggatctcccaaaaaagggttctcaaagcaattgataaattacaaagttagttttctttggaagggccagagcaggtaagtggaagcaattgcctagttacttggccagagtagctcgcctatccaatatggtggtctaggtattcattatgtaatagttcttgaatgatccctaaggatgagatgactttggctccaaaagaccgatctgtcaagaccttgggatggtttacagtttgaagtacacctcaatgtcagggcaatgtttttaattaccactgttactcttgtcggggattgcagcaaccaatgttttggactgatcgctggttatatggctattctattgctgaattaagcccctcttttatttgctcttatcctatcacaaggtgtggagactggagagtattcaataaaatcagcctacaaggacatttttgtctaatcaattctttttgccccttggaagaaaatttagaaatgagtgaaatacatggccggtccctaaacttgtgtggtggtgtcacttaggtccgtgaatttgaaaattacacgtttaggtccgtgaacttggtttaatgtatcatccaggtccaatcgtcctttgactgcgtttgaccaccaacgtggcatgtcacgtaggcaacacttttgctctcagccccctccacatcataacacgtcacatatatcttcttgtaactatatagtgacaccagaatcccaaaaaaaaaaaaatcctcaaatcattcttctccttgcatgtatagaaaatgcgatcccgattagcaattgccattgctctgcattccaaaataaccttatccttacacaacgggcacttgatcaacaccaccttcttccagcgacttcaagacgaggacgagcttggagaatccatggggatgcctagcatgcaagccgtattacgctgcctcccgctactaatccgaccgcattgccccaccgctaaccctgctgcactgcgctgcctcctgccgctaatctcaccgcgaggccgccacagccgctacctctcagcctccttcccctaacctcaccgtcaaaaccctagccgatttagggatattttgagggatttgggttgaaatgcactggacagggcaagttatgtgtgaaggtgtatgtggagggggctgagcacaaaagtgttgcctacgtggcatgccacgttggtggtcaaaggacaattggaccgggggtggtacattaaaccaagttcacagacctaaacgtgcaattttcaagttcacggatctaagtgacaccacaccacaagtttaaggaccggccatgtatttcactctttagaaattatgtacaccacttcactgcaaattctttgtttgattagcaatccttagttgatgtcggacggtggacaggatgcccaaataagaccttcctcacccggctgcttgtcccctttgtgaccaagcggatgaaaccattcaacatctcttgatttcttgggtttttgctcatcatgtctggtttgattcttttctgaagagaggtcactacggtaccagtgggttccctacctggtggcgacattcattgaagttggttgacaagcaacaaacgaagggcctctaactgatcaggaagaaccgcaatgggtgtgtttctgatggagagtcccctagtgtcagtactattattagggctatatcagaggaggctgccctgtggagcacagccggagctaaggagcttaggctgttggcttgcgttaggagatcaggtttcttcttggtcatggttttagatcggttgtggcatgtcttatgtaatatttgtaagcttgaactggttatgtacacctatatattagaggggggaaaaagaaaagaaactgacactcacatcatcagtaaccactgtgccccgcatgacacccttccaggatcttaggctcataaacccataacattcagaattttaatgtgaataagctttaattactcctgcacaaatctatgtataagattaagaactactacaactgtaatgcttgactctccacttctgaactgttgctgacctctgctgctgaactattgctgaaccgtaatgcttgcttcatatttataatgtaaatgtaatgctgaacgattgttgcaataaaattaatgcatagaacattctacatttttcttcgtatatatgggccatttggccttttcatattcaaccaacatttctagatataagaagatatactaacgagagaattaggaagattcacaatatttaagttgcaaggatggattttcagtatctcaaacctggatagtgattttgtcaggagaaacgccacaggcattcaagatcttgaaaactttgtgaacccattcttcattccttaaacatcttactttgactctttcaaggttctgaaactggaccaattgtccaattgaactgctactttcttcaatttccaccatatcttcatggccctagagcagacaaaatatatcttggctcaatcaatcatggatgataaccgaggtaagtaatcactatgaaattagaatgcatataccttataaagttgaagagtgagcttctccagaattgatgtttgttggagaaagcaaccaagagcgcagaaattatgcccaacgacccatccatcaagaagcaaagtctttaacttgctgaatgtggggcaccatgtcaagtcttgcttcaaaatacaatgtacaaagtaagatggaacatatcattttaacatacaacacgacatgaaactgtacattggaatggatagaccttttaagtaaattcaggacgtaacaaaacaggcaataaggatctctcgagtctcgacagacatagacatattctagtcttaaaaatactgattgaagtcttgcaaaaattaccagagatctaaactatctagtgttccacctgataccagaagcataaaaaccataaaaatgcaattattcacccacccacccacacaaaccaacttgcagggatgtcctcaaataggtacaaggtaaggcaggacagaaatccatgataacatacaacaaattatgttttgagtataaagctaatgaatatgaacacacacgtaccatcccagcttcagctactaattccaaatttgcagcatttgacagacctctgaaaaacttatacttgacactgccatcaccgtcaggatcaccatcacaacaaacacatgtaccaggatcatatctgcatttccgacaaccccaagacaaagtcccaaacttcacagatgctgttactagcaatggcatgctttcaagcaaaggaatcgagccgtaattatcacccaatcgtagtgaaatgagacctgggacagaaatacgtgtgctcatctcgaagttacatttggtgacacagagatgctttagtgactgggacaccatcttgtcagtggaaattttgcatgattccgccgggcggagcggccgagcggagcagcgtcgccgctgccatcggcccttgcgccctcttccttttctcttctcctctccctccccttgagcccaacggctcaagggggccttgacccgcgccctgatcgggggcgcccagcccaatggctggtgggcccccgtcacactgtgccatataaagaggggtggaggacgggacggtacaacgacacaaggaacgaggttagtagcngccgccactccaccccataaaccctaaccgatcgagggggcgcagccagtgacgggaagtccaccgccgcgccacgcctcgtcgtcgacaccgtcgctgctgcaaccgcatcaccgccatcggaaccgagcacatcgtcgccgccgtccacgtcaagcccgcgacgacaacgacgatggccggccggacttcctcttcctcaacaacgactggtcacaaccctaaatcctctcactccctctttgttcattcatctattgttgttcatccattgcaaatagaaccacccgactagatctaaacctaggtgatccaatagacaaccctatcaatggtatcagagccaggttagcgtttagtttggttcggggatagacatccacagagaagaaagaaatccaaagagaaaagcaaacgatccaacggatcaaaaagatcgaaaccctaaccctaatcttacctcgtcgccggccgtcgatgacgccggccacggagggggggaggggcaaagaggcaccgccgaggagccactcgacggccgcgcgcgcacccgcgggtgcacgcgcgcgccggcgagggggcccgcggcggcgccgccatctccgtttttcggccgccgctctctctcacacggtgggggctagagacggtggagggagcggagaagagaaaaggaagagggtgcaagggccgatggcagcggcgacgctgctccgctcggccgctccacccggcggcgcgctagagaaaaagtgggcgcgcggcagcgcgaggtcgccggccatggcgcggcggtgcaagggtcgccggcgtagatgacgccactcggcgcggccgcacccgcccgcaagagagaagaggctagggtttcggccggccggcggctggggtcgggtttttgtccctccgatcttagcgcccggccgtccgatcgaaaccctagcgatcggacggccgacggcggccgggccgaaagcggcccaagtggggagcgcgcggcggcggctttcccggcccaggcccaggttgcggccttgggggaggggagggggcgctcgcccgcgcgcaaggtggccatggaccgaccggcaaaggccggaaaagttcaatttaggtccctcggggccgaaagaaaaagaaaagaagagtttaataataggtcctctcagaagctttttcaattatgtataattattgtgattatttctaagcaatttgaaccaacgtgaaaattgtttagagaatagataaatgtgagaaatgcttctgaacatgtattttgtatattttcatgcaaattacaatagaactttgaattgtttttgcatgttttacctctgtttaaatttgaaccaacgggagaattttacagagagtaaataacagagttttgttattgtttatacgaattgtatatagatcttccgctgcaaatagatgaaattgatgaaaattagtgtttctaaaattaaatttcgaaccaacgggagattttaattttaggaacattaattatgtgctatgatgttgtaatttttctgaccaacgttgataattgcaatgttatagttatggctttatgtgttatgtctattttctgcccaacggtgatgtagacttaatacataataattttaatgttaattttgttctcacaatacatgattatctcaggtggctactccttgatgggttacattaaagatattccgaccctgaaaggagataactacgaagaatggaaaagagaactcgaccttgcctttatcttgggagaggtggactgggtgttgactaccccatgtcctatagaacctgctgaaattttcagaggtgaaaaagagtcagatgctgaatggcaaaagagagagagggacaatgcttccctcatcatgtcgtatgacattgagcatgcgaaatggtcttcagccaacaagaattgtttggctgcggtaaagaacacaattgagccaaccatattgggctcaatcccagagtatgacactgtctctaaatacctcgaaagtataaagagccagtttactggttcttcaaagttttatgcgacacagctgataaagcagcttgttacagagaggtaccatggaggtggtgtaaaagaccacattcttaggatgagcaacatggcttccaaattgaagcaaaaagatttgggcatctcagatgactttctggtccatctggttttgtcctcattgccaaagaactttgacaaccttgttgtcaactacaaaataagtacagagaattggaatattgaagagctcatctctaattgtgtgcaagaggaggaaagacacaaagagaccaatggtgactccattaaccttgtcaaagataacaaggaaaagagccacaggtcaccctcctcaaaagaaaaacagcctcagcatctgcctcagaaacaacagtttacagttgagacaagatcagtgtctacactgcaagaagacaagacattccaagaaagatcatcctgacttcctgacagtgatcatggcaaagaaaggtgagaacattattacatttgtaaagaatctcattatgattggttattctagatccacatggtggatttattctggagcaactattcatgtgtgtaattgtttaaagggattccgttcaatgaggactacgcaaagaagtgaaagatccattagagttgctaatggagttgaagcaaaagttgaagctgttggagattttcacctagaactcgcgaatggcttcacacttttacttccagatgtttttatgtccattctttgcaaagaaacttgataataagtgtatccaaattggattctgatagatatgaaatggcaaatgtgaactatggtataataatcaatgtattggtcttgtgttgcaagatcagctttatttgttatctctttctgagaatgtgaatgttgtgtcctcgttgacaaaagaaaagaaaagcgaacttctgatgtctcatcgaaattatggcactgttgtttatgccatatttcgagggggagaattgagagactggttaagaatgtagttcttcctccattggagttctcagttttagaacgatgcatacaatgtatagaatgcatcggtgcccaaaacaccgtatgagctatgaatcctccgtgtgtggggaagtcctgcaaaggataaagtatttaacccaaaacagtaagctgccattttattggctattctgaaagatcaaagggtcatcgtttctactgtctaaacagttatacaaagtttgtagaaacgagacacgccatcttcttggaagacgaaatgattagggggagctcagcaattcgagaaattgatcttgaggagaggcgggtgtctatacccgctccgtcgactcaggaacctttcttctctctacctgctaatgttgtgccagcaatgcatgccgttgcggtaccaacacctgttgttatctctcctgtggcaacaatgaatgaaagtgaggaacctgttctacaggattcaacagaaattattgccacatcagaggaggagctgcaacagcctcaaacagataatgtgccagaataggaggcccctagaaggcctgaaagagtcgcatatggaggatgatcccatctcatatgaagaggccatgagaagccatgaaagatgaaatgaaatcaatgaaattaaatgatgtctgggatttagaagaaattcctaaaggagccaaaacagtaggctgtaaatgggtctacaaaaccaaatatgactccagagggaatatagaaaagtttaaagtgcgacttgtggcaaaagttttcacgcaaagagaaggcattgattacaatgagacttttctccagtctcttgtaaagattcctttatgattataatggcactagtggcacattatgatttggaattacatcagatggatgtaaaaacggaatttctaaatggtgatttgaagaaaaaaagtatacatggcacaaccgaaaggtttcgtcatgaaatgaaacgaaaatatgggatgccgtataaagagatccatttatgggttaaagcaaagcttcgagacaatgctacttgaagtttgatggaacaataaagaaatttgggttttcaagagaatgtagaggacaactgtattgattcaaagttaagaatgggagactcattttcctaattctgtatgtagatgacgttctactggctagtagtgatgtcaatctactgcaggaaataaagaaattcttgtcctcaaactttgacatgagagacctccgtgaggcttcatatgttttgggcatagagattcaccgaaatagaacaaagtatgcattgggattttctcaaaaggcatatatatagaaaaggtgttgaagaaattcaatatgtacatatgcagtgctacacctgctcctatagtcaaaggcgaaaagtatggggcatcacaatgtcctagaaatcagtatgagctcaatgaaatgaaaataaagccatatgcgtcaactgtaggaagcctacagtacgctcaagtgtgcacacgacctgacttggcatttgttaccgggttatttggcagattgcaaagtaatccaggcctagagcactggaattagtaaagattatttgcaaagaacaaaagcctcatgctgtcttacagaaaatcagaatcgctccacatagtggggtattcgaattctgactttgcaaaagataatacaaagttaacatcgggggatacatgtttaccctggcagtaggagctatttcatggaaaagctcaaaacagactaccactgcagggtctaccatgtatgccgagtttatagcatgccatgaggctacggggcaggtgaactggctaatgaagttcatacccggttttaaaggtggttgatagtattgagaaaccactaaagttatactgcgataaagaacccacagtaatgtactctcacaacaattagtcaagtggtgctgccaaacacattgacataaagtactatgttgtgaaagacaaagtccgggatcaaacaatcagtctcgagcacataagaacagaaaggatgctcgcggatccgctcatgaaaggcctacctcccaacatgttcaaggaacatgtagcatgcatgggttttaagggaagccttatgaatcctggactatagggcccaaaagttaaagtatctgtttctgaatagagatgtgtatagtggctgtcgaatccatcggtaattaaccgtgacgatgaaacatgctctatatgtaaatctgtgatggaatagaaaaagctaaaggaaatagtgagatcaagggggagaatattagatggatctccctccccttgagcccaacggctcaagggggccttgacccgcgccctgatcgggggcgcccagcccaatggctggtgggcccccgtcacactgtgccatataaagaggggtggaggacgggacggtacaacgacacaaggaacgaggttcgtcgccgccgccactccaccccataaaccctaaccgatcgagggggcgcagccagtgacgggaagtccaccgccgcgccacgcctcgtcgtcgacaccgtcgctgctgcaaccgcatcaccgccatcggaaccgagcacatcgtcgccgccgtccacgtcaagcccgcgacgacaacgacgatggccggccggacttcctcttcctcaacaacgactggtcacaaccctaaatcctctcactccctctttgttcattcatctattgttgttcatccattgcaaatagaaccacccgactagatctaaacctaggtgatccaatagacaaccctatcacaaggtcctccaatgcaggtaagcttgacagatcgtcaatgaagttagtctcagtcctattacgtttggtgatgcaaagacgctttagtgactgggaaaaaatattgtagggggtggaaatcgtacagcaattcatctgaaggtcctccagtacaggacagtttgagaaatcaagagcatggttgtccagctttacagaccgaagctgtaaggtggtcaagtgtttagagatgagaggcatgctcaattccagcggggctaaatgttcagattgaacgaggaccctgagcacccgagccttgcacatgagcgcatgcctgatccatagttcagcatacttgacctcgtagatacaaggtctgggcatcatggtaggccagtatgtgtaggtctggaactcgagctcatcaagaggcaccgggtcgcgcaagagaagaagattgttgacaaacttgttgaacctctccacacccacccatctgtgtctgatgcgcagcacgggggcggacctccaaaggttgcgccagcggcgggagagcagacacgtccacacggcctcgtgcgctggtaggaaggagagaacattgtggaggatctcgtccgggagggtgctaagccagtcttcgccgctgttctcctcggccgtgagtccctcgcgtctcctgccgccgtcgcgcctcgtagccattccgtcgaacaggtggcgagcgcccttgctgcgcaagagcagagaaaggtgagacgtccaaaaaagccatcacggaacaaagagaacaaccgagaagacacactcgcctcacctcagtcgccggaagactcgctctccggtctccgctgccgccgccgccgcctggtagggctcgtcgcggcgtcgcccgccgccgctgatcgatggagcgccgagcggatggttgtgctgtgtgctgtgtgcagtgtaagcttcacctctcaagacttaactgtcaatataagcccaaggacagaatacggcccatgtgtgtcagcctcgagtggaggcccaagacctggatatggcccacgttagtaggcctagagtggacgcccagtttatctcgggcccaagacagtccgaccatgaacagcataagcaagacaggcctagaccagtagaaacccaagattgatttcagcccgtacgttctagtaaattgaaggtctatattgtattcctcaacatgttccatagtccgatttgctgttggctccctataccgtaaatccgtaatacaagcaacaacaccttcctcctccacatcagtacaagttcaatttgactccaatcatcttgggaatatatttgtggatggttttcattcgacgcggcacctagtgctgcttacgtgctactacaatcaggaaggaaaatataaaacaagttacacgcataggccgaaatgacaagagcacatgggcctgaattaccaggaggcgctgtttcaccgattaaatcaaaaatgttttactaaatctttactattataaaaattgaatatgttttttctggttctttgatatgccatctgtgtatgagtctgacggagcgtggggctcctcaccgggagaccgcgcaggcccccctttgccggttcggccggggactcagggagagattctaagctctctgtatgtggaaggctcgcgagacaggaaacacacaagacacgggcgatgtatacaggttcgggccgctgagaagcgtaataccctactcctgtgttttgggagatctgtgtatgaaggagctacaaagtatcagccagcctctcccttgttctgggtttctaatctggaaaaatccagtcccccctctcagtgggcaaggtcctccttttatatcttaaggggataccacatgcaccatttctctcttttttgtggggacttaccccaccttttcataaacagacggagacttgtatggttgccgtccgaatgaccttctaatgggacggcccatacctacctccacttccgccggaagcaggcgcgacgtggaatcgtggctgtctgctgacgacatgaccggtattagaccagtcacgtcggtcattcttgtccaccacgtgtcagcttagcaatctacatgctcgcccttcttcacacaacatcttgcctgtaatggtttaggatgaagcctggcatatatctgaccaggactaacgtgccatctctgggaggtaacacgctagctccagctggggacgagcgcctagaagccctcgtcctgacgggatggggcgaggcgtgcgtcagatcgcctgtcgccacctaacccgcgatctgaccggtctgtgactggtcacagaccggataaacgagtgcactgcactgcgttacattcggcgtgacacgctcagccaaaccgcaataaatgtgggtaggtg

SEQ ID NO: 24818 - DNA, 14188 bp, Oryza sativa
  unsure (1)..(14188): unsure at all n locations
ggttaggtgagccccactgtgctcacctaacccatacgcggagcaaaaacccacgaggggtcggggcgcctcggccctcggggccgaggggggtgcggcccgaccccctcggggggactaagaggagggcgaacgcatcaccctcgggcccgacgtccctcgggggtaccaggccacgtgtgcgattgtgtctgcctcaaacctctagtcatgatactcctgatcccatgtcaccgacagtagcccccggcgttatgccagggcgatcgccctctttaagggaaacggtcgggcgtgacgccactcctaagacctggtgacaggtgggaccggtctccacaattgggcagaaacccaacggtcacaaaccacgcacatcggcaatggtaactcggctgtcaacaatgagcggtctcttcaagactgccacattacttgagtagcacacgaatctggacatggcgattcgtttcgtctgaagatatggtaacgtcgcttcggtcggcgagcgtaattaacgcgcgcacgatatgatctatctcgactgccacaaccgcatatccacctcatgcgccgcaagcgggcgaatgggattagtggaagcgtgggcgcgagaaacgagggggcgaaatagtgggcgcgagaagcgaggagccgggcacagcgttggcaagagtacaaaggcactgaggaagggatctgtttccttcctttcgccattattccccttgtcttcgccgcttgcgccctaactccttctttcctgtgccctaccttcgccacacgcgctcgctcttaatcttctcttcctccggcgccatggcacggggttccgctctgctcgatggtagcgtgctgccgccttcccggatcgtgagcgagaggcaggctgggctgtcgcgccgcttcatgccggaatctgccaccggccgggagatagtcacgctgggcgagggacgcccggcgccagactacccggggcggtccgtcttctttctcccctttgcaatggcagggctggttccaccattttcttctttcttcatggatgttctggagttctacgatctccagatggcgcacctcacccccaacgcggtgatgacattggccattttcgcgcatctgtgcgagatgttcattggggtgcgcccatctcttcggctgttccggtggttcttcactgtgcagtcggtgtcgccgccatcggtagtcggtggctgctacttccagccacgggggccggtgctgaaccgctacatcccctgcgccctccgcaagaagtgggacgactggaagagcgactggttctacactcccctcgccgacgaagcgcgcctccgacttccgagccagcccccggcgcaggcctccagctggcgggcgccggtagatctgggggatggctatgacgccgtcctcgatcgcctggcgggcctgcgatcccaggggctcacaggggccatggtgtacggcgactacctccgtcgtcggattgcaccgctccagcgacgcgctcggggcgcctgggagtacaccgggtccgaagacttcacgaggacccaccagggagtgagatgggactgggctcctgaggacttcaagatattggtccaatgggtgctgaatctcaactccgtagaggcggccctcattccccaaggaatcctccccctctgcagcgatccagaccgcgcctccatcctgaccattatgatggcggtcggggcctcagaggagcgagctccaaagggccacgacggcgcaggcgggagccgcaggggggaacaatctaccccgagagggggtcgtgcttctgggcccgcgacaggggcccggggagcagccgccctgccgacgcccgggggaagaggaagcagggaggaacacctcccccatctcctccccgagggggcggggcggcgcgtgctagtaacaggcgcccggagggggccgcgccaacatcgcagcccgagggggagcacaagaagaagcggccccgtaagatgggggagacagaaccatctcggggaaacctcatttcccctccaaagtggtcgtttaaccgaccccctcgcaggttcgtctctcacccatcgtggctgtattcattctctcaacgcgagttttcactcacccatcttgtttgtcttctggttttttctttcgtttcagcgagatcccgtcgcgtctctcccgccattccaagtccggccagtctgaggccgaggatccggcggccgcagaggccctcaggcgggaatctgaccggcgagaggccgcggatcgcctacgggaagccgaggaggccgcccaggaggccgcccgggctcgccaggccgaggaaaccgcttgggaggaggccgcctgggcccgccaggccggggaagccgctcgggaggaggccggatttcgccaggacgaggcgatggcgacttctgaggcagctcgcgacgaggccgcgggcgcgtcgcttgggcccactccctcaggcgacactcaggcgacaacttccggggcagctggcgacgaggccgcgggcgcgtcgcttgggcctactccctcgggcgacgctcaggaccaaccgggtccgggggacatccccgagtccggcacttccatcggcggcccgagccgcgtggcatcctctccaaggcggctcttccccacgccttctatcgccctactgaacgcagagccccttctgcaggccttggccgccgcaaacaccacggtgttggatgggttaagtgcccaggtggaggtcctgcaggcagagcgggcggagctcgacgccgcgtgggcgcgtgtcgaagaggggcgacgctcggtggaggccatggtggaggtgggccgtaaggctcaccgccggcacgtctcggagcttgaaactcgtaagaaggtgctggcggagatcgccaaggaagtggaggaggagcggggggctgccctcattgccaccaccgtgatgaacgaggcgcaggacaccctccgccttcaatacgggagctgggaggcggagctagggaagaagctcgacgccgcccagggggtgcttgacgctgccgctgcccgagaacagcgggcggcggagaccgaagcggcgtcccggcggcgcgaagaggcccttgaggcgcgcgccatggcgctggaagagcgcgcctgcgtcgtggagagggatctggcggaccgcgagggcgccgtcaccatccgggaagcaacgctggcggcgcacgaggctgcctgcgccgaagaagagttcacgctccgcctccgcgaggacgcgctcaccgaacgggagcgagctctcgagggggccgaggccgcggcgcaacagctggcggtcaacctgtccctccgcgaggcagcgcaggaggagcaggcgcaccgcaatctggaaggtgcccgcgccgagagggccgtattgaaccaacgggccgctgagcttgaggcgcgggcgaaggagctggacgcgagggcgcgcagcggcggggcggccacgggcgaaagcgacttagccgcccgcctcgcagctgccgaacgcaccatcgccgatctgcagggcgcgctggactcgtccgccggggaggtcgaagccctccgcttggcaggcgagatagggcccggcatgctttgggacgccgtctcccgcctagattgcgccggtcggcaagtgggcctctggagagggcggaccgtaaagtacgccgccaaccagggaggcctcgcccagcgcctctcgaagatggctggggctctccaacggctccccgaggagctcgagaagacaattaagtcatcctcgagggacctcgcccaaggagcggtggagctcgtcctggcgagttaccaggctagggaccccaatttctctccatggatggcgctggatgagttccctcctgggaccgaggaccgcgcgcgcgcgcaggtccgggatgccgccgaccatatcgtcgacagcttcgagggctcggcccctcggcttgcgttcgcccccaactccgacgaggagggcaatgccggtggtgcagacgacagtgacgtcgaggccggcgatccgggcgcatcggattgagcccccagacccccgccattcttcagttttttcttcttttctttcttctaaggccttcgggcctcttttttgtatagatcaacttaatctgtaatcaaaaatgaagaaatttttgtgttaatttcatcttgctgtgagtatgagatgaggatgatctgtgccgtggtccttttgtgtcttagcttgaataagggcttgtgcccaggttctggtcctcaaaaggcgcgggtcggggctagtgcctggggagatccacatgtcgagactggccaggccgggaacgtggtgaccgagggttatgggtgacccgattgtgggtttttgccgattcccccccggagttcaccacgcctcggggcacggctcggttctgggccccgtttggcgattttagccgacccgagcccccgagggcaggattgagcacgagtgacctatttcaagtcaagattcttcaaaaggaaaaaacagcacagatacagcctttaggaaattgaaactgcttttatagaaattcagatataagagagaaataagaatatgcatatgttgtagcccccggccaaccctgcacgcccgaaggggggtgcggggttggcccgagcccgaaacctgactcccgacccccccctcaggggtagaagcgacgaaggtgttcgatgttccacgggttaggcagctcagtgccgtcgcccgtggccagccgtatggagcccggccgggggacgccgaccactcgatacggaccctcccacattggtgaaagcttgctcaatccagcacgcgtttggacgcggcgtaggacgaggtcgtcgacgcagagtgatcgggcccggacgtggcgctgatggtagcgccgcaggctctgctggtagcgcgcggctcggagggccgcgcgccgccttcgctcttccaagtagtcgaggtcatctctgcgaagctgattttgatcagcctcgcaatacatggtagcccggggagacctcagggtgagctcggatgggagaaccgcttccgcgccgtagacgaggaagaaaggcgtttccccggttgctcggcttggtgtagttcggtttgcccagagcaccgctggcaactcctcgatccatgaatcgccgtgcttcttgagtatgttgaaggtcttggttttaaggcctttgaggatttccgcattggcgcgctccacttggccattgcttctggggtgggcaggtgaggcgaagcagagcttgatgcccatgtcttcgcagtagtcgccgaagagttcactagtgaattgggtgccattatccgtaataatacggttaggcactccaaaccgggccgtgatgcccttaatgaatttaagtgcggagtgcttatcgatcttgacgaccggataagcctcgggccacttagtgaacctgtcgatcgcgacatacagatactcaaacccgcccggggcccgcctaaacggtcccaggatatcgagtccccagacagcaaatggccacgaaagtggtatggtctgcagggcctgggccggctaatggatttgcttggcgtggaattgacacgctctacatcgccggaccaggttgaccgcatcattaagagctgtcggctaatagaaaccctggcgaaaagctttaccaaccaaggtgcgcgaggcggagtgggctccgcattcgccttcatggatatcggcaagaagcacaacgccttgttcccgaggaatgcacttcaagaggattccattagccgcgcgtcgatagagggtcccttctaccagcacgtagcgtttggagatgcgatggacgcgttcactcccttcgcggtcctcgggtagagtcttatctgtgaggtatgcttggatctcggcgatccaagcaatcaatctaagggagttgggagcactcccctcgggtcccgaggcctggactccgacaggcctcaggggccggtcaggcgcatccgtctcccctaaggggtcgggtcgcgccgacggctgggcaagcctttcttcaaaggcgcccggtggggtctgggctcgcgaggacgcgagccgtgagagttcgtcggcaatcatgttatcccgtctgggcacatgccgaagctcaatcccgtcaaaatggcgctccatacgccgtacttggcgcacgtaggcgtccatctgcgggtcagagcactggtactccttacagacttggttaacgaccagctgggagtcgcctaacaccaggaggcggcggatccccagtccagctgccactcttagtccggcaaggagtccctcgtattctgccatattattggtcgctcgaaagtcgaggcggaccaagtatctgaggacgtctccgctcggagaggtcaacgtgacccccgcaccggcgccctgaagagacagggagccgtcgaactgcatcacccagtgggcggtgtgaggcagctgcgaggggtccgcgctggcctcggggatcgagacgggctcgggagccggggtccactctgccacaaaatcggcgagggcctggctcttgatagcgtggcgtggttcaaagtgcaaatcgaactcagaaagttcgattgcccatttcaccacccgtcctgtaccctctcgattatgcaagatttgaccgagggggtaagacgtaactactgtgacccgatgcgcctggaaataatggcgcagtttcctcgaggccatcagaatagcgtaaagcatcttctgggcctgagggtatcgggttttggcgtcccggagggcctcactaacaaagtagacgggccgctgcacctttcggtggggccgatcctcttcgctaggggccgcatccctggggcactcttcgtccaagcagcctcgcggggcgcacttatcttctgtgctgatgacctcggggtcggaggataacaggggtggccttcccacagtggcttcggggccgtcctgggggtcgggggctcctggcgtcgtcggaaaagcgggcaaagggccaactccggtcgtcaggggccttaggcctccgttaggctcgggggcctcttcttcctgctctttcccgggtcgggtcagcacagggttagcctcggggtcgaagggcgataggtgcggccttcccacagtggcctcagggccttctgggggtcgggggctcctagcactgtctgacaagcgggcagagggccaactccggtcgtcaggggccttgggccaccgttcggctcgggagcctctcctccctgctctctcccgggccaagtcggcacagggtggggaagcgtgaaatgagaattgttctcatcgcgctccacaaccaatgccgcactaactacttgcggggtcgccgctaagtagagtaacaagggctcgtctggctccggggcgaccagaactgggggagagcttagatacgccttcaactgggtgagggcattttcggcttcctccatccaggtaaacggtccggagcgtttgagaagcttaaataagggtaacgccttctctcccagcctcgatatgaaccgacttagggcggccatgcaaccggtgacgcattgcacatccctaagtttgctggggggcgcatccgctctatagcccgtatcttctcagggttggcctcaatgcctcgggcagagaccaagaaccctagaagcttgcccgcaggtacaccgaacacacacttatcggggtttagttttatgcgggcggagcggagactctcaaaagtttccgctagatctgagagtaacatttcctggttgcgcgtctttacaaccaagtcatcgacataagcctcaacattacgtcctaattggttacccaaagaaattcgagtagtacgttgaaaagtaggacctgcattctttaacccgaagggcattgtcgtataacaataggttcctatgggggtaatgaacgcagttttttcctcatcctccctagccatgcgaatctgatggtaaccagagtatgcatctagaaaacacaaaaggtcgcaccccgcagtggagtcgacaatctgatctatgtgaggcagggggtaagaatccttaggacatgccttgttaaggtcggtgtagtcgatgcacatccgaagcttgccgttcgccttgggaacgaccaccgggttcgccagccactccggatggatgacctcacggatgaatccggcttccagaagtcgcgccacctcctcgcggatgaaggcttgacgttccagggcctgccgccgcactttctgccggaccggccttgcgcccggccgcacggtgagacggtgctcaatcacctccctggggaccccgggcatatccgccggtctccatgcgaagacgtcagcgtttgcccgcaggaaggagacgagcgcgtcttcctatttgccgtccagaagaccaccgatccgtgtggtcttggacgggccgtcgcccagggcaacctccttgaccgggacctcgtcgcctgtgatcatccgttgcctcggggtggcgggggcggaagcgccaagcctctcgtcgccaccctcgggcttggatgcagcggcgaggtggtccgcgcgctgctccagacaagcgagcgcgactttgaggtcgccatggacagagatggggccaccggggcccggcatcttcatctgtaggtaggcgtagtggaccgccgccatgaacttcaccaacgcgggcctccccaggaccgcgttgtagggcagactgaggtccgccacatcgaagttcacccgctccgtgcggaagttggcggatccaccgaaggtgaccggtaggtcgatgtgacctaacggccacgtgtgccccggcgtcacaccgataattggctgggacggccggagcaccatccccggggctttgatggcgtcaaaggccgcaggggaaaggatgttgagggccgctcccccatcaatgaggacacgccccaacttcacgttgcaaacggtgggagaaaccaccatcgtgatctgccctccccgggcaacgcacggtgggtggtcggtctggtcgaaggtgagggcaacctccgaccaccgcgcccgacacgtcgcctcatgagtaggggccgtggccagaagctctcgcttcatggccttgaagctccggcgagaaacgtgagcacacgctcccccatcgacggtggcaatggtggccccaggctcttggaaacctaggtcatcatcgccgtcatcgatgtcctcgtcgggggccttctgcttggcctcacttcgccgattaccggaaggaaccgccggggatttgccctctcggcgctcctgcctcctctcctcctcccacttcctcgtccgctcagccaaacttttgactgcacggcagtccgcaaggtcgtgaagggaagtgttgtggacggtgcaccacttgccggttgggcgctccctgttgggagcgccggcctcgttctttttgcctcccgcaggcctcccctttcgggtggcccgcgaagcgccctcgacggcgaggacatgaccctcgtcgtcggtatgggctgacctcttcttcctcctcctgtcacgccgccctatctgagcggcggatccgggggcggccgaagctgccacaccggaaccggaggggttccaggtccatgcctcctccttacgagccactcggtccgcgagctgaaaaagctccgcggtagtttggggctccttggaggcgatcttttcaagcatgcggttgtgccgcacaccccccctgaacgcgtaaatcaccgcgtgcgcagggatgcatggtatggtgttgcggacttgacagaaccgctgaatgtacaagcgaagtgactcatcatcccttcgctgtactgcgtgcaagtccgcttcctcacctgggcgcggatatgtgccttggaaagttcatggtgaactgttggcacaaatcctcccaagagtggacaaacgcgggtggcaagttcattagccaaccccgcgcttgtcctttcagggccatgggaaagaaattcgccatgaccctgtcgtcaccccgggcggcctcgatcccggtcgtgtagacctggagaaactcggcggggttgacgctcccgtcatatttttcggcgatggtgggccggaaccttgggggccaacggacattccgaaggctcgccacaaaggctctacagccgacaccaccaactgggggcacggagggctgatccccgcgtccgtggtgaggtgacactccggacgaggaggcgccctccgttgcgtggggagcacgtcggccattacgccggcgctcgatactgatgcgagcatccggttccccacgcagatcttcccgggtcggaggcgttgacgaaggagtggcggccgaatggcgaacagcggctgccgctcgccgcgccctccgtcttgacgatgcggagccggtggtagcagcaccagaggccttggtggcggaggaccgcccaccagcatctaggcgctgccgtgcagtcatgaccaatttggccacatcgtccagccaacgttgggctggagactccgggtcatgggcgacgggcgggtgacgtaggagcgcgcccgcagcttggagcgcgccctggggcgtgctgccgtcgccgtagacgaggaggcgacgctccccatctcgccgcccttctccacctcctgtgggtgtcgaagtcacggatccttcggccctctcgagcgccttctcccgcctaggactttggcgtggagggggcggtggagtacgagctcgacggcgtgggtttggctccccgtcgtcaccgctcatactcggggagaggtcgtgcgcctttgctggctcggccattgggctgaacaggaaaagcttggcgcacacgaaagagtgcgagagctcagaaaatccctcgcagagccccctacctggcgcgccagatgacggagcgtggggctcctcaccgggagaccgcgcaggcccccctttgccggttcggccgggggccctgggtgaggttctaagctcttggtctgtggaaagttcgcgagagtgaaatcacacaagacacgggcgatgtatacaggttcgggccgctgagaagcgtaataccctactcctgtgttttgggagatctgtgtatgaaggagctacaaagtatcagccagcctctcccttgttttgggtttctaatctggaaaagtccaatcccccctctcagtgggcaaggtcctccttttatatcttaaggggataccacatgcaccatttctctctttttttgtggggacttacccccccccttttcataaatggacggagatttgtatagttgccgtccgagtcaccttctgatgagacggcccacaactacctccactttcgccgggagcaggtgcgacgtggaatcgtggctgtctgctgacgacatgaccagtatcagactagtcacgtcggtcattcttgtccaccacgtgtcagcttagcaatctacatgctcgcccttcttcacacaacatcttgcctataatggtttaggatgaagcctggcatatatctgaccaggactaacgtgccatctctgggaggtaacacgctagctccagctggggacgagcgcctagaagccctcgtcctgacgggatggggcgaggcgtgcatcagatcgcctgtcgccacctaacccacgatctgaccggtctgtgactggtcacagaccggataaacgagtgcactgcactgcgttacatgcggcgtgacacgcttagccaaaccgcaataaatgtggttaggtggggccggctgtnctgacctaccccatacccggagcaaaaacccacaaggggtcggggcccctgggccggcggggccaaggggggtgcggcccaaccccctcggggggactaagaggagggcgaatgcatcaccctcgggcccgacgtccctcgggggtaccaggccacgtatgcgattgtgtctgcctcaaacctctagtcatgatactcctgatcccatgtcaccgacaacatgcatatagaagttaatatgaatgtggatgcatattaatatgttaagtcattcataacgtgtgtttcatatgaatgtagccaatactagaatgatttacattatgaaatagagggagctaataattaattaataatgtactaaaggattgctctattttccgtgtgtaccgttccggttatcaataccagcgcctcgccgcctacagagcgtctgggggaagccccccgtttcacccctttctcctcctcctcccccaaccccaaatcatatcatatatcccagccggagttgtattgacaatcgacactttttttttccaattttccttaaaaacacacacatgcatgcactgtaacaattattaaaattcttaataaaagtgcactggcatatgtgtttttttaggaaaacattggcatatatgttgactacggaagaagttcagatttgaaccctaacgcttgaagtcatgcaccatctaatatgatatcacatcagagatgttcaccgcatcatattaactttctgtggacgtatctcataatcactggtgctagcctccaaacaaagaacagaacgcacagcggagtgcaaaggggcccaccgaagatgaccaagtagacaagattggacttcaccaggtcgacggtgatggggaccccaatcttcgcgagcaccgtgatccccatcctcctctgcagcacgtacgcgcagatcagcatccgcaccacctccctgttcctgaacagcagcgtgccggtggtgaagacgcagacgcccaccgccgtggcgcgggacaccggggccagcaccaggtacaccccgagcgcgaaggccaccagcaagctcctcgtcgacttgcgcatccacgacagggagtgcttgaagtacctgtgccggatcttccagtccaccgccgccgtcccggcgtagatcaggctgaacgtggcgagcatggagcaggtgaaggccaccgtcacggcgtacatgaacgcgtcgaaggcgtacctccccgacagcgccggagagcccgcgacgacgacgacgttgccacggccattgttattattaccatcgccagccgcgtagccaccgggcggcgagaaagccgccgcgaacgcgacagtggcgacgaggacggagccgacgcccaggatctgcgtcgactccgtcattttcttggactcggcgatctcgtctagcttgggtacgtactgctgctggaagtgatcgcgccggatgttgccgctgagggctttcgctaccaccagggaccaaagtatccacgttcgtgcgttctgcatcaacaaattactaaattagatgcaaaatcatctctaattaaagggacttactatgtttcagttgattggttatatatgagttggtttagagactagagatgtctataacaagggtaattttaatatctctgagaaggtactaagaggtaccatatttctatggtaaatttaatacttctaggtattaagtaaggtactaaaattttgatatctcaactgtaaaattccccctatataacaattaaaaaagaaaaaaaaatatccaaatactcctctaaactttagatagaaatacttctacaccctaaactttaaaatcagatctttgcaaaaccattcatattactccctaaggtggttttgtatagttatttttatctaatttttatataaattggatgagtttgatcacatggcatacatattggacacacatgtgtgtgtatgtgtatgtatgtaggtacaatggtacatacgtatgtagacagctctattaaatggagaggcaagtaacattagaatttagaaattaccagtcaagcgaaagtgatttaccgttttgtagttaagcccagcgggaatggtacaccttgagaggtcagccggagtgaggccgtcgttgttggcaagatccaagcaaaccctgcgattccgcagcaggtagcagaacacgttgaggacaccgctcgcgaccgccaggtgcagcgcggtgttgccgtcgtcgtcctgcgcgttgaggatgggcgtcgccagctgagagccgtcccgcctccgcctgtcgtcggtggcgaatcccacgatctcctccctcccccggtcgacggcgacgtggaggaaggtcctc

SEQ ID NO: 24819 - DNA, 2147 bp, Oryza sativa
tactggtcatgtcgtcagcagacagccacgattccacgtcgcacctgctcccggcgaaagtggaggtagttgtgggccgtctcatcagaaggtgactcggacggcaactatacaaatctccgtccatttatgaaaagggggggtaagtccccacaaaaaaagagagaaatggtgcatgtggtatccccttaagatataaaaggaggaccttgcccactgagaggggggactggacttttccagattagaaacccaaaacaagggagaggctggctgatactttgtagctccttcatacacagatctcccaaaacacaggagtagggtattacgcttctcagcggcccgaacctgtatacatcgcccgtgtcttgtgtgatttcactctcgcgaactttccacagaccaagagcttagaacctcacccagggcccccggccaaaccggcaaaggggggcctgcgcggtctcccggtgaggagccccacgctccgtcacatgtggacaataataaaatgatttacattatgaaacggtggaagtattttttttttcaaaaatgaattaatttgatttttttaagcaacttttgtatagaaacttttttaaaaaaaacacaccgtttagcagttttaaaagcgtgcgcgtggaaaacgagggagatgggattgggaagggggggtgccgaacacacccttagtagcatcagagccacaaggtggacagtggtcccgtgctagtggtaggggcaaacgacccaactatatcgactagttaggatgacggtgaatccgaaagcgggcagccgcagagataggaaaatcagcggggcaagggcaccataccgccgcctgcttaaggaggagatgcgggaaagggtggaggtcggctaggagtagagatggcaatagagacccataacccgagacccgacaggtttttactctattagaagctaattgttctaactcttatacacatgggtctactaacgggcgaaaactcttatctattgggtacatggctatgggtccgttctttacccacccgtacccaccaacctgtgggtgaaaaaaaaccgttgattgagtcaaactatgagcaatataagtatcgatgactactaaatcatagcataaaactcatttcacatcttaagtattgttctagtctagttatatgaaattgttatttgatttcttgattatgtaatgtggttgtataattttttttcctcacctttgaacgctaatgttaattaatagtattgttgctaaagaaaatattgatggtttacaactctaatatggctaattatagtacaaaattataaatgctgcaagtcaattatatgggtatgggtatctatacccgttacccacacgggtgtgggtatagggacgattttgtatccacgatggatatggatatttaagtgagaatatttaaacatcacgggtgtgagtatggggcaagctaagagaacccgatggtatgcacccattgccatctctagttaggaggcctcgttgacatcattcgcgccttccggctagctggcggggccagattgacggtattggtggggcagattatggctagacgaggggagttagggtgtgtttagttgggaaaagaaaatttttgggtgtcacatcgaacgtttgaccggatgtcgaaaggggttttcggacacgaatgaaaaaactaatttcagaacttgcctggaaaccgcgagacgaatcttttaagactaattaaaccgtcattagcatatgtgagttactgtagcacttatagctaatcacggactaattaggcttaaaagattcgtctcgtgatttccttcataactgtgtaattagtttttctttttatctatatttaatacttcatgcatgtgtctaaagattcgatgtggtgtttttgagaaaaaattttgaagaactaaacgggcccttattacatggaacaaagaaatttgatggccaggcactggtgtcggcatcagagccacgaggtttggagtgggcaggagcagacgacctgactagttaggatgcagcagtagatctggaggcgaggagccgcaccgagacggggaagctggcctgaggaggagggcgggggttggggggggaggggggg

SEQ ID NO: 24820 - DNA, 19842 bp, Oryza sativa
  unsure (1)..(19842): unsure at all n locations
ttttttgttccatgtcactctcatcgttgagctgtcaatctgccccaccgccgctgtctatctagcctcaccagttagccggtangcacgcgaagggcgcccggaggaggccggctaggcctccttagcgcgccatccgcgtgcattccggctaactgttgaggctagattgacagcggcggtggggcagattgacagccaaacgatgagagtgacatggaacaaaaaaattcgtggcaaaatccaaaagatttctgaatggaatgcaatttatattaaaaaacctatgaattagatggcaaatagtgaaatttctcacctgatcatgacaccctgtttagaaatatgactatgtttagatgggactaaaacttttaagtccctatcatatcggatgtttggacactaattataaatattaaacgtagattattaataaaacatattcataatcttggactaatttgcgagacgaatctattgagcctaattaatccatgattagcctatgtgatgctacagtaaacattctctaattatggaataattagacttaaaaaatttatctcgcgaattagtttttatttatgtaattagttttgtatatgtaattagttttgtaagtagtctatatttaatactctaaattagtgtctaaatgtagagactaaaattaagtccctagatccaaacaccaccgtagacacgaatcaactaataccgtagcacacctagatgcagatgcacctagtcatattctctttctcaacacatatctgagcacctctgttggcgctaccctccaaaagagaattagaacgcacagcggagtgcagaagggtgcaccgaagatgatcaagtagacaatgttggagatgagcaggtcgatgccgatcggggctccaatcctgagcacgaccctgatccccatcctcctgcgcaccacgtgcgcgcagctcaccatcagcaccagctccctgttcctgaacagcatcgtgccggcggcgagggcgcagacgccggcggcggtggcgcgggacaccggagccagcaccaggtacacccccagcgcgaaggccaccagcaggctcctcatcgacaagcgcatccaccacacggaattcttgaagtacctgtgccggacattcatctccaccgccgccgtgccggcgtacatcaggctgagcgtggcgagcatggagcaggtgaaggccagcgccacggcgtacatgaacgcgtcgaaggcgtaccgccccgccagcgccggcgcgccggctgcgacgtagcctcccgggggggagaaggccacggcgaaagccacggtggcgacgagcacggagccgacgcccaggacctgggccgactccgtcattttcttggactcggcgctctcgtcgagcttgggtacgtgccgctgcaggaagtgatcgcgcctgatgtttccgccgctgagggcgttggctattgttagacaccaaagtatccacgttcgcgcgttctgcagcaacacgagcaaagttttacccaattttgattagcttaacgatgtagttctctccttccggtgctaaataatatttgacgctcttttaagattcgattaaactacttttaaaactttggacatcagtttcatacaccaacaaatttataaaatctagagtataattcataaaatccctgtatatttggtctaaattgtacgaaaccgtatgagttttatactgtgttgcgcataacagcatgtattatggtgctatagtttcatacacttttttctaatctactatgcatatgaattttatgggttcgtttatccatcaaagttaattatattttattgtgctataatattaatagttaagttagttgacggtgtggttttctaagaactagtttaaattctagatttgataaaggggctcgtatttaccgctatttatttttttagtggtaggtggcgtttccatcaatagagaggacttcatcaatctcaagatataccgactcagtcctgaagatgctcacaaaaatagtgtgtgcgcgtgctatgggtgcctatgttcgttccatgtttctaacaaaaatacaatactacaagtatattcgtactatttttttttcaaaatgcagatttacatgatttgatataaaatagtttaattgttgtgaatttatttttaaaagaaaaacattattaaaaagggcctgatctaagggcacgtacaaacgtgtataatagcggtctctctttattgccatgtaagtaaatttgataacgtggaagagagagaggagagaaaaaaaaagcatggttgctatacatgacaacaggtaagagtcaactcttaacttttattaaagaaaattttgttgtatgagggtggagaaaagaaaagaagggtagtaaaaaaatattttggtacgttaatgattaagagttcttgttgtctcaactattgtaacagtatattctttaaataatatgtcttacttaaaagaccatatcggacactatttttgtacatgccctagtgaggtaaaagtgatgtaccgttctgttggagtaaagacccgctggaatggtactcctggccaggtcagccggtgtgaggccgtcgttgttggcaagatccaagcaaaccctgcgattccgaaacaagcaccagaacactctcagcaccccggccacgaccgccaggtgcagcgcggtgttgccgtcgtcgtcccgcgcgttgaggatcgccgccgccggaaaccccgtccatcgacgtcggaggcgaatcccacgacctcctgcctcctccggtcgacggcgacgtggaggaaggtcctcccgcgggcgtcgcggaggccggcgcactcggggcacttgtcgagcaagagggcgacgagcctcaggttgccggcggacgcggcgacgtggatggggtagtcgccgtcgccgtccggctggcaggccaaggacgggtcggtctccaggagaagttcggttggtgtccggcggcattggaacgggcacggcaagaggagccaccggaggagtgagctgttctcgatgtcgatctttggtccgtccgccgaggcggcgaagtggagcgctgtgctgccggacgcgtcggcttcgccggagagcccggcgttccattgcattatcttttctgtcatttcttcaatttatggagaaaagcgtgagaaaaactattactccctccgtcccaaaataagtgcagttttatactattcacattcaatgtttgatcgttcgtcttatttcaaaattttttatgattagtatttttattgctattagatgataaaatatgaatagtactttatatgtgactaaatatttttaattttttcataaattttttaaataagacgaacggtcaaacgttagacacgaatatccatggctgcacttattttgggacggatgtagtattaaggtactactgctaccgtgctctctatgagatgatatgatgttaaaattaattacaggagcagttaatttactactagtctctaacccgtacattgcacaagttacgtttggatatttctttaagtgggaaatctaaatggagagcattcttgattttgtcttatggcacgacgctccgccagccatccatccgcgtcttcatgttgtcggagagataggcttgcttccattgcaatggcatcaaagcgaggaaccttcgtggcgtcaggtatcgctatacaccaccaaccatcgaaactaaatattggttacacgagtctattctttttctaatgatgacttatatattttaaatcatatattattttcatttttgtttgtaccatcgtgctctactcaaaatatacgataaaacaaatttaatatttaatatattcaaacatttaaagtaatttacttaatttcaaaagtaatttagtaaaatcgtagaagtaacttagctctgcaatagaggtaactatctaagcattgaaagttgttatattgatcaatcaattgatgttgactgagacacggacacgtaaatattatattgacgaagagtcaaagaaatgagaccacttgacaggaaaagaggacaacatactatctgctagttatcatgtcgattcacgtgcatgctactgaggctaacatgtcattacactagtataatgtttttttatagaatctttgatgacctatatatttttagaccttatattacttttaagatccattttgctcaaaatatgtgataaaatgagtctaatattgagtatatttaaattatttatttattttcttaactcctttagaagtgtagttacttccaataatgtgcactatgtagtcgtgtccttttcaaatgtattgctagattttaagctcttgaaaatacaaatttccagtcacctaaaattcaagccctctacaaatcgagcgtctgatttcctaaaaaaaaaaaatcagacggtctaacgtttcaattgaccgatgactgaaatgttgagtagtacatggtgaaacatttaagaatttgtgaagcatagtaagaacacatgttgaaataggtcgctattacgtatgaaacaatgtgttttattggtttgaaacatattttttattaaaatataatcatgcgatatcttgttataaagatttaattataatgaatattatattatgtttggattatatattggataagtaatttagttgaaaaatatttcaaagattgctacaagcctatatgcatgaatggaatgaagagagagcaagtatatggtagaagagagagtaggggtagttatgtccgatactttaccagccacatctgaaacgtcatgctatacaaggtgaaaaaaaagacattgaaatatttatttttcatgtgtaatacattaaaaatatatgttgaaacatgtcgcattacgtatgaaacatttagtattaacggttataaacatatgattatattttagcaaaataatcatgtgatctcttattataaaaaaaattaattgtaacaaatataatagtacgatcggatcgaaaatccgataagtaatttaggaggaaaaaaattttgaagatagccacatgtatacatatatggataaagtggtgaaaaagcaaagtagtatactaatatggcagccatatagtagcttagttgcgcccgattttctttcctccaatcgggttaccgataggaatcattctcatctaaaattgcatatactcttaagcctaaaattatggtggcacgtgcggaacattatttctttttaactatagttttattgttatattttttttcctattttcttgtctaagtttgaatgttttttttaaaaaattgtatttttttgaaattgtaagttcatgtaatgcaattttgtaatttttggagtatgccttgtttaagtaagtaatagtggagtgatgagaagaattacatcgaaaactcactttgattattcgaaagagtgtaggtcaattttttatgctacaaggcaagaccacctatctaaatataaggctaaagccaaattatttttcgtcatttattgatctcttcgacggaagagggtgtcctaaggcgcactaacgtgtgctttgccctgtcataccagaacttctgaatcacttaccaagacttctggtattcctgtagtggcacgtcattaggtatcgttgagggttgcaaacgtagtgctagatgtgttttgggatggacacatttttatgtcaacaatagggaaacacatggagtcatggttgtataatttgacttatcatggagccgaccacctatattagaacgcctatagaaatacaatatttatagaaactgttgtcttaacttggctgcacgtagaacaggtgcctgcatatgagccccccccccccccccccaaccaaaagtatagaagcagattttataatgcactatatcaagtaaaatgagagagtgtcttctaaaatcgttttatatagtgtaaatcatgttaatcacacttcacacgtgcacatacgtttttaatatgactttagtgaagccaagaggcacgccaaagtcaacctcttggcttgagcttatgccaagaggtgcatttgtcgatgtgcttctgtttctttgatcgtgcctcatcagagtgtatttgtcgatgtatacgtgtgggtctttcatatgatctaaattgatcgtgcggagaaaatgttttcatccctaaatagttataaaaaacaataagatagccaagtatgaaatatattactttacaaatatgtaaataaaaaaatcaacttttgaaaattataaagaaacaaatataaccaggaatgtgtgttaactatttaagttgaatttgtttcttttggtattagttgtaagagtccaatttgatattacgagtgacatagttcatatcaatctatgttaatatatgctgttaatttttttaagaaaaataataactatttagatgatatataagaaatatatcccatcgagaaatgaaaaaaaaatcaatcttcacttgtaggcacgtacctgcgccgcgtaggacagcagcgtgcagggcagtttggccggccggtccagaatacgagagctcgtcgcccccttgctgatgcaggagctccgcgatgcggtcgtgccccagtgagatcgcctggtacaacggcgacatcccgtcgccgccggggagacaggcgagccgcggatgcacggccatcaggtggccgacgaggcgctcgtcgccgagcctgacggcgtcgtgcagggccgtctcacgccggccgttctgcttctccagcacgtcggccaccctgaacctcgcgccgccgggctcctcgtcctcctccatcgccatgtcgaggaggcacctgaccatcgccgcgttccccgccctggcggcgcagtgcagcggcgtgtcgcccctcgcgttggcgcgatccaggagggccatggcgctgcggtagatggtgcgcgcgcagctcaggaacgcttcgctgtcgccggaggccgccacgacgtgcagcgcggagtctccctgcggcgtcgtcgccacgtccaggagcagcgccgccgcggtgggtggctgtggctccccggccgcggcgacgtggacggtgacgtggtttggcgccggagcggcccccagaagtacagcctccagccactcgcggtggccgccgcgtgcggctctgagcagcctgcgatccatcgatacggggtctgaatcaaatgatgattaggatagaacattatattgcagagtggctgtgatctagacccgtttggtatgttgcgattacttataattaacatgtcagagatacttagtcagatgctttaaacaacatacgagacttgctggaagcggctagcactagcacacggtcatgcgtgcaaaaaccatggacgtacgaaccagcggatcagatcaccttgtcttgcattgcatcccgtgtgccgggtgtgaccggccggtggcagagccagcatcgccatcaagtctgtgtgactgtgtgtgtacgactataaccttcttctcttttagatatattaacatgttatttatagtaataagtttgaatttataatgataattacaatgtaaataagtgtgtgtacgacatcattaatttcacaagaagtgtagctataaagtgctatatatctaagccgtaatatatggtaatgatattatacttcaaatttatttatttatgtttttttgtaaaatcataggaccctaaaccctgcacatacatttaaattaggggaacgaaagatctaaatgaggattatgctgaaagagacttggaaatgggcatgagcctaaattaaccaaacaactcgtatgaggagcaaataaaaaattaaggcgtgactcaaggagagatggtacactgaaaagaaattttttgatgcaaacaaaaggtaaattagaaagcttaaggtattgcgttcttcattgatggaaatattacagatttcatggatgccaaactcaataagttttgtattttgatcgtgatgcgaagccaggaaagaactcaagaacgttcagctgataatgcaaagttcttctgttgaacactgccactactacagatttgattttttcgtacgatcaaaatagattttctcatacggagatcccacccgtttatattcagatgtttgcgaaaatcaacatttgcccctcggaggggtgagggggaaccgcaacgcggcaaagccacggtctccacaacgcggccacggcgttctcccgcatgccgcacgccctcaagttgtcagagagctattaggccatttacaatgcaaagacgtggagttcagcctccacatgctagctcggagattcctctccacctaggcacttttcactccctcactaggaacggggagccaaagtaagcattagaataactaacagccacgattcatcaccgttattagatcagcataaaccaaacaaaacaagcagatgtgatgcgaccgaggcagctttattcaacttgtccagaaccacttctctaccgactatcacttttgcatgggtaaaattaactaggtaccacgggttgattgtacagtatttctcaatgggacagacatgccgaaacatcaactatttcccccactctcactactctccatctcaccgtctttcagaaccttggcaaaatctggcgttggagctgtcaaacatgttagccgtcaggtcccgtctcctccatgtctacagccacaagcatccatgccctctcctactcactgcacatcaataacagtttaagaatagtaatattgtggtgaaaaggatgctcactgctcaggcgatcagtgtacaaaccttgtttagagctcatccttgagaggctcggctggggccgactctgccttctccttcgcctgaccagcggtttccttgttcttcttaatgaagtcgacgatctcgtcggctgtcctgccgctttcatagggaaccatctttccactgggggtgacgaagtacagggtggggtaaccttgcacatcgaactcgcttggcacatcgttcgcagttgcatcctgcatacaaggtagcaaaatagtagttagatgaactgtacttgtgataggaaagaatggatgaataatgcactcaaaactaatggcaccacccagatagaaaggaaattaccatcttagcgatgacaacatccttgtcgcttttaagcgtcgtagctgcctcatccaagattggagccagcttcttgcagtgtccgcaccatggtgcatagaattcaacaaggactgaaacagaaaacagcaaataaatgagagctgcaaatcaaatagaggctttgccagcactgataattgaagaagctacaaaaaaatagcaaacttgcttttgaccagggaggaatcagtcgctcacaatactaatataagaactaaaaatcatctcactgaaaagattacgggggacaacagtatgtaccgtttttgccagacttgaagacaaaatcatggacgttatcagcgaccacaaccttaacaggctcgtcgttgacctcaggaataggttcagacttcctgaatggagacaatttaccatcctaaaaatagaggttttgtgagcattgtgcaggtaaacaaatatcctaaaattacataaatagtaacaaataatcacaattatattttacaagtataaaagactacttacaaagtattccttcaaccaagaaacaatttggtcaggctcaacgtgtgccttcaaaaatttcttggactcaccatcctggatgatgatgagtggtacctgatcctccctcagcccaaagtactgtacagtgacagatttaaagttagcatcaagtacattaataattgtttgaaaaaaattataagaaagtgaggtaacaaacctggaaggcaccttgactggcctcaatgtcaccaatgaggaacttaatttccttgtccttgaactcctcagcagcaccataataaactgacttgaaagactcaaacggtccagtggagaagttcaaaaatagcatagcctgcatataatttggtaacgtttagtgtcagtcatcaacaactgcaaattactggcataatgatatacggagtattaaagaacaatatttgaatcactgcgtttaatagtgagaacttgcaaatatatgaatggagaagggtatcagatattacagtctaagcaaagtctatttgaaacacgagaaataaacatttaaattgactattaatatacagtatcaatcaactactgccagctgttattaaaagaatggagcttttcagagagcaaggaatgccaagcgcttaccttggcagctgagctttggaaaaatttcagaaggtaaggatggttgtcagggttcttgtcaaaagtaacaactttaggggtgctgctagcatcaatgaacttctccaaagcagtaacatcaaaatcctgaagagatatgcaaacaacacattattgacaattaaccaaaataatgccagccaataaaggctgtgacaagttgtaggaaacatagtggccaaatgaatagttaaaacaatgaagtttgatatttgaggagttatataccttgctgtcaacaacaagctcatcaaagggcttgaatagcctaaccaatggtctctcaactgcagcatcaccgcgtggaaggtggttggcatgcaaggtgtggccaaagtcataatcagatctcagcttctcagcaacctctatgaagtttgtatactcagtgccacttaattctgagaagattccaacctatttcaattgctcattcaagtcagcagtcaattttaaagcatgaacagtcggaacagaaaatataagttggagaatgtgtcatattgaatcgaggtcttacaatgtagattttcttgtcatcaataaggttggttgcgtcttctggtgacttgatctccttggaagcaggaccaacctgcttcttcaagtattcaacaatgccctcagcctccctcgggcccttgtattcctgaatgttcttgccctggttcctgaatatcttgagtgtcgggaaaccctggatctcatacttggtagcaagaggcttgttcttctcgtcgttggcatcaaccttggcaagaacaatcggtggatcgtgcttgcttagctcttgtgcagctttctcatactgaaacagatcaagcaaagaaaattaatacatgggatcaaaccatttaatccaaaatgtgaaaatgtgctgttaaggaagtgatccaactgtacagaagcatacctctggagcgagcttcttgcagtgtccacacctgcgaatagggtttatccaattagacacatttagaacaagcattggttaaattttgattcagataacacaatagcacgatgcacaagcataatttcataaagaatcaacattgaagtacaaaaacaaaataatagtgaataattgaaccaagactacaaagctatctggatttaaaacctgtgtaagtgaaagaacacccgaaattctcagttgcaaccctgatacagacaccttataactcgaaaaaccaagtaaccaactcactcaatctaaaccactgaaatctgactaggagaccaggcatacacatcacaaacaaggtaaatctactacaatttacagaatcggctcatccgcagtcacaggtccacgcacaatcgaatcggcgaatcctatccgaatctaagactggatcaccaagatcgagaccaacaaacgcatcaattcggcaaacaccgagcctcacacgcatcgccagcttccccaattcccgcatctgaactgaagtcctaaaccctccccaaacctcgcgatctaaatcccccccccccccaaaaacccacctcgcgagatctaacccaacacgcacagctcatcaacaggggggccgtagcagagcagagcagagcacactcaccacggggcgtagaactcgacgaccatgaacgggtgcttggcgacggcctcatcgaagccgtccgcgtcaagcgtcagcacggcctccgccgccgcatcgcccccctcctccgcagccgccgcctcctccgccctcgccgccggcgccgacagcaccacggcgagcgcgagcagcagcgagatccaagccttcgagatcgccatgaggaggagacggagagtgtgggtggctttcggaatttttccctgagacgacacgcttctcacacgggttttaatagggcggagtacgcgaggggggggtttaccggatcacgtggaccaagtccacatcgaccctgaaactgcccaccgggccccaccccgcggactccctcgtggacgcggcgcaccggagtcacgagatatttacaggtaacatttgcgatgaaccccctgtacttatcatcgtcaaatcatccctccacgaggctgagatgtgctaaaactagaggtaataaattactaatatgcccctgatgaggagtgatgtgtaattaagtggaattaggggggcgaaagtggggtggtcccgagggataaatccaatcctgtgacttcaaaaaaggcaggggaattaacgacggccaacgccacgtcaccgcgcgccccgactacgtacacgtacctgtacagccctcggccaatgggagggcgccacgtcagctctatgacatgtcccggagccctgatttgctccgcgcccccaccagcgccacgcaacgcacacgcttccaaaatccggatccgggtaaattaggcggcgtttttactgctctcggatacgataaaagctgtgtagtaaaataattctaatattggcctcgtgtcgcgcgtgattgctgacgcggcgctggatcgagctcgtttgcgttgcggcagtggtgacgtggcactgttgaactccgccacgtttcaccgggtggtcccgatcggatggctactgtttttctttttctttttttcaaatcgatgactgttttttttgctgcgacttattttaaacttgtcgatcacgagaatgtgttcacgttcacggtcatatagataagagacacattttattgtttcgagagacatttatagtcacagatggcagatccggcgatgggcgaatttatttcgcatcccacctcaaaattttacaccatatcacatcaaacgtttaaacacatatgtccacgagtgatactcgtagaccgaatatagagggtattggggtacgttggtacaaggatctacgtaatacgacatcaagcaaacagagaacgaggattatactggttcagaccccttgatagataatagccctaatccagttgatatgggattatatgatggaaaagacaggttataaagggaacgatggaactcgatgaaaccgacgggatcgtaatcgagttggttcgactagatctcccggcgatttggctcctgcaggctccgacttcgtaggctgtgggggttgtgttggctccgagattcgatgccttaggtcctccagggggtcccttttatatcgcaggtcaggcggtttccaagtagaactcggagacatcggaccctacacgatacattgacgacccagtctgtccgagtaggattctttccatctgtaaactccgtgaaggatttacttagttatgcgcagaatgtccatatacgcgcagacatgccatatcgatatgtgacgtatatcgaagggtaaagggtatacctaacccgtaaccttgacagtagcccccgacttctgcttaaatgaactcgtgtaaccaatcgcgacttctggtgtcgaggctgttgttgttctcggtgtgagaactgtggagacaggacatagccgagaacaccatgtgaagcccaacggtcatgagcgaatttaaactgaagtgagaaagactgccgcgcgtaacggaccaagaaatttccggcggtcatctctctcctttccttgaaatttgcaccgtcggaagtgcgtttatttaagagagttttggggatccattttgaagtctgcctgttgtgaagaaaccctccaacctccaagcgcttctcgtcttttccgctcccgcaaaaccctagctcatcaatctcagtcctttctccggcgatctccagtcagcgatggatctcggcaagtcctcctccaccagcgcgtcgctgaataagctacaggaggatggcgcccctcccggtcgtgggaccatggagagagaagaaggaggtactgaaccccagcttgtcctaggtcgcatggttgcgatcgaggactacattctctgcggttttctccctccgccttctgaatttcttctcttggttttgaacttctacggtctttctttgctccatttgaaccccaattctattgccttccttagtatttttttgcatctttgtgaggcctacattggggtagagccttttcttgatctctttcgcttctactacgagttgcgttggatgtagtccaacagggtatctggatgcgtcggattccgactccgggatggcctgaagtcgcgttatatccccttccagtgcccttcctctcatagcaaatggcggacgaggtggttctatcttcagatagaaaattcggatcctgtctttgttgttcctgaggaacaaccagacaagatttcgtcttggaccgcaaagcccaccttgaccccttcccttcagtccttcatcgatgttatcgacgatctccgagtacgaggtttgtcggggtatgaagtcgctgctgacttcgttggtagacggatccagtcgctccaggctcgagcccatctagcctttgactattctggaccggaggacacgacccaggtttctcctcggggtatctttcttgcatttaccctgacttgcttgtgtgcgcgttcctcctgacttatcgaactttggttctcgattcacaggtctgagcagcgaagccgtgggacgtcgtgtcggccaggtgatgatcagtggcccaacgatggcgagcaatgtccccgttctcctttgcgagaagggggcggccgaacgcgacgctgccatcaatgtaagtgtactcagtaggccttctgtgtttttcttccgggatcgccttatgacttcataaagcgtaggctctccctctgactgatatcatcgggccgctcatggaccatcaggtggcggtgtcactaaaagagaaggtcgccaaggaggcgtccgatgctgctgctgtcgctgccacaacaagtggtggcgacgttccaaaaaaggggaggaaattctcctctgtaatcggacatcgtcgaaaggcacctaccccctcggtaagttctcctgtcatttgatcacgtagtcagaatacttccaccccacatcatatcgattgtactccaagccttggacgcgtctcccctgcctccacgacggcagcggcttgtgacactcggcgagaagtgagtgaatgaatttgaggtttcgtgatttcgtcgaactttgtctgaaccacagccttcttgtagggcggcgcgggccaaggcggcgcaggacgggtctggagggacttccagcgcgtctcctgctgtagcctcgacggatgtcgtggtcgtgcccgggagccacgaggcgacaccaagcggcccagccagcgatctcgtggctggtcatggttcgccggctgccgtcctcacctgggaggagctccaggttgagatgtggcgcctcctcgaggctggtgctcgcggcattggccgcgagatcatggaggtgagagcggcggcggcgtcgtcgtcggcgaacgagcgcgccgaccggctggcacacgacttggcggaggctcgtgaggacctcaagaagatgaggaaactggtggccgggaatgagcgacaacggcaggggctcgagcaccgtatgtcggagctcgagaacaacttatcggaaatccgtggctcgttgcgggtcacctatactggtctgcaccagctcgccggggaatgcggtatcaagtctaccatccccgcgaatcccaatgagttctcgctgacgtcttctcttgcggagctggcggcggcgatggaggagattccctccaagcatgcggccaggatcggagaggagacgtccaacgggaactacaccggggcatgccacgtccttgcgtgtgtgaggctggcgcaccctgaactcgatctgcgggagatcttggaatagggggcggctagcgacgcgcataaggatgtgatggaagaagtcggtgatctgggggagtctgttctccccctttttgaagagtaggattttgactctcttgtactccttagacatgctgtataaaactccaattggctccaaccgcctttgtgcgtgcagtcatcaccttagtttgctttagcattttgatcttgagtactttttttgtcccttgtagagatgttgatgtcgaggatgtccagcagcgtgggcagcctgagtcgccagcgatcattccggctcttgcgtttgagccacacgcgtcgccggacgatgtagatcagattttacccgcgagaatggggatggcgatgacttccttaggttagtggtctcttcatccctttttgctcctccgacttgatcaaccgtgttctcgaaagaggagtgcagcttgacttagtcgtttccatattgaacagatctcgagagtgcgcttgctggcaagatcgtcgtatccaatattggaagatgaaatttgaagtagcggagctcgagagaactatgctggaagtaaagaaagagcaagctgtggaaacgctttgaggttgtgaggtatggttcaacttgtacttgaagagttgctgcacgtccatggccaaggtttgtagagagctccgagtaccccgtggagatcctgaggagtcggcggccggatacatatcgtggatgaatggggcgtgtactcagctcgaaggcgtcggcaaacgcattgacgaagccttgaagcaggaatgtcgtcgatcgagccgatatgccggagggcacgtgttggcttgcctacgagatcatcgtccgcgacaggacctcgagtttctccatgaaggttttgctcgttctcggagaactacggcggagatagaccacctggcaaagtcgatggcgccgttggcggagaaggtcttctagtctatggactggagttggccttcttggtagtctttgtaccctgtgatggatatcttagggaaaagtgtaatatagctttgaacttgtgtaaaattgtaaggggtattttgtgaaatagaaaagaaatctatcttaacaaatccttcttactctggatatcgtgtgtaagggtgtgttctcagttcacgactttagttagtcgtttgagtcgtacactctctctagcccccagccttgtcatcggaggatttttctcggaggataagcctcttggacctttgacctgccttggttgaataagcactgatcctagcccccagccgtgaagttggaaagtgaatttccgattacgcggcttggttaatacgcacggcgagaactcttacacgaccaggtcttacatggtctttcgtctctacaggatctgacaaggccttatcggctctgggcgtccccagtagaagatcccttaggttcatcggaggccttctcaagatgacgtaaagggacatggggataggtttcaacgctaggtgtcatcttgttaacaaccaaatttggtaacatcggcatcaggaaagaagattagatcgaagcaaagtcggaggcagagattgagttcggaaacaaagcaggaatcggctggagtccaaatcggatgcgattggcatcggctaggtctgagtcggactaggtaagccgatacagccgattccgacaatgcagcttgatgtatgatatcgggttggattgaggtgcttcaaggtgattgccgcacatggatagagtcctgagaagtcaattgtatctattaattagggtgttttatgtaatctccttagagatacgattgggcaaaagtctgccgcaaagacttgtggtatcctagagtttgataagatagtagtcgtgtctgttatggacatatcttgtgattctcgggtataaatagacccgagccctatgtaacttttaacacacacacacgttcaatacaatttcggcgcatcgccacccttttgctttagttttgtttcgatgagttcttgctttcaggttgagctgcatcggtttcgatcttcaacgagaggtaaaacttgttatgacggcttgtattctcgggattagtgcttccatctttatgacactctgatctcgtttatgtaattcatcgagttatcatatatcttacataatctccggcaataccgctatctaatctacaatcggctaacatctgtctgtagagggtagccgattaggttagatatcgatgttgacttagattatataaggtatccaccactctatgaaacttccagcgacttgattgtctagatattgttcttcttttcatacttaatgttgcatcagtcgagtttgatctattaagtcgtgcttagaatatcaatctctaacatgccttctggttgccaattagggtagcatcggagtttcagccgatcttatctgatctaactatatttgctctatatgcttcattgacatattaaatctgtcctttatgtcaagatattgctgtatctaagtatattagtcctttgtttaatatattatgtctgttttaatatcctgatatagagtagtattggagtattagccgatacatgctagatctatctgatcggctatgctataaacatatatagccctgttattaatatatatttcgatctaagtgatttatactgtctcggcatggcgaccgatctatcccaatcactcgatttaagtatatatcgatataagaactatatattggaaatatctacagccgatcgaatagatttagttctttattgtctatttacaactgccgatcgattcacatatgacatcggctcaaagataaatgttatgtcatcggcacctagccgatcggctatcatttatagatttaaccacggtttctttgcctttatttcttgttgattacgggatcaaatcaactggcacgctagtacacccgaaggcgagctttggacctacactggagttaagcagatctcccaggcctcgtgttttctgtcaacacatctgggtaagggatcatcgggtaggaacactttgattgtaatatgcgcctaaaaataggctccattgatactgtaaggtgtcttacaggtgtggatgacattgactcatacatagaatttacgtagttggtcaatattccaagagtttgccaactcgcgaccatcaccgtctgcaatttttaatgcgcctggccgcaaaacttgtgtgatcgtgtaaggtccttcccatttgggtgagagcttgtttcgccctacttggcattgaacccgtcggaggacatagtcgccgattgaaagtatgcgtgctcggatgcgctcctcgtggtagcggcggagagcctgttggtaactggctactcggacggcaactcgttcgcgatgttcctcgagtagattcacatcgacgtttcgctattcctcctgatcctcgtcggaatacttctgtactcgtgtactctgatgtcgtagctcgctggggagcatggcctcggagccgtacatgaggaagaagggtgtttccttgttagacgttgtcggtgtggtgcgtacggcccatagtactgatgggagttcttcgacccattttttgtcatgtgacatgaatctgttgtagacgcgggtcttgatccc

SEQ ID NO: 24821 - DNA, 7597 bp, Oryza sativa
tgcggttatcagtctgaatggcatcttaacatagcaaaacaccccgaacggcgtgatgaatgctgtcttctctccgtcctctttcgccatgctgattcggtggtagccagagtaagcgtcgaggaagctcaacagctcacagccggctgttgagtccaccagttgatctattcgaggaagagggaagtgatctttgggacacgccttgttgaggtcggtgaaatcgacgcacattctccatttctcgttggccttccgcaccatgactggattggctagccactctggatgaagtacctctctgatgaagccagctttgagaagtttgtcgagctcttctcgtatggcttgtttttggtctggtgcaaatcttcgcagtttttgctttactggcttggcatcgggtcgcaccatgagtttgtgctcaatcacctccctggggaccctcggcatgtcggacggttgccaagcgaacacgtcagcattgtcgcggaggaaggtgatgagcacgaattcctatttctcgcttagtgttgccccgatcttgacggtcttgtcagggttggcactagagagtggaacggtcttgatcgcgccgtccggtttcggcgtcttgtttgtcttgctcactttcttgggtggctcagttgtggcgggtgggctgggcatttgctcgaccatgtcgaggctccacttgtcgcattgtaccgccagctttgtgttcccttgaatagtgattgttcccttcggtcccggcatcttgagcacttgatacgcgtagtgggatgtggccatgaacttcgcaagtgcagttctcccgatgatggcattatacgctgtatcgaattcagcgacatcaaaggtgatctgctccattcggaagttgtttgcttggccgaaagtcacaggcaacgtaattttgcccaatggtttggacgaggattggggagtaattccatggaaggattgatcggtgggtgtcaactcgcttcgcgaaattcccatcgcgtccaaagcactggcgaagagaaggttgattgagctaccaccgtcgatgagaacccacgcaaccttgatgttccgaatagtgggttcgaccacgatcggatagcgtcctgggatgacggcagtcttgggatggtcttcttctgaaaattctatcttctgttcagaccacttcatcttgtgtgcagccccctgccatgtcgaacagacttcacgttccactttcttgtattctcgctttgaggagtacgctgtggaacctccgaaaatgtgtgaaacgtggaggttagagtctggatatgctgtgtccgattcctgaggagccacctccgcatccttctcgaccacgcgtactcgcttgcctttttcaaatgccatgtgcttctcgagcgactttttgaaaacaaggcaatcttccaaagaatgtctgtctatcttgtgtatggggcaccatgctttcttcgtgtcgctaccttgtgggtctgggcgcttgggagggttcgcgtattctgctgcgagaacttccgcttgagctttcattttcccacttttgcgatttttcttcttgcttgactcaggtgcgtccgtggctggtttcttctctcccccggtcttcggcttatcgttcttgcgtctcagtgcatcatctgcgtgggcgcatcgctcaacaatctcgaacaatctccgagtagttgtgatgcgtcttgcacaactcctgggtagtatagcgatctctgacaccagacttgaaggcgcaaattacagaagcatcggtgatttcggggattgtatttctgcactcgttgaagcgccgaacatattccctcaaggattcacccgagttctgtgtcaacgcatgtaggtcgtcttcgatcgcgtggcgcttgtaagttccttggaagttggcaatgaactgctggcacaggtctgcacacgaagagatcgagtagggcgggagatgcatcagccatgaacgtgcagagccttttaacgcagttggtaaataattcgccaatgcattgtcgtctgctctggcggcgtagagtactgtggagtagacttgaaggaactcttctgggtcggtgctcccatcgtacttctctattgctccgggtcggaatctctcaggccattggacatcacgcagggaacgactgaaagctctacacccagcgctgggggcggtgggttgtcggcgatcgtgtgtccttcatggatgtctgtctgatgatgaggatgaagaagaagacgacgatgacgatggatcgcttggttccggtgtaggattacgaggacgtcggctaggttctcgagaatcctttcgccgccctcggttgttgtcccggcgtcgatctccgtcgtcctcgtcattatggcggtgtccttgaccagtgtcaccctgcgtccgcctctcgcaatcatcgtgatcgtggcgatcgtggcgattaacacggtctcggtcttcgctcgagcggccctcccgtctttcattatcgcgatgtcgtgaagagacgcgatgccgggagcgatccccgttgtctcgtgtgcgtcgtgcctctcagcggccattgaggtggtcacggagatcgccggtgccgcgaggtggaggggtagctcgatggggtgactcccactattcgggattttcgccattggcaccgccagttggtggctattccgggtgtgctgcatcagcggcttcttcgaacgcgttgctgaggttggttactgattcccgtagctgttctgtccactgtgcgagatcatcgtttagaacgggatcgtaaggggtctccctcagtattgcgttgatggtcctgatgtgctaggccggtgtagccacttgattttgtgcttccgcattagcgtgtgctgacgtgctggtcccgtcgatagctaatacctcgcgcggcgtactcgctttgatgagccatagtcctcgagtagatgcaggactgatggttcgggtgaactgatgtcgattatgccaacgaatcgatctgaaaccagcgtcgttccttgttccttgtcttcatctctaagggatatgcctaactgctggaccttaggggatgacgtcatcgtggcgctgagaaagaccttgcagcttgagaggtcgtgattctttgtcttgtgaataggacaatagacatcacaggttggagaaatacgctgaattccacgctctttgcaggcgcgaatttcggcgcggacgttgagaaaaacccaacaggcgtgcaaagtgtgtttcctggttttgtggataggacaccaggaccttgtcgcttcggaagttattctcgtcggctcgtggctcttgtctgaacgacaaggtttggccgcattagaatccttctcgagctcggatgtcgtcaatgttctgttctccgcttcggcgggaggatccttcgacagggagtcgtcctgggttgtatccactgcgttctcatttccggtcattgatggaccagctgagatcggcatcgtggtataaaccgggaagacgatttcgccgacttgagtccacaccagcattgttgaagtaggaaatccctggtggaggttggtgttgacgccgttgtcaacgaaactggatgacatagtagtagaaccttgagcaccaagtccccctacctggcgcgccactgtcgacgagtgatacccgtagaccggatatagagggtattggggtacgttggtacaaggatctatgtaatacgacatcaagcaaacagagaacgaggattatactggttcaggccccttgataggtaatagccctaatccagttgatatgagattatatgatggaaaacacaggttacaaagggtacgatggaactcgatgaaaccgacgggatcgtaatcgagttggttcgactagatctcccggcgatttggctcctgcaggctccgacttcgtaggctgtgggggttgtgttggctccgagattcgatgccttaggtcctccagggggtcccttttatatcgcaggtcaggtggtttccaagtagaactcggagacatcgaaacctacacgatacattgacgacccagtcttgtccgagtaggattcttttcatctgtaaactccgtgaaggatttccttagttatgcggagaatgtccatatacgcgcagacatgccatatcgatatgtgacgtatatcgaaaggtaaagggtatacctaacccgtaaccctgacaacatacatgaaatattaaatatatgctaaaataataactaattgcacagattgcgactaatttgcgagatgaatctttttatcctaattactacattatttgacaatgtggtgctacagtaaacatttgctaataacggatttattaggcttaataaattcgtctcacaccctatataatactcaatgtgacacgccaaaactttacacccctggatctaaacaccccctcaaatttgaacaatgtaagagtagtactccttcccaaaatataagaatttagaactggatcggacattttctaatactacgaatttggacagcacgtcccatccagttctaggtttttatattttgggacggagggagtacatggcatgaagcatgatgcgtgtgaaatggaagaaaaaggatttggtacaattgctttcagaaagaattgttgcacagagttgatcttgcacatggtaagtcaatctttgcacggacgttgcttctatggaagaaccttgtgtgtacttcttacttggagaaaacaacttcttcaaaccaatcctgacttgtacgtagttcttcaaaccttacaacgtgcaggtccattcgattagggatgagctaagaggttaggcatatgatgtgaaaaaaaatcggatgtacacattgcgcgcgcagtagaaggaggggatggaaaaaagacgattgcacttttacaacagtagagactagagaaaatacgaagtatcacttaaacactttcaagacatgtgaaatcattctattgtcctcttctagcttcaattcatgttttcaaaaaaacttttagtcaggtcgccttgtccaattgttttcggtacaagaaatgacgacatatttatgtgcaaaccacatatacaattcagacgaacacagggatgattcatcttttgttctcttccccaacgacttcacatgaatcatatgcctttgtaccagctatatatgacttgctttttatattgagaataagcattattctcatatctccttttccttttctttttcaggtttgtcctcgtacaattgtaatgtccaaaggactggaaaagtgcagtaacagaaaggtgcttcacaaactgaaaagttgaaagccatgtcactgcactacgtctgacaaaagaacaacagctataggtatttggcatttttattggctactctataaaaaaagcacattaatatttgtgtcaaagaatttaatttctacccaagatttataggcagagggcatgtagctccacataatggagctcagatgatcaaatacataattacatagtccttactacatggagtctaaagaaatatatatatatccaagtagtgcagcatcatgcacggccactacttattagaaataaaatgaagtgaataaagatatgcttctgatgatgccaccggcgtgaaccgagcaatctttcatgcagattttcgcctccacctactcccacgcacgcacgcaatgagcaatagttggttgctgacttgatccgagctttgacaaattcagtttggaactttggatgaatctgcaattctgacgacaaaagggaagggaaggacaaaaaggttttactttaatcttctttcactcaatgtctaaagtgattttcagagacatacaatgggctttatatctttcttttactcaacatctaaaatgatattcagagacaacacaatgggcgaagacctgtatttatctctgctctgaaagactgaaacagtctctgctccagctacgaagactgtatacttgctggtcatacagatccaggatgtgtattatttgcaaattcatcagaaagcatgactcaaccatcacacacactcacacgtaccatctgtcatctctttcgatgatatcattcaacagggtgacaaactgaaaacaaagaattgcaagaaagattggaatgaacacaacaggatgacccaggtatgatgatgattacagaaaactttcaggaagataagcgagccaaacatagaaattgggagataaaacattgttgcatgattcacaggttctcaaaatgattaacggcatacaaacaacacgaagatctagagcttcaaatactacttcattgtagaatggaaaaaagaacagtactcgccctgacctgagttgaggatagaaattgttacaatcgaggatagaacagtactcgccctgcacctaaattgttacatgcttgtcggaggatgcctggtacatgcatctacgattttgacgagaagaaatgatatttagacatagtactatatcatcgtaattgatgtccttgttgcctgctccagttcttcaaactcagcgcctagcgcttcgcttcctgctcttctttcggctgcccttgtcatcagaatcactgtcagatgcagatgcagattcggagtcagattcagacgatgctgatgatgaggtttcccttctgtgcctcctcttctgctgcttcctttgggtcgccgcttcttgtcctccgagtctgaggagctgtagcttgagctacttccagaagaatattcagagccggtaactgatgattcactgtcagagtcaaatacagaagcctcactactatctgaatcactccgtgaacggtattttctcttgcttttccgtttgcttttctcagacttctccttcttcaactttgctttcatcagcttcctttcctcttccttttccttctcaagatcaggattctggaactgataggaaacaggagcagccgtcttcttcagcttggggttcttgagctgctgtgtcctcgagggccgcgaaatgtagacccgttcgttcttgcactcgtatgtccagtgcccaggctgaaaacacttctggcactgggtatatgcgccaccagaagaagaagaagtttgcgcagcttttggtttcactcccagtatcacagccttctctgtactcatcagatacatctgtctcttggcctccttcctctcctgccagcgcgaaggtccctcttctttctgcccataagcattgacattgcgggcagcggctgcagcagctcgctcggcttgagttctgctcaatcccttggcagcagataaggcctgtgcttttattctctcagctgcagcctgagacttatcgtcatttccagacatcttgggctcacccaacaagaatcaaatcatacaaaatcagcaatattatgatcctgtaaggaaaccaaaatacatcaatagagtaatttgggtaatgaaaaataacgcaaacaataaataagctttctgctataccaaaatcaacacattgatgcaggaaaaaaaatctggcacataatatttttcgttgctataagaacaacatctacttatca

SEQ ID NO: 24822 - DNA, 15243 bp, Oryza sativa
ctggaccccccccccccccccaaaactttattccgtaacaaactgctgctattagtgctagggttagggcaaattaagagaaaagcttccagatctaggagaagagaagctagggtttaggcgaagacagatggtgcgggggtaggaaggtgcgtgtgggttggtgctcaccggcggcgaggatgcttgcggcggaaggaggcagcaggtccgcctcggctgctcgccgagttcgatggagatcggcgcaggcgaggcggcgggcgaactcacgaggaaaagagagagagagagagagagagaggagcgggtcagaatcgggagaggtgaacgggtcgggatgtgggggcgagcgatgatacgtgggccgttaatgggccgatcactatgtcggtcagtgatgggctgatctttatgtgggccggtgatgggcccatgaagtaaataatgatttgtactgatcctaacagggtaaatttacggtgatattagacaaccatgcaaagttttattgtgagatataaaacgaagaaaattagaaaaaagaaaaaacagaaacaatgtttttattttaagattctttaattttattatgcataaacggagttgaggttgtttatttacatcctacctacatgctctgtgtgattctttcagaacttctatataaaaaaatttccacaagttcctgatttttgaacatgcgtgcaaattagagtataataaaattattatttcttgatatcatatgatatagaagtaccccgcaaaaaaaaatgatatagaagtatatttatttgagatccattgccataaatggtcccaatacggaacccatttctgtttctcagaagcatgagcccttaccccaccctagcagaaaacacatacaccattctcagttttgtcaagattttggaggtctattacctgcagcgagactgaattctacccgggaaatacttttttttttatttattaaacacgcgaaactactataaccataaaactgacagctttcaaaggccatgtacagttttctccacactgaaaaaacagtaaagttacaccacttcaaattgcaacctgaactatgaatattgctgccaaatggagtaatatatacagcaaaggaaagtaggagcatgaatggaaaaggaaaaaaaatgtggcaaaggttccaaaaaaaaaaacatcctgactacacaacacacaacccattatgatcatgactgaatgtatctgatatctgtgaattctaactgtcgaatgcacaataacaccttgcacaccaagtaattcccaaggtaatgaaatccagactgaaactcttatttgatggtatatatcatctctaaagccgctaaacctgtaaagccaaatagcttggcaactcctcaaagtgcttccctagcacccattggtcagcgagtcctgcggctgttggctggtttagatggagaagacggtttgttcttagcgaaatcgacaagatccttgaaaagagaatcttcaggtttggtctgccgtgatgcggtcggaactgatgaacctctctcattctcggtattcctctgattaagcgaaaggccttctgtttggctcaccagtccattgtacccggcaccgttgttaccactaggaaggccgtgctgttgctcgaagtactgctgtctttggccataccttgctggaggtggcggtaaggaacctggagcttgcgcttcccatggagcttttggaagatcttcaccggagtctccatacttgttagcatttgaagacgaagaaaaaccagggatagctgttgggtttataaaatcatcatcaggtagactctcctgcctattgacagcaggacgatttgactcgctcataggacgagaaggcatagagaagctgggtgctgcagttgggtttatgaagtcatcagacacactttctgaccggctatcataacttggcggcggattcgtttctgtttttgaatgagacggcgcaggtatattggctggggcagttggattaataaagtcatctgatactttttctgtcttgtaggagtcgccactaagatagtcaacactgcttgcctccgtgaaaactggcctctttgatgatggtggcggaggaagaagtgggcttgggtaaggcctttcactttttggagcagaaggtagattgccctgtgctgctgtgccatcccttgcagacctacagaacatatatttgtacatcagatgacaaacctaaccagaccgggaatcttggtatcataacatgatccgcatcaccaaaacattttcttaaaagcagtcagctgatgttgccacaaccatccaaagcttaaaatagcaatagcatgtatgaaaaataattagtaaagggtactaatagggaaaactaatatagcttgcctgcgggaaagaacagagaactcgtcttctggctcatcgtcttcatggtgcacattaagaagtggggaaaatgaaaccccagtaggcctaggaggggctgttcctcggtttacattagcagcagcaggagctgggcctgaaccgggaggcactccctttgcgatgtcatcatgacgctgaagaacacgctgcagttcatcatttaaaccgagagcttgaaatagaaggctctcatcactgcagaggatacaagacaatatgtcacatgacaatgtgaaaaggacatggaaccaaaatttcagagtaaaagaatagaacatacccagtattgctaacaaggtccatgactcgaccttgataagatcggcactgcccaacaaggtcaacaatgacctcctccctcacaccctacaacatgaagcgcaattagacagaaatttagagaaaaagagcataggtgggtggaatggtggattcaatagttaaatacagagacgcatagagacatcacactagtgcaagtttggtcataataaattaaaatattagggcacattatttttagccagataccagagcaagttctagaaaatacaaaagcttagaaatccctctttaattattcttatgccctcagtctcctatgctgctaaacatgattccctctgaacaaatggaccaagtaaaatagttcgcacattcctgtaagctgatgaggtaacatggatgaacaaagatataaatggatattggataatatactagacttcaaagcctagcaagaaactactttgtcatccattacacatagatctgatcaatgatgggacatgtaatagttacatcctcttctgtgcacaattcacagatacagctcagctcactacatgtgaaatatgctgtagtatgatcatatgaaataaaacacatgatttatgcataatttttttcatgggaaaaacaaaggtctagaagacatgacaatcatattaaagctcttaaaagtaaaagaaactacagaagagatacaaggattatacaacactgcactaaattttgatgcttaaaaaagtcacctcagggtgcctgtggtccaaagcatttaacatctcatccaacacatccacaattcctcgagcactctgaatctcacttagactgtaatgcacaaggagcaagaattaaaggtggattataactaaagaatttcttctgcaaagatggtgaaataaattgataaacacaattgaagtattcaggtattgtttagcatgattatgaaactaaactgtcacaaggcaataagtagaatctattttggcacactgacaccgccatattttgttgttagaaataccactataagtatgaaattcttggaaagttgcatggccctagttctatgaatgtcttgcctgtaaggctgtaacagggagacaaacaaaattactattaatgtaatgcatcataattactttctagtatgctttagagttcaggaatgaggacaaccaaggatagcggcaactgcaaccatcagtaccgaaggttccaactttagatcagagatggcgtacttcaagaaagcaattaatcactgaccacttttttcccccaaaatacttgacactccatagttgctaccaggtatttttccaatatcacacctggtgggcccaaccggaggttcagcttttttttttttttttttgcccctcaaaactactaatgtgttctcagtgactaggaaaaaacaagaaagatctggagcctgatagcctatatgcaccgtgaaccttctttccgtactctccagttgtgctgagcggcaagtcctcagggttggagccttggaggcacacaaatcgtccagaagcaacttggacactgctttctgctgtctgatgcacaatttcagcagaatagagatactttaatccaggagcattttcgaaatttaactaggaaacattttatagccttgggaagtttgcttggctaatgggtgtcatctatagaggaacagagggagcagaacatattgtgagtacgattccactcctaaaacatgcctagccatttaatgtggttgtaggctgatcagtatttctgataggaacatgtgtttgaaacttttcccccacaagtgtgaatttacaaaccaggccatgcttgttccaaccaaagtaggttattctaaagagaatgggaaaaatagaacaaagcaaggcataaagaaacagcaaaagtaaatggcattaagaaactatggatgaatatgacagtactgcttgaagtgaacaagtaaataaggaacaaattttgcattagaacaaaagaacacctcaaggcaggtgcagaaggggcgctagattgaagagaagcttgtatcgctgcatcttcatagctttgacctggaggtggatatagatgtggttgcctcaatggttgagtttgaggaggtgtaaacagtggaaccgtgttctcctcacgaggtggaaaatcaacaccagcattctgcacacaagggcaggatatcttgttcatggtttggacagaaacagaagcaattgaatattaactcaaaagtaaaaacgttgaagatctaagtttacattgaaacaaagtgcagaacagattgaagttgagtggaacagtagtcaagtatgagctgtgatagcacaggataaataacagatgagaaaactggaatgaacacaagtagacagtaccctgagttcttggtaagcagcgtgatactggggatatctgccagatgcacctccaaaagccacttgccatgtgtcaatcaaactcaatattttctcccgaacatttaaatctggctgaaatcataaattggcaatcaaatacagaagcataagaatgtaggaactataggaataagtcttggctggttggtcttggtcttgtggtgccttttcctgcttttcagctttctaggacagcatctctactttcagtttggatgctctaggacagttaggacagcagtttgttgagatgctctaggacaatatgttgagatgctctaggacagtttgttgggatgctctaggacagtatgttgagatgctctaggacagtttgttgggatgctctaggacagcaccctcttagactagcatggctgcatggctgctacaagcagctataaatatgtatccaatcctctttgggaggatatggcttttgagtttgtgaatgaagaaaaccagaaaattgccccactccgagtgccatcctcttctcaatgagagtagccattgaagttctaacatctggtatcagagccacactttcctgtaggctaaacatctcttgttccaccccttcccaagctcggttgagctctcagccaccaccagcagcagcaacaccggctgctcctccttcccctttcccttccccctctccacgcagcagccccccggaggtgcgccatgtccgacgttcggtctcggcgttcggtcgtctcgagcactcggcgtcagcaggacgccgagctcgccgcagcagaagagcgcaggcgagcaacggctcagaccgctgcagcagcagcgagggcggccagactggcggcagcagagttggcagcagccagggcggaggcagaagcagaggcggcggaagatgcggcacgtgcggcggaggtagaggttgagaccttgcgcagcagcatcaacggctccatcgccggcgacatcaccgccgacagggagcttgaggagcttgcaagaggtagggcacgggagcgggcagagcggtgggcagcagcccacctccacggcggcggcggcggcccaagggaccgcgcgcccgccgacgggaacccagacgggcgcgggcgtgccggcggcagcccggagcccgcgcgcggccctcgcaggcagcgtggctctccctcccctgaccggcaccatggccaccacggcgtccagacggtggtcagggactttggtcccggcggtgggtggcctaccctcaccaaaaccaactacatcgagtgggccgcggtgatgagggtgaggctccaggtgcggcacatgtgggaggcagtccggtacggcgacgtcgactacgacgaggatcggcgggcactggatgccctcatcgctgcagtcccgcccgagatgcagttctcgctttcccagaagcggactgccaaggaggcctgggacgccatcgctgcggcacgcatcggcagcgatcgcgcccacaagtcaacactgcaggcactccgcaaggagtgggagaacctggccttcaagccaggtgaggatgttgatgactttgccctccgtctccacactcttttgcagaagatggtgcagtacggcgacgacacctacgacgaggagagagctgtcgagaagctctttcgctgcgtcccagagaagtacaagcagatcgctcgctcgattgagtctttgctggacctctccacgatgtcgatcgaggaggcgttaggtcgcctaaaggtcgtcgacggcgatgagccacagcctctctcggggcctatcaccattggcgggaagctccatctcactcgggagcagtgggaggccagccagagtaacgggaggaagggggagtcccctccctcgacaggcggccgcaagccgcgcaaggcgcgcggaggcgtccagctgcggtgggcgcgaagacgcgccgagggtggcgctcgcagaggtgcccagggcgacgccgctggcaaccacaagccggcacgagacgacgcctgccgcaactgtggcaagcttggccattgggccaaagactgtcgacagccacgacgcggccaggcccacgtcgcacaggtggaggaaaagccggctctgctcctagcacacgccagcatcgagctatcttcagcggcaccggccgcaacggctttcctccacctcgaggagccgaaggtacacgccttcctcggcaacagctccagcaacgacaaggctgatgggtggtacctcgacaccggcgccacccatcatatgactggccggcgggagttcttcaccgagcttgactccagcgtccgaggctccgtcaagtttggggatgcctccggcgtggagatcaagggcgtcggctccgtcaccttcaccaccaagtccggtgagcacaggctgctcaccggagtctactacatccccgcgttgagaaactctatcatcagcgtgggacagctggatgagaacggctcaagcgtgttggtcgagcacggagtcatgaggatttgggatcgccgccgtcgccttcttgccaaggtaaccagaggcactaatcgactctacatcctcagcgcgcaggtcgcacaaccagtttgcctcgccgctcgtcgagacggcgaggcgtggcagtggcacgagcgtttcgggcaccttcactttgaggccctgaagcggctcagcgccaaggagatggtgcgaggcctgccgtgccttgaccacgtggagcagctctgcgacgtctgcgtcctaacgaagcagaggcggctcccctttccccagcagacgagtttccgagccaaggagcggctcgagctcatgcacggggacttgtgtggcccagtgacaccggccacaccaggaggacgacgttacttcctgctgctcgtcgacgacctctcccgctacatgtgggtgatggtcctcggcagcaagggagaggctgcggacaccatccggcgcgcgcaggctgctgcagaggcggagtgcggccgcaagctacgcgtactgcgcaccgacaacggcggcgaattcacggcggctgaattcgcgtcgtactgcgctgatgagggcattcagcgccactacaccgcgccgtacagcccgcagcagaacggcgtcgtcgagcggcgcaaccagacggttgtggggatggctcgggctctcctcaagcagagggggatgccggccatcttctggggagaggcggtggtgacggccgtctacatcctcaaccgctcgcctaccaaggccctcgatggcaggacaccgtacgaggcttggcatgggcgcaagccaggggtctcccacctgcgggtcttcggctgcctcgcgttcgtcaaggagcttggccccatcagcaagctcgatgacaggagcaccccaggggtgttcatcggctacgcggagggctcgaaggcctatcgcatcctcgacccggagacacagcgtgtgcgcacagcgcacgacgtagtgttcgactaagggcgagggtgggtatgggacaagacggtggacgatggttcgactctgacgtacgacgacttcaccgtcgagtatgtccacttcgagagagctgggggagtaggcagctcttcttcaccaagcgtgtctaccccagtccccgagcctccatcgactccgacaccaacacaccctcgggccacggcttcgactgcgacgagctcttcgccgacaccaccacagccggcaaccccacgcgccccagcaccaacagccactcctccgagcacgtctactccgacgccagctcgtgttgagcgcagcccggtggagttcgctactccgctctcccacgacggggagcgcatcgacgcgtaccacgacggcgagcagctacggtaccgtacgatggaggatcttctcggtgaccagcccgtgccaggaatggtgcctcgcgacctggaggcgcagttgcaccttgcgtgcgacgacggtgagcctcggtctttcgcagaggccgagaaacacgcggcatggcgtgccgcgatgcagtcggagatggacgcggttcaggagaaccgcacctgggagcttgttgatctccctcgtggtcaccgcgcgatcacccttaagtgggtgttcaagttgaagagggataaagccggagccatcgtcaagcacaaggctcgcttggtggcacgcggtttcgtgcagcaggaggggatcgactacgacgatgccttcgctcccgtggcacggatggagtccgtgcgactccttgcgctggctgctcaggaaggctggggcgtccatcacatggacgtcaagtcggcgtttctgaacggcgacttgaaggaggaggtctacgtgtaccagccgccgggattcgtgatccccggcaaggagggaaggtgctacgcctgcacaaggcactctatggcttgcggcaggcaccgagggcgtggaatgccaagttggattccacgctcaaggggatgggcttcgagcaaagcccgcacgaggcggccatctaccggcggggcaatggaggaaatgccttgctggtgggtgtctacgtcgacgacttggtgatcaccggcaccaaggatgcggaggtcgcggcgttcaaggaggagatgaaggccaccttccagatgagtgatctgggcctctctccttctacctggggatccaggtgtaccaggacgactccggaatcacgcttcggcagaccgcctacgccaagcgcgtcgttgagctggctgggctcaccgattgcaacccagctctcactccgatggaggagagactgaagctgagccgcgacagcacggcggaggaagtggatgctacacagtaccggcgtcttgtggggagccttcgctacctcacccacacacggccggacttggccttctccgtcggctacgtcagtcggttcatgcagcgaccgacgacggagcaccagcaggctgtgaagaggatcatccgctacgttgcggggactctcgaccacggtctctactacccgaggtgtcctggcaaggcacacttcgtcgggtacagcgacagcgaccacgccggcgacattgacaccagcaagagcacgagcgggattctcttcttcctcggcgagtgcctcgttagctggcagtcaatcaagcagcaggtggtggccctgtccagctgcgaggccgagtacatggtggcatccgccgcttcgacccaggcgctctggcttgctcgactgcttagtgatctcctcggcagagatactggagcggtggagctcagggtggatagccagtccgctctggccctggcaaagaaccccgtttttcacgaacggagcaagcacatccgggtgaggtaccatttcatccgaagctacttggaggaagggagcatcaaggcgagctacatcaacaccaaggaccagcttgcggatttgctcaccaaaccccttgggaggatcaagttccttgagctttgctcccggatcgggatggctcaactttcccacaagacgacgcacaagacttagggggagaatgtaggaataagtcttggctggttggtcttggtcttgtggtgccttttcctgcttttcagctttctaggacagcatctctactttcagtttgaatgctctaggacagttaggacagcagtttgttgagatgctctaggacagtttgttgggatgctctgctctaggacagtttgttgggatgctctaggacagcaccctcttagactagcatggctgcatggctgctacaagcagctataaatatgtatccaatcctctttgggaggatatggcttttgagtttgtgaatgaagaaaaccagaaaattgccccactccgagtgccatcctcttctcaatgagagtaaccattgaagttctaacaggaactaggaaagcaatagttggccactgaatgtgagtataatcctcacctttttctttactatcttaaccatttcacttaatatgtctcgctcaatgatttgctggtaaacaacatccccacagtttttgcttagagtctctagcacctgaaaaggaagacaaacaaacagaacaaatcagcacattaaacaagacatgactgtgcacatagaaactatgctctttgtttcctaaatctggaggaagcacaagaagtttccaaaatctggaagaagaacaagaaataacttctaaatttgtgtagctagtgaagacaggtgaattcttaaatttaggaatgaatcgacctaaaactcacattgttaaaacaaaaaaatcagaagataacacactgagtatcaatatacaaggactcttgaaatactcacataaagcgtcagaatttgcacttttgaattcttgtttcccaggcgtttctttaggagcttgagtgtatccttggcttgtctgtacttcagcaaacatttatgagcatgctataaaacatgacaaaccaaaagttgtatggggacattgaaaataaatcccagaaagtatttaagacgaaacaattatgtcaacaattcaatatacaaaactcattatgcaatgtgcatcactcaaccatgaaccgaattatcaacaaattatagcaaaatgtcttaaattagtgtggcatcacatacacagattttaatgttagcaaatgccacagattataaaatgtaatcactgcctggagagacatataaaccatattggaagttggaagactaaaagttattgaagctatatatcacaccaacgtacagcagagtagagaaacaaagttttttttttctctcgaacacgcaggagagttgcatatcattatattaagataaaagagttaaaaaggactcatgcatgcccataacgggaacaaaggctataagaactttccaaagaaacaacaaaaaactacaccatgacttagcttcatctctaacatcctgcatgacggaattgaaattagctgaaacctctccaaagacacatccacctatgtttccaaatcaaccaagccaccaacacaactaatgagttaaaacccttgcgatgttgcttagccactttctgcaaagcttaaagccaccacatggtgaaaacagtgtcatcgggaccttatctaaggtgctgcaagccaaccaaggacaaaactgagaaccatacacttcttgtgaacacacataaagtgagcaagtgctgcacattctcctccttttgattacacaatggatattgccaagatggtcaacactgcgatgggccaatcggtcagcagtccaacaacgatttagcgaggctaaccacacaaaaaaattgccaaaaggccaaagctcaagttttccaaacttccttccacggctcaaataacatgcccctgatgagttttttttttggtgtgtgtgctctcattgctgatatcatcatggcaaaaagtgatgtcatacctaaactgcacctcaacaacaaatgacaccaactcatcaccaaaatcaggggcctccatgagattatagctcaactaaccaatcacaaactatcatcaattattgagttattctgctctccaaaccaacaaccgtacaacctaagattccaaattcctaataaatttggaagaaaaagactgaatatgcttttccaaaaaaatacaaaacatatagcaatagacacagaacaaactagccaaaatcacagattcaatgccttatagaagcagcactaaaaccctgctaaatttaacgattttataaacaagcctaggttaaacgagatacaacaagcaagcaagatcacaacacataaaatgtcagagatgccacgataaccctactaaatcactcacgggttgaacaacatagagaactacctaggaattctccatcctaccatatgatagcaataacaattacaaacaaatcaaagaacctaaacaaaaagtctcgaacagaggcatcatcgagagagagaagccagacccgggatccatgttgatgatgtcgcagagctcgatgttcaccgcccaatccggcccgatcagcatgtcgctcgtcgccctctccgcgcacgccacggccgtcgccattttccccctctcaccaccaaaaaccctaaatcctgcaaacaacaacaaaaacaaaccacccaaatcagcccccaaattcccacctttccgcacctccccaacgcccccaacccgaatccgccccccaaaaacacatcttccaccccgcaagaacccgagcccctcaccgaatctgagcgacctcctccccaagattcggcgccaagaagcaccaaggcggcctcttttcaccgatccggaggtcctggccgcgcctgggacggggaggagagggagagatgcgagcgaactgtaggattggaggaatttcggtggctcggcttggaggaggagatgaggaggaaggagaaaggttggagaggagggtggtagactagactaggcaggcagcaggaaagaaggaaggaggaagagaagggaacgcggccgtagactttttctttgtttagttttcttggtgtgaaagtgagggcctgcaaaattatattttgtggtgctagtttggaattgtgagaaaagtgggatatcaaagtactccattcgtcctatattagattgtgagtttttacttgtaatgtttaactactcgtcttattcaaaaaaattttaaaattatttttattttatttgtgacttactttattatctacggtactttaagcataattttttgtcttttatatttgcaaaaaaaaattaaataagacaagtggtcaaacgttgcaagtaaaaactcaaaattccttatatagtgggacggagtaatactgtcatctagcagccccatcatttggaataagccaaacgacattttaacgaataaaacatgatttataaataaacttttatatatatgtgttcttaacaatttaaaagcaatggctgaaaaataaacttagatgaaaaaacctcaaaccaattataaattcaaggttgaaaatttgaattttagctactaagtattagtataagcgaaaaaatgagactatgatgactgatgaggataggatcgatttttctttatattagatcttgaattttttttacatgggtaaattatgtattttggaaaatatatagttatgttgtgaacttctttgatgtcatgaaaaatatctttttttagaaactctcaacggttgggggtacatactagatagatttctactatcggaaaaaatacattcttatcaacacaaagggtcattaagtaggatctttgcatgaatgcttactaagtaagcaagttctacattttggttgcgtatatggttgatatgaagttacataaaagtgcaatgtgaaaaccctggatgaaataattatataacatatcctatgtaagtcattttcactcattaattatattatccttgtgagtctattttctacacattcacttttttttcttccatttctcataaaaatatcaacacactatttaccattagcactaggcgactttgttcctcttgctacttctcttataaggagagataggggatatttacatgattaaatgtgcttgttaatatgtcatcgtatgaaatagttgcgacattttttgttttgcttgcagtgatagacttggggcattacttctctgttgcatacttttcacaaacaataggaacatttcaaacttttagagaaagtatctcatgttttttagagcatcaaattgttcattgtgtcaaatttatatattactcgaatacacaagccaaaacaattggttttatgtacatggctagaaaattatactccatccatttccaaataactgacaattggcactattcattttaaaccgtgaccattcgtctttctcatttaaaaagtataactgaaaaagcagaggaacaataatcggcaggaatgcaagtacaaaaataaaagattatagaacacagtaaatacaaaaaatgatagtttgattagaccgcgagaaaaactcaccaatcggataagagacgtaagctcaaaggaaatttttcaacaagtttgagttcttactaat

SEQ ID NO: 24823 - DNA, 4776 bp, Oryza sativa
ccttccctcgccgccatcgggttccccagcgggctccgcatcctaaccctctcgaactcccctcctcccccacccaccgccgacgccgacgacccctggaagttgaactccagccgccgctgccccgacggcggcatcggcatcatcccgacgccgagagagagagagagaggttggaagagagatggagagggagaggaaggtgtaataatggcgatgtggaggaggaggcgaggaggcggagggggagaagaagaggagagaagaggagaggagggaaagcgatggcgggtgggtgcaagcaagcaaggtcgttggtgagagatttaaaagcgggatttaaatttggagggagtacattacatacaaagctttaaataataataattaaattataaacaaactacactgtactttgtgtatatacggcgtggcgccgaactgtacatcacagcaaagctgctgtacatctccgtcaggtccataccgtggattcgtggagccattgggttcggaatcatctatcataatatcattatcgttacgtgatcttaactttatattatcccgcacgacagtgtttataaaagtagtgtcattatggtagataatgtgaacccgatggactaatggtagtatcttcacctcccgcacgtaaaacgaagggatctattatggtattactaattaagtattagttaaaataaactttaaaaatagattaatatgttttgttaaaacaactttcctatgtaattcttttttaaaagactattgtttagtatgtttggaaaacgtgcgcgtgaaaaacgaaggagtataggttgggagttgtgagtgacaaactcagcctaaaatcttcataaacccgagacaatggctactgttcacacctctcgtattaatatgtaagatgtgtgcagtggtgaaatggtgatgtgttcgctaccatgtgtgatcacgtctgagtcggatgacgcataattcgtgatatattaaaattttgttattatgttaatagatggcggtgtaagtgattggtaattaatgcgagtgattaaaataaaccaagggtacatgacatgagtgttgaaatgtttgctagcttgattgttgcaatggcgtttaatcggtgttgtaggatccaggggggtgaatggttggtatacccaaaaaccgaaaacttttagtggaaataaaagttaccctcgaaatcgacggaagtcggtctgaccgagattgatctgccggtctgaccgaagcgtagccgccggtctgactggtgttgatcttccggttggaccgccctggaatccctgctgcgcctgttgtcgtccccggtctgaccgaaggtcacccgccggtttgaccgccgccttgccgccggtctgaccgccgatgtgtcgccggttagaccgccgaaacccggtgaaacataaattgaagaattctaaaagtagatgacgactttattgattctctctgtatttacgaagtgcacaaacagcactccttacagaaatttcgactaaactcaaaaccctaactcaaaactcaactcaattgctttcaaaagcgataccgggaagcctcatgctccccctctatttatacccgaggcaggcaggaaccaaactcatactaggagtcctaaacaccttagaaaaccctttagtacaagaaagaaactttacataaccaatcgtaccaaatttggactccttccaaattcgactccgcatcccatacacacacaatacctccatcgtatgccatatggaatctccatcaaccacgtgcatcaactctagcctaagtatcccgcataatctctgaccaccacggacgtcgtcttatccccaagccgactcccggtccatcaccgcaaatactctcccgagacatcgagtcacctacacatgaaataaataaagaaaccatattccgagaccaagctatctccaacttgactcattagtagcaaacaacagtattacatacgtatagtatccatctagaagccataatcatgaaataatcacggatatccaaacaaacaacccgaaagcgaaactgacacagtgtcggccggtcagaccgcgggctggccggtccaaccgctcgattaccgccggtctgaccggcatacacagcccggtctgatcggtcacatgaaataatgaatcctgcgatcacctgtgaatccaatcatctccaaaccacttcatgaataaattccaaataacaaaaccaataatctccaatgcccaattattcatcacagaataataataaaaaacacctttgattttacaagtgtgagtgctttactttgttgtaacaggaatgctaaaaaaataggatcctgtttctcctaacccctcaagctggggtctggggaggcatgtgctaccgccggtaggtccggccgatgagccactaggcaccattggtgtagcctcctacttatcctcatctttacctcaactcaacttcggttgccatgggccacctcctttatgttctctcacgtcgctagtagtggtttgtgtgtgcccacacgagacacgaccataggtctaccaggtgtaccactgcctccatcgttgtacgataataccacataccccgcgttgatgttacatggttgtccgatgataagtaagatctatatggtggaactaactaaaccttcacaaactcaagacagtggccacggttcacacataacaaaaatatgtgagatatgtgcggtggtgaaccggtaacgtgttcgttaccacatgttaaaacgtctgagtcggacgaggtgtgttttatgtagaactcataataagaaattttcttattatgtattctacatgtcagctgtacggttcttttttcatttgccacgtgttaatgtaattctatgaactagttagtacgtggcaaataggtggcggttttggtgattgataattaatgcgagtgattaagaaaacctaagggtacacttggatttattgagtgttgaaatgtttgcttgcttgttggtggttaatcatcagtgtgagtgctttactttgttttaaacgtgatagtataaaattgtgccattttcatgacagaggaactgttcctatccattatatttcgtgcagcccctaattgttgtgatactttagttcattctgaaatgtgatacccatgctatataaatatggcattttcatgacgctgaaactgtactgatcgatcgattgtgttcagcccctaattgacacagcatgcaattaacagctcgatgaaagcgattcagtgtttataatttgcagcatagttcagtagccatccagatgtctggcacgtgcttagaccgatggagaaaaaactgacatgatggttgctacatgtcttgagctgttacatctcacaaccactaaataatccgtggttaatcaaaatactactgctgcctttgttccataatatatatcactgtcaaacatgacacgatgtctaaaactaccttttaacttttagtttcttacacacactataagatgtagcaacaaaaatcataacgatagaaaaagtaaattcaaatatcaattgaacaatattatttcttaaaaaataaaatttaatttgtattagactaattttcagtcgaatatttaatgagttaaatctttataaatctgtgacagagagagtagcactcgtacctatctcagattaagcaagacatcaactaaattattataatctgtaacttgtagtattagatctctcttaagtttatagaatataatctcaaggattacgagactaatattttggatgattagaatagaattttagtggcacagtaatcagtcaattttcttgttcctttttgtctgtcactgcatgcacaaattgcacatataaatgaacagtatgagagagataggagactttgcaggggggtcaggaagtcatgggtttctagatgttggtgataatttgcaggtggttgaggagccactggggactctagaatgaaatgacttttgaaaaacgggtacaaatattttcccgtgggggacgacaaggcttctctttcgatgggattctaccttttctttggtttcaattcacagcgattgtagtgcttttttttatgtaaaagaggaaagaaaggttttattatttatgcggacgagatgtctttatatgttttctcactgactagcggaccgatgcaaatctatgttgaatttttaggtcaatgttttcgttttcggaggatcgatgttgggtgaattataagattttttataaagaattatgtcggtaaagctgttgatgcatgcttggagtagaacttgttaatcagctgtctgattgtaatttgcattcctcagctccttttcttagttttgtcttctcaacactcaattcaccatctagaacaatcatgcgcacgcatggttgcggtacattaatataagttgaaaattaatactagttcaattttgttcagaaaaaaaggatagaagaaatgttgcttcaattactatgacgatatcaatctgccacagaagacagaatctacacgtcgttttcagatatggttaaactattccacagcacaaaactttgaaatattcagatacaagtacaattaaaacaactgaatatatatatatcttgagtgtctcattttcaatgaacaaatcgtcagatattcattattagatacagatacaggtcttcagaagatatcaaaagcgaaatattatattatgg

SEQ ID NO: 24824 - DNA, 14125 bp, Oryza sativa
ttagttgttacagttcttaaaaatgatatttttgtctagaacatgtaacagttttcctgttgcaaaaaacagatagaaaacttgcaaataccaagttgtgttttcattaaaaaaacaagttcggtgattgggagtagagaagaaaaccaaagcttaaaatgtgaatgtaattgcagagaatgaaattgtagtgtaagcattgaaactgcaagcaaaacactaattaactcgagtgttacctgtgttctaattccattactaattgtatccccttcactgaccaaaactcatagtcaaccttgagcaggatgagctgctacagacccatggaagatgtgctgcaatatgaaggaccatcataagcaaggtagagctacttgttttttcttcaatttagtgagtcctacttataagtgtttaggaaatactgcctcccacaccatgtaaataaatttaaggaaaaaaggaggcaggacaagatgaagcgtttataatgcaaactattgaaaatcacaattcgtggatatgtgccatcaaatttgcttggaaactctctctctctctgtggagattatggatatcccatatctacacggcgatgatatttgggctgaatataggataccgaatatagatagaatattttatgtgtatctcgggtttgtttctcaacttgtgcatcaaggaaataccctgggacttagtcggttacgactgtattttatctgtatctgcatattccgttagggatatagattatcttttgtaacacggactcctccccatatataaggggggtccgggtgcctctaggggcatatgttgattttcccaaatcatacaatcaataatacactcggcggattcatccccggacaggagtagggtattacttcttttataagaaggcctgaacctgtataaatcctttgtctccaaacccatacacttttccagcttgatagccacccccttttattattgccgaaatctagtttcgacagttggcgcgccaggtaggggtagcgtcaagcttttcgccgatcagtgcaatgggttccatctccggcatcgacgacctcgtcttcccacccgggcagacgtttcggttcggcagcctcgacttcgtcaccagcaacttcggcaagatctctctccttgactcggagtcggaccagtcgggagagaaccagatttcggccccgtttggactcccaaacgcggctgaaagttacttcaagaccatctcgaccgagtcggcttcaaaccactcgggcgagatcgcaccttcaccaacgtcaccagatcaagatgatggggcttacccaccgatcctgatgaagctccccgacgatttgacggccgtctccatcacgacagcgtctctttcccgtaggcctaggcggaagtcggcttcaataccgatttcgcctagcttcagggaagttggcgtcatcctccaaccactcggcacggtttagacggatcagctagatggcgactacagctctcccaccgtcgactcgcgccccaccgacatcgtggagtacgacgagtttagctctcgctaccacgacccggatctcgacgacttcgacggaagcctagatgacaactacacccctctctactttggcgtcttcatggccaataacgagacggaggagcaacgccaagcccgggagaccgaagcgcgtcgcgagactgagcgccgccgactggaagaggagcatcaagcacaagaacaagaacggttacggcatgagcagcaggagcgtgagcggaccgcgaaggaggctgaggatcgacggcagcgagctttggaagcagggcgccgggcgcgtgatctcatcggccagcaagatgttgaagggacgccggtttttcgcacccctcaacagaatgcggttgccgcgatcaccctcctcgacaccctactcagggaaaacgagctcaatcaatccgatcacgtcgtcaacatcttgaaccagacgaagactatgattgcggcttcggtcccagttaactccgaaagcgtccatacgccgactggcagccgagtcccccacttccgatctcatgactaccgtcatccaagcctcagcatcaccggcgcaggatccaatcgcaggagcaggggccacgacgagcggtctgttcactcacctcccgatccccatagggagcgccgagtggaacggcctcgctcaccacctcgtcgccgccccgtcgatcttcgcgacacaatcatacagcgccgagcagctcgaggctatcatcactcgccggaccgccacgacgacgaccttgacggagtagcagccttcaccgacgacctgcgtcgagtggattggccagccggcttcaagccgactggaatagagaagtatgatggtaccactaacccagaatcgtggcttaccgtctacggtctcgcaatccgcgcagcaggaggagacagcaaggccatggcgaactatttaccagtggctttagcggattccgcccgatcttggctccatggattgccccgtggtacaatcggatcttgggccgagttacgtgaccacttcatcgccaactttcaaggcaccttcgagcgtcccggcacacaatacgacctctacaacgtcattcagaagtccggagaatcccttcgagattacatccggcgattttctgaacagcgtaacaagatctccgacatcaccgacgacgtcatcatcgccgcattcaccaaagggattcgccacgaagaattggttggcaaattcgggcgtaagcctcccaggacagtcaagctcatgtttgaaaaagccaacgagtacgccaaagctgaagacgccgtcaccgcgtcaaagcagtcgggtcccagttggaagccaaaaaaggatacgccggcttcgggaggaggtggaagtaacaatcataaggaccgcaagcgtaagcctgcggaacttgttgcaaccgccagtcactcttctcgacagcattcgcgcgtcaacacgtttgacaagatcatgaactcccaatgcccgcaccatcctaactccaaccacgtggccaaagattgtttcgtctacaagcagttcgcggatcaatacaccaagactacacggaagaactccgatgaagaacaaagcacgtcgaggaagaaggacgacggcgacaccccggcaggttttcaagaccaccgcaaggagctcaaccatatcttcggcggccccctggcttatgagtctaaacggaagcaaaagttgaccgaacgggagatcaatgccgttcagcccgacacgccccaatatcttcgatggtcagagattgcaatcaagtttgaccgctcggatcatcctgaccgagtggtccacccggggcggtaccccctggtactagacccagtggtccgtaatgtcaagcttcgcagaaccctcatcgacggtggcagtgcactcaatatccttttcgccaagaccttggatgatatgcagattcctcgctccgagttaaaaccaagcaatgcgccttttcacggcgtaattccaggattatccgcaactccactcggccagatcaccctcccggtcacttttggcactcgggaaaactttcgcacagagaatatcagctttgaagtcgccgatttcgagacagcataccatgccatactcggacgcccggcattagccaagttcatggccgtcccgcactacacttacatgatgatgaagatgcctggtccccgaggagtcctatccctacggagtgacatcaagcaagctgtcacatgcgacaaggagagttgcgacatggcccaaacccgcgagatggcgtctgcccgagaggatatccgactggctgcagccacggcgagcgaaggagaaatacctgctaccaagacttctaaaagtggagaaagcgaagctaagactaagaagattcccctagatccctctgatcctgctaaaactgctgtaataggcgccgagttagattgtaaataggaaagtgcgctcatcacctttcttcagaacaataaagatatctttgcgtggaaaccatctgatatgcccggtattcctagagaggtgattgagcactcattacatgtcaaagaagacgccaagcctatcaaacaacgactccgccgattcgcacaagacaggaaggacgcgatcaaggaggaattaaccaagctgttagcagcaggcttcattaaagaagtccttcatcccgactggctagcaaacccagttctagttcggaagaaaacagggcaatggcgcatgtgtgttgattacactgacctcaacaaatcctgccctaaagatccttttgggttgcctcgcattgaccaggtagtcgactcgaccgccggctgtgagcttctcagttttttggattgctactcggggtatcatcagatccgactgaaggaatccgactgcttgaagacttcattcatcacgcccttcggggcatactgctacgtcaccatgccatttggactgaaaaacgcaggagcaacttatcaacgtatgatccagagatgcttctcaacgcagattggccgtaacgttgaagcttatgtggatgatgtagtcgtcaagaccaagcaaaaggatgatttgatctcggatctggaagaaaccttcgcgagcatccgtgctttcaggatgaaattaaaccctgaaaagtgcacattcggagtaccgtcagggaagctgcttggttttatggtgtctcatagaggcatccaagccaacccggagaaagttactgctatcctcaacatgaaaccgccaagtacccagaaagatgttcagaagctgactggatgcatggcggcgctcagccgatttgtttcaagacttggcgaacgggggatgcccttctttaagctactaaagaaaacagatgatttccagtggggacctgaagcacagaaggccttcgaagatttcaagaaactcctcaccgagccaccggtcctagcctcaccacacctgcaggagccgttgttgctgtatgtatcagccacctcccaggttgtgagcactgtcttggtcgttgagcgtgaggaagaaggccatgtccagaaagtccagcgaccgatttattttgtcagcgaggtcctagccgactccaaaacgaggtaccctcaggttcagaagctgttatatggtattttaatcactaccaggaagctatctcactactttcaaggtcacccggtaacggtggtcacatcatttccactcggtgatatactgcacaaccgcgaagcaaacggacggattgcaaagtgggctttggagttgatgtctttggacatatcattcaagccccgaatttcaatcaagtcccaagcgttagctgattttgtcgccgaatggaccgagtgccaagaggatacccccgcggagaagatggagcactggaccatgcattttgacgggtcaaaaagactttcgggcactggagcaggagtggttctaatttcaccaactggagaaagattaagctatgtactttggatacatttttcggcgtcccacaacgtcgccgagtatgaggccctccttcatgggctgcggattgcaatttccctagggataaagcgtctaatagttagaggcgattcacagctggtagtcaaccaggttatgaaagagtggtcctgccttgatgacaatatgatggcatatcgacaagaggtacgcaaattggaagacaagttcgatggactcgaactaagtcatgttcttcgacacaataatgaagccgccgacagacttgccaactttggatccaagcgcgaggtggcgccttccgatgttttcgtcgaacacctttatacgccgacggtacctcacaaagatactgctcaaattgcgggcactcatgacgtagctatgattgaagccgactggcgagagcccctcatacgatttttgacttctcaagaactccctcaagacaaagatgaagccgagcggatttcaaggcggagcaaactttatgttatgcatgaagctgagttatacaagaaaagcccttcaggagttctgcaacgttgcgtatctttagaggaagggagacaattgctgaaagacatacattctgggatatgcggaaaccatgctgctgcacgcaccattgtcggcaaagcttaccggcagggttttttttggcctactgcagtgtccgacgccgacaaaattgtgcgcacgtgcgaaggttgccaatttttcgccagacaaattcatttaccagctcaagagttgcaaactatcccgctgtcttggccgtttgcggtttgggggctcgacatggttggcccgtttaaaaaggcagtcggcggttacacgcatctctttgtggccattgataaattttccaagtggattgaagctaaaccggttgtcacaatcacagcagataatgctcgagacttcttcatcaacattgtgcatagatttggagtgcccaatcggatcatcactgataatggcacacaattcactggcggagtttttaaagacttttgtgaagactttggaattaagatttgctatgcctcggtggcacaccccatgagcaatggacaggtggagcgagccaatggcatgatacttcaagggattaaagcgcgtgtctttgaccggctaaaaccctatgccggcaaatgggtgcaacagctgccatcggtgctttggtctttgcgaactacacccagtcgggccacaggccagtcaccttttttccttgtctacggggcagaagcaatgttgccgagtgaagttgaattcgaatctttgcgctttcgaaatttccgtgaagaacgctacgaagaggaccgagtggatgacttgcaccgattggaagaagtccgtgaagcagctttgattcggtcggctcgatacttacaagggttgcggcgttatcataatcgcaatgttcgatcccgtgcctttttagtcggcgacctggttttgaggaaaattcaaactacacgggatcggcacaagttatctcctttatgggaggggccatttatcatctctgaagtcacccggccaggttcctatcgactcaagcgagaagatggtactctcgtcgacaactcttggaacattgaacatcttcgtcgtttctacgcttaagtttatcattgtacttccctatcttgactgtcaacatcaagttttcttcttgaagttgtcagtcgggggctattattataataatggagtgtgattttttatcaattcaatttgcttacttggtttatcattgccttgttcgatttttctacttagtctgcgaggactgaaagttttttatagcttctttgggttttaggctcaacaaagcttgataaaagcttttaagaaatcaaagatttggctagaactatcaagcacagcataaatacaccagtattgtacaaattgagcctccatttgttacattcatactcagtcagagtcagtcctttcatcatcagagttattgttgctcggctgaaggtcgttgttgcggaattgctctacaacgtcacttgcaatcttatcagccgcattttgagcattgctgataagatcaagagcagcctcttcgcttgtcccgtctgcaaatccatcaatggtgtcgatttcaattctcgggtacaaggatttggtcatcgccaatgccatgctagctcccatacttccagctttcttgatgttcttgaaatatacatccggtgcaactctcagcttgtcaaagatttcggttgcgtcaagtgcactcggaccactgttattgaggaacatagcttggacaagtggtgtagcgacattggcaacttcatctcttgctcctttaagcctcttgattttatcaaccaggacgtcaaactgagcttgagatttgattttacggtctacaaaacacatttacaataagaatctgctacattaaaaagaggaaagttcagattgtcagctggcagtaccttcaacctccttcaaggccgagtccctttctgcagctagttctgctttgtcttttctcaaagcttcaatttgcttctccatttgagccatcctggtggcttgcgctgtttgaaatccgaatgtttgaggatccagttatgacagcataaatgggacagatctagagattaccttttgatgaaccactcagctcgtagtttgaatcctggagctgagcaattcgttcccttaattccttctccgttttcttggcatgctccttggcctcgtgtagctggctcctaacagcttcaagagttcccaaatgaggaaccagcttttctaaggttgtggtcttggcctcattgcgaagatggattctctgcacggtggttcatggattagttttgctaacgagaaaacaaagtcatcaaaggcagtcacctagaagacttacattcacaatgcgagtagcttctccaagtactttcttcagctggcacacttcctcatcttctttttggcgatttatgacaatgccggaaacttgagagttctcgtcccaccatttgagtaagataggaggacgagagtcatcagctgcctttatgcggagaatttcttcttcgtcgccgcctagtggacctgatgtattcccaagacattagacgagtaagctggagttattcagaacggcatcacttgagaagatgagttacctgaggatgtgcctagctgagcgtgaggtgatccctgctctttatccggagacccaatcactgagtcattaccagcctctggtccttgagaagttgtcgcctgcgcttcagcttcaggaatctcttgatttagacctacatccgactggtttccagtcgggggctcttgggttgttgcagtttcagtagctgccgactggtttccagtcggcggctggtcactcggattggccttgtcatccgaagcatgggcaccagtcggctgactttcggcagtcggctggctttcggcagtcggctcagcatctttggataaatttgactctgtggcagccggatcaggatcttttccagttggatctatatcggacggtttcctgcaaagtgtcctttcaatattcagcgtaatttctatgagagaagcatgccggaataaaatggtaccgagaggtttatacctggaagatgttctgatctttggcatttgacggccagccagttttttcctaggcatggtatgctttgggagtttattgggcgtgcccttgtccccagatttgttgctgtcatcgacttcgtcgtcattaagcaccagctttctcttgcgagaacctgtctgcccagccggtttggaggtttgaggttgcgggtctgacctgattgtcggccctccacttccctgaacggtgtgctggcgaggagatcggcgttgagcaattgggggatcagatttcatcaatacgtactcctgaatgagatgcttccacggttagctcactcaacatgaagataaaattatgttttggtcatgagttgaaggtttcagatacatacctgcggaggcggattgaatgcattatatggtacaactggcagctgatgtgagtagctgacgacaatagcatttgagaagattttatacattctctccttcatgattttaaagtccagagagtctgggtcttcacggtttggatcatgcttgccgtcaaactcaaatgctgtgcgggatctctctttgattggagataatcgacacttaatgaaatgccgagtgatttgctctccctgtaagccttgctctttgagcttcagcatgcgttccatcagttctaaggcttgggcggcttcatctcccatgggaagagagttccaggtatcttggtatactgggggaagacaggagtactcaggaagagcgggctcgggattttgaatataaaaccagttggcgtgccatcctttgtttgaagtcttgaaaggcatagagaaatacttctggctcagagtgcccctcagttgaaatccagccccaccaactacgcatggtttgtttttgttcggttgaggcttaaggaaaaagattcggcggaacagagcaaaatgaggtctaatgcccaaaaaagcttcacagacatggacgaaatttgcaatatggactatggagttcggattcaaatgatgtacgctgattccatagaaattcagtatcccacggaagaactttgaggttggaagagcaaatccaccataaaagaaatgagagaagaccacgacctcgtgtgtatcgggggtcggaaaagcctcaccgcacgctggccgccacccgatgatctccttggcagggagaacgccgtgcgccaccatctccttcaggttctcctccgtcacgtcggacggcgcccattggccttcgaagctttctttctcttccgccatcgattttccccgaatgcgctgatttgattcgagggatggcttgggagaggtgaggaattgaggcggtggatcacgggaaggattttgatcactttttgaaggtggatttgagtggaatggtgaaccctagtttgccggcccagctctgtactgtagcaaggagtggggaaaatggcgagagttccggcggggaagacgaagcgtcgtttggatctcgggttttcttgttaagggtatcggaggtgcgaatgggcctaggcctgaacagtacctcagcccaatacttttaacagcgtggcccattgtgttccttagggacttaggcattctttgctttggcaatttatgtacacaatagtgttgcccaatgctgataaaatcctttttacgcggtcatataattctttggaattattgcgatgcaaattaaaaggtgcccgacagaaaggcgttatgctgtttttgtacgcttttttaggctacaaaagctgtctgggttaacttggaatgacttgtttttatcatagtcatttcctcggtatgttatatgcctgttttcattatggtaaatagtcatagcctaggctattagacttattcattaccatgatttttataatatttggtgggtaatctttagagtcttatattcggatgcctgtcaagtgtgttcattcgtgaactttttagagtgttaaccactcggatttcttttattatggctgaaaagcagtcggctggaatgcctctttaggcgccgcgtatgcttttgtcatatgatgcataattatgctattattttgttctcaactatatgtttagtttgttgactaatcacatagttgggggctatacctaattaggtgcatctattcgatgcaccatattctttatcttttcgccctttacagtcttcgtcttcactactcggcaggccttggcatgaaaagtttgaagcactcggattattatctttgagcaggctatgatggttgactgcaaaggtctcgggggctactgtggagattatggatatcccatatctacacggcgatgatatttgggctgaatataggataccgaatatagatagaatattttatgtgtatctcgggtttgtttctcaacttgtgcatcaaggaaataccctgggacttagtcggttacgactgtattttatctgtatctgcatattccgttagggatatagattatcttttgtaacacggactcctccccatatataaggggggtccgggtgcctctaggggcatatgttgatttttcccaaatcatacaatcaataatacactcggcggattcatccccggacaggagtagggtattacttcttttataagaaggcctgaacctgtataaatcctttgtctccaaacccatacacttttccagcttgatagccacccccttttattattgccgaaatctagtttcgacactctctctctgctagtctgattcatccttgttagtgtaagagcagttagtgagaatatgtatgctacccgtgcaagcacattgagatgacagtgttacttgcaagttgcaacaccatatgcgatgacagcaatggaagagtctctgagtgcaagcatagggggacaaagcttttatactctatgcagccctgatacaaaaacaaaatggggtgccattcttccaccatcaggatttgatcttacttgtcaacaagcaattatcccacagcgtgtacagatcgagagctagcaacaaaacctggagaaatattggggcaggttggggatggcaactagcagtgagtgcgggctctggtctccggatggagacacaacaacaccaaaatgaagcagaccaaggccagctttcagagtccagatgaacatatggcaacttgagatgaacgacgtgcggcagttggatggaggcggtggcggcgggggaagtggtggtagggggagcgggagagcgggtagagaagggagcggcggccgacggcggtgaaggaaccgtcgacacgggagggggttcacaagatttaaaagttttaattgttgtttatttttactgaaacatttgatcgtccgattcgtttggaggaattgggcgcttgatttggaatctcctctgcaactaagagatgctcctaactttacccatccacatcctactaacattgcaacctcatcatatctgcaacgtcagagccaaaacaattagtgatagaacatcacagccggcaattaaattttaaagtatacattatttttctctattttgtatatatacatgcatttacagaaatatacattttccgcggtacaggaacacggcaccgtgccatcagtgcagctcgaaggcacggaacggacaggaggggcggtgccgcgggaccgacgtggtcctgcagattggtcgcacggcaccacttgcggtgccggtggtgcggcaccggcatctaagcacgcatgagtttttaataccgttcaaaacattgtttatttagttattgtttaactctgtttactactgttcacagagctggttccgcgcaatggaaccgcaggactgcattggtgctgcgtttttgagccgcgggactgtcacagtttcacagtttcggcccgtaggaccatcgcggttccgctcgcccgttcagcgggaacggcctggctagcgctctcgtgttcctgtattcaacctgtgggatacgtatgtttgtgctatttcttctcgtgtaagtatgtaaacctaaattattaaaaaaatagatataatctcaaaaaaaattctcacagccgctgttcgtgttgacactatcgaatttttttcatttttaaatttatttttttaatatttacagaaatattatatcagcagaaagatttacaaaaatagaccctgtcgccctctatttgggcggcaagctgacgtggcacacatgcgcatgacggtcattttagggggctgtgaattttgcacgtggcccccttgccgcccagtggggcctccgtgcaaaattcgcaagggcagtaaggggcttagatgcaaaaagaactagccaattgcttttttgggagggcaaaaattacatttagccccttgccgcccttacagaggactgtagggggctaagcgcaaaatgcgcacacggtgccgtcacgacgccgtgtgccacgtcaacttgctgcccaaatggagggcggcaggatctatttttgtaaatctttccattgatataatatttctgtaaatattaaaaaaataaatttaaaaatgaaaaaaattctgatactacctgccaaaaagtgagaaaggccgaaagacgccgccgtaggactccccctcgcagagaaggaataagttcactttgggtccctctatttgtcggttagtctgattttcgtcccttgaccgcaaaaccgggtatgacccgtcccccaacttacgaaaatcaggcaaacaaggtccctcggcagtatgaagggcggttttggccgacgtggcgcctacgtggctcgtttgactaggtcttcgtcccacgtggcactgacgtggcgattacgtggcattgacgtggcgctttcgtggcaattttatccgaaaaaataataaaaatcgtgggacccatatgttagctaaaaaaaaaaggtggggcccatttggttccacctatcagcctccctcctttctctcttccccctatac

SEQ ID NO: 24825 - DNA, 23624 bp, Oryza sativa
agagggggtagagagaagagggggctgatgtgggaccacatgggccccaccttttcttataatttttgtgtagctgacatgtgggtcccatgttttttttattatttttccaggaatcatttgtcacataagcgccacgttggacgaggacctagtcaaagggagccacgtaggcgtcacgtcatccaaaaccaggcacaatactgccgagcgaccttttttttgcacggagtcatacccggttttgctgggatgaaagccggactgggcgacatatagagggacctaatgtgaacttattcccgcagagaacgagatctgagcccatcttgctgtcgacgagtcacgaggagctccacttcagaactctaaaaataagagacatgacacacctgtgactgcacgagttgccctcaattcacttatcttgttcaccaaaattggatatcaccagtgtgacataagttttcacaaaatccatcggactggtatgtacagcaccttacagattccatacacaacatgcaccattcctaggaaaatatgactgctacatagttgcctccctagatgtaaaagatattaaggcaagcgacatgatcgtgcatatcaaaactaaaatgaaagagtatgagcatgacagatgactcaattcatcaatgccggggccacaaaccacataatattgtacaagttgagcaataaggcagggcacattcacaactttacccagcattgtggaagtccttcagatctgattttgacaaggatcagctcatctctgaccacagaaacagtggcatcaaggcagcctttgctgtttatatcagtcatcatcagtatcatctgtcttctgcttcttccacttataggccgcttcgaggatcttgaggtttggtgccagcgcaacctcatcagggaaaatataatccatgtactcctcatacctactaaggtttaggaaaatgttttatcagcacatttgttccctaaattgcaggcagcctaaatggaaaacaagctatgcgaacagattaggagtcaaaactatttattgtctccttttgttataccaaatttcttaacctccttttaagggcagatagcacagagtaaaatgaaacttgttagagaaactatagaagaatgaaataattgagtaaggcacatacgcagtagtggagccatcctctgaaggatctggtctctttctcttcactttccttggtgcctttttctgcactaaggtaacatcaccgagatgaccaaagctcacctccttattaagccattcttcaaggagcattgctctttcctcctttaactctggagcactagttctgaagtattcaaatgcccgttcaaatacagctgaaaattgcaataaagaagaggttagatttattgcactatgaatgacaaaaggaacagaggtactcaactggacaaagtaaatttgttctccaaattctgtttacctcggcaccttcgaacctgctctatctgctgttgttgataactaacttcatttttaatctcctcactttgactgtcttccccacccaaaccaactgaggcctcaaaactcagcatagctaatccataccttcaaatcctttgttctatcaagcaatctctcgtagagttcacaagttctgtggaattcatttttatcaatttcaaactgcaagtattcctgtaagatacaaaaaaggaaatgattaagaatatacatagcaaacaaacaaaaggaatttcatattttaaggtactcttggctgactaaaattttaaggtggtctatagattttctaagatcactactttatggctgtctgaattctcaaatattgtaacaaggattgatgctgtacaacagttttgtataaataattttataacagtttctgcagtaattaattattctagtgaaattaatgagagaatctgtcaatcataataggacctaactatttaaaaaacttcctaaaaggcccaaattttcaaaatgttctgtattctggacatcttttttccttagaatgataaataaactgaaaatcaaaatatttactagtgatgtttacaatgcatggctcattaacttctgtattgataaataaactgaaaatcaaaatattttcaacaatgaatataatggtacctttaaattataaatacatatattgttggactatggaatatggatggtcaaacattataaaatatgaatgttggaatgcttaggtaccacagcaattccgaaagcacaaggaagcaagttttttttatgtgcgggtgttgtctcagacaatgtcaattcaacaaatcactagaatatgaaattcaactgatttaggaactaaaggctaaagccatgctaggaaatatctatcacttttagtctgaaagccataaaaatgacgatatattaggataatagaaagaataacataccttccacagaacttccggcgtatcaagggctgactgtgcaatagcaagctcatagatcgagcgagctctatcagtctcaccaaggctcttctctaattcggcatacttcatccaggcataacagtttgctggagaccattcaatatacttctcatagagagtcctacaacgttcaaaattacccagatacaactcaatctcaatgtactttttgaatatcttgccctttggagccatcccaatagcatttccaagaatccgccgtgcagccttaagattcttctgccttatctcaaactgggctgccatgagccacatcttagaaaaagtgagtttcttgtgtggaatcaatttgagacactcgctgtaaacttccctggtccgttccatgtcctttgcatcaagctcctcatacaaagcataatttatccatagataaatgtatcgttgccagtaacgcttctcctctgcaggtgggatattagcaatggctctctcatacacctccctgatcctgtccttgttcccaacactctcctcaagcctaatgtaatcaaaccatgaatcataattgagggggtttttcctcacctcgtcctcatactggaatctcctcttacccacaatggcgtcctcaattccttcacggtcaccaaactgtttttcaaaggcaaggaacttcctgtacagctcttcagcctggcctttgggcaccctgtcaagtgcatacttgtacactgcacgggcgcgctcgacctcccggcacctttcctcaaactcagcaaaggctacaaacaaaacctcagcatgctcatcatctgccagcaggtctgctgcacgctcgtacacccgtcgtgcccgctccacctctccgcgcttcatctcaaactttgcgtacaggatgaatgtatgtggctgcgggtgttcggccacaaaacgttcaaagatggcccgcacacgctcaatttcaccgtatcttagctcaaatttgatgtacgagttccaaccagctgcgtcaggacgccatgccatccacagctcaaacaccttgcgggcgttggcgacggctccaagcacttgctccatatggatgtacttgtaccagagctggtcctggtccacccagggcaggagggagacggcgcgatcacacacattacattcggttcatatgccgattccgcatctcgaactcggcatatccacgccacgccagagcgtgtggtcgcggtgggcgacgtcgagggcgcgctcgtagacggagcgcgcgcgggcgaagtccccctgccgctcctcccacctggcgtacttgacccacgcgccgacgttccaccgggcgcggcggatggcgtcctcgaactccttgcggcggcggaggcggtactcggagagctcgacggagtcggcgatcttctgcttggggggacggacctcgggctcctgccgctccgggcctcgcgcaggatctgctccgcggtgatctggaccgaggccggggtcttgttcttcacgcgcgtcgcccggggcagcttcacctccgtgtcccgcttggtgaggaacccgagggtcgggtcggaggcggatgacggcgccatgtcgccggcggcggcggcggcggcgcggatggcgagcgccatggccgccggtggtgatggggagagagagctagggttagggctcgggagggccggagggagggaggaagaggaggggattttcgagttggtgcgtttgggccgtacgatctggatgcgacggtgggggttgatcgggtttcgcaaacgggggcaagccgccaagcccgcgcgtgggctatatgattgggtttttgggtagatgggctttgtgatggatccgcagcgcggctcgaattcggtttcgggtgcttggctcgagttcggtttgcgctagccctgtggtagggcgagtggtgcggtggccctgggccccgccgtgataagggcctcgatcagtcttgattaatcctaacactggattatttattcaccgttccacacattttctcctctctcttctttattgagatgattattgatggtatttaatataaccaccactaaatacaggatcgatcactgatacatgttgatacgtacaattatagttatcactgcattttcttataaaaatgctagcatgaattacttgatactgtcacaattttctcaaagtcgtggaactattaataggaaattggattgtgtttgcaatgttgtctctacaataattacaataatttaataagtataagcttacctagcgtagcgtagtgtcatcgtaatcgtaatttgggctggtttattttatgatggtgggagtggggccaaagtataggtggccaaatgggccgggccaaacgggcggcccgcggcacggccgttcctgtagcaggcacggcccggcacggcctgctacagtaacgggccgtgccggcacggcccgtgtagccgtgccgtgcttgggccgctggccgagcccgcgggccggcacggcacggcacggctcctgtagcaggccggcacggcacggcccgcgcacggcacggcccggcacggcccgtcaggccgaaaagcgccggcggcgcgtgacagactgacagggcgggcggcggtccaacgggaaggcgacacgtggcactaacggctatttgaccgttcaaatttgaaaataaccgttgggaggctaaaaaattcataaaaaattcgaaaaaattccaaaaaatctcaaatttcgccctataaatagggcatgaaccccagccatttctcctcatcccacactcctcatcttgtgctctcaagtgttttaagtgctctctttgttctcaagtgtgcatttttttttattttgacaaaatttgctcaaattttgtcaaaaatcaaaattagtttcgtagttcaacagtttgatcgcagaggtttgaagagctcgcggttggaaagatgtaagtaatattcaaatttgtgtattatttgtattgtgtttgtgaattcaataaatattcgaaaatttgtttatgtcggtttaaattttcagaatggatccgaactttccataccagtcgccgtcgttcaccttgggtgatttcgaccccaactacatgtcggggtttgacggtacctccggatcggctccaactccaccatctgtggaggaggtaccggttcatacggctgtcgttgaggaggtaccggttcaggcggagacagcttcggaaggattttccggaaccgcgagcggaagtgtttcgacacacaccggctcgaagagatcgagaacctccggtgtgtggcaaagcttcgacgagataaaggaaacatgccccgacggaagggaggtatcgaaagcccgttgtagaatatgtaggcaaattttatctgctcgttcttctggtggtacaggtcacctcaagcgccatgcggagtcgtgtgccaagaagcaaggaatacaactccggcagcagcaacttatgctaaacccagacggtacggtacgcagttgggagtacgatcccatggttgctcgggaatctcttgtccggttaatcgccaggcaagatttacccctgaactttggggagtcccctgcttttgaacattacattcagcaatctcataaccctaggtttaaagctgtgagtaggcaaacatcaactagagatttagagaatgtttatcacaaggaagcaactgcacttaaggaactgtttagtacatgtactttctctgtttgtgttacttcagatatatggagtagtagagctagagaggattatcttagcgtagttgttcattttgttgatgatgattggcaattacaaaagagagttttagggcttaggttaatagatgtctcacatacaggagaaaacatagctgaaagaattagggaagtaattaatgaatttaatcttgctgataaaatatttgctgtcaccctagataatgcatctgctaattctagggctattgaaatattgcaacctttattttgtgtgtatgctcaatcttttctactccatcagcgttgtgcatgtcatataattaatttgattgttaagactggcatgaagagggtaggtgaccacatcgatgctgttcgtcaagcaatcgcgtggttaactgcttctaacccgcggattgctgcatggaagaggttttgcaatgcggccggtgtagaagctcgtaagtttgccaccgatgcagagcatcggtggaatgcaacgtatttaatgttaaaagttgttttaccttatagtagtttactttctgattttgttcagtcacgtggtggcccaagaaacagtgacgggtcttcagtactgaacgagcatgtttgggcaattgtccaaaaattttaccaatttctagaaactttttatgattgtactctaactttgtcacatgtttattatccaactgctaatataattttgcacaaccttcttgaaattgctactttatttaaagaatacgaaaatgatgacgttctaactgaacctgtctttcacatgaaacaaaaatatttgaaatattggaaaaatatacctatgttgtatgctcttgcttttgttttagatcctaggtgtaaattaaggggattgtctgctattttatcacttgttggagatactataggtgtagattatagttctttttatactgaggttagacgtaaattatatgaggtttttggaagatatgaagtaaagtttcaggaagttcgccagcggagaccccctcctatccccactacaggtaagaagaagatacagtggggtaggatttggggtggatcgtcttcaagttcaatccaaggtggtggcagttcgtcggctacaagtggagacgcctcttcgcatgttgtggccgaagagttgtccggttatttggacagcgacgccatccaccacgaagcacaagatttcaacgtcctcgggtggtggaatgaccacaagataacatatcctgtgctttcaaaactagcacgggatgtgttgacggtgcccgtgtcgacggtgtcctccgaatcggccttcagtctatgcggccgaatcatcgaagaccggaggacgactctgcgcagcgaccacgtcgaaatgctactaagcgttaaagactgggagcttgctcgacaacatgcccaatacactgcggacaaccaagaattggccgcccacttcgagcaactctacctggatccagaccaaccccagtagaattttgttagaagtaagttctgacctttgagctgtactcttttctttgtcatggttttctcattttcccctatgagtttttacatgacaaagtttttaacgaggcagcatgtatcattgtatcctgtaatgatataaacattaataaaggtcattactatttttaacaaattcttttgcaatattttcgcaagtgtggatttacctttaaattatttcaaaataatgaatcacaatctatatttttaaatttttcaacacaacaaaaaaataccattttttctttttttttaacattagcaaatcattacttttttaaaaaacttttatttccattttttaaataccattttttcattttttaacattagtaaatcattacttttttttaaacattttatttccatttttaattttttttccttatacatttcctttccttttttaaaaaaaaaaaaacactgtgcttcacgggccgccgtgccccgaacggcccgtgggcctcgggcgtgccgtgccggcacgggcacggcccggccatccacgggccgtgcttgggccggcggctcggcacgtgggccggcacggcacggcccgtttcatcagccgtgcctaacgggccgtgccgaaacgggccgtgccggaaccgtgcccgtgccgggccgggccgtgccgcccgtttggccacctctaggccaaagtaactcatcctaacctagaggatgcaattattcaggtttagtaggacacctcttatctatgctttctccttactctgttagatatgtgatttagggtcttatgatctttatctatcaggcgtatgtgtgtagagcgtgtattgcatttgtatgttctatttagaagatatattagctctacaatcgttaagaaaaaaatattctacatattatacccattgagggcctctatttttatttcgctctgggcctccgaaatgttaggaccggccttgaacacattttgagaagataccagagaagagagaaatagcatcgggttgtagatttgtagccagctacagcacggactccaagatatgacaggtgtgggaccaagtttgaattgtgtagtatatatctataggtaactattgtataaattagctactaaattaactatatatgatttggagttagtagttggctatactattaaacttactcttaggctgtgttcttcctccacatttcccaactcatctgccttgtgtctcgtgtgcatgttttttaaattgctaaacggtgtgtttttttaaaaggtttcaatacaaaagttgctttaaaaattatactaatctattttttaaaacaataataaatatttaattaatcataagaaaatgcgtcactccgtaaacatgtctctggtgtctagaaaaaacaaaaaaccttagtgtctccggtagtgttaacaacgaaagttggtaaatttacatcggatttggagttaaggccgaagcggatttggaaggaaatcgataacggaaacagggtatgaatcggcttcggaaccgcatcggctacagtgtgcatcagcagttaccgaatcggacaaggcaagccgatgtagccgattccggcaaggtgatattggaatcattgtcggattaagttgatgtgcttcatgatgattgccatgtatggatcgagtccgaagaaggcagttgtatctattaattaggaatagtttgttagttttctttttatctttaggaaagtgtgtttagtgtcctataaggactttatgttttccttttatctttaggaaagtttctttcttgtcctataaggactattatctacccatgggtataaatatgtacacctggggtcattgtaaactatcttcacgatcaatacaattcggcgcatcgccacccttttcacttccacttttgtttttacgttccggcggaacttggcacctgacgcggggctgcatcgtcttcgatctttggcgaagggataagtccaatgtttcgccggcccaggcaattgtatcgtctacgtcggcgtcgttcaaggctgcaacagtacattcgacctcttggattgctctggtttggatgatatatttgcctacctatttatcatatgtctctgttaatctagtcttagcatatcaatttagctctatcggctgcttctcgttttagggtttctgccggtatcggctaaatcgcgttgctagattagattagcttagacatctatcaccctgaaaactcagtcaacggcttgattgtctagatattgtgtttttttttcatacttagtgctgcatcagttaagtttgatctactaagtcgtgcttagaaccataatctctagcctgcttcttgattgccaataagggttttattggggtttcagccggtgagttatctagacgttgcatcggctcataaggattgctatacatataagttggatttagccgatgacaacaaaagtttcactatttaatctaatcttgtggatttcatgacatcggacctccagccgatgtgtgctttaaccttcggatcgatgcttatttatcatatcattatttgtcgattggtttatactagattatattgttattttattacatcatcatcagccgattgcctttatatcattatctacattggacatatagccgattacttaaaccctatcgctatcggctggtatcggtatcggctattatcggctatcgaccggaactactccatcggcttgtcagccaatcggctgttttgatctactatttgcatatcttgtcagttgcaggatcaaactgactggcacgcccgcatctcatcaagatttggacctgcacaggaactaagcagatctcccaggccagtgtgttcgattttttcgtcaacacaaattagcacgcctggtgggaccacgaattttatatccacatgtctgaagaagaagtcaattccaagatcatggtcacggtggtgaatttaatggaggaacaacaatattggctcggggggcaagcatatcagtttcagcatggtggagtacatcagtatcggctcatgaaagccgattacaagatagagaaagaagataattttgaagcatgagttctcatacttcaaaagtggagggcatgtgttaatagtgaaatttggtaagcccggagtagtcatcggcttagagtcagcatcggcttcgaagtcctgagattagccgatgagagttgtcaagtcgttagttgtcggattcttgctatattcggttaaggaaatttatctactaaaggaagcttatccagaagagaccgaattcaaagagaatgcggcatggcaagttatctattaattatgaatagtttgttagtttccttttatctttaggaaagtgtgtttagtgtcctataaggactttatcttttccttttatatttaggaatgtttctttcttgtccgacaaggacttgtatcaacccatggatataaatatgtacacccggggtctatgtaatctatcgctacgatcaatataattcggcgcatcaccaccttttaccttttctactttattttatcgtccaacgggacttggcacctgacgcggggctgcatcggtgttcgatctcttgctaaggggtaagtccaatgttccaccggcctaggcaattgtatcgtttacgtcggcgtcgttcaagggtgcatcagtacattcgacctcttggattgctctggttcggatgatatacttgcctacctatttatcatatgtctctgttaatctagtcttagcatatcaatttagctctatcggctgcttctcgttttagggtttctaccggtatcggctaaatcccgttactagattagattagcttagacatctaccaccctgaaaactcagtcaatggcttgattatctagatattatgtttcttttcatacttagtgctgcatcagttaagtttgatctactaagtcgtgcttagaaccataatctctagcctgctttttgattgccaataaggttttcatcggggtttcagccgatgagttatttggatgttgcatcggcttacaaggattgcatacatattggatttagctgatcgcaagaaaggttttactgtttaacctaatcttgtggattttatgacatcggacctccagccgatgtatgctttaaccgtcggatcagtgcttgttctattatatcatattgctagccgattggtttatactggattatattgttattttattacatcatcatcagccgattgccattatattagtatctacattggacatatagccgattgcttaaaccttatcgctatcggctggtatcagcatcggctattatcggctatcggttggaactactccatcggcttgtcagccgatcggctgttttatctgctgtttacatatcttgtcagttgaaggatcaaactgactggcacgctcgcatctcatcaatcgttggacctgcacaggagttaagcagatctcccaggccggtgtgttcgattttttcgtcaacaagtagtgaagcagcccgaattcagattttctagaagatatttttttcagggacgggggtgaattttattgattaaatagagtcattacaatctcgcagaacaagatcatgaacataaagtaggagcatcaagtctccacaccgcactatgtcaagtccttctatttaactaagctagttcatgatccactcaattacaccctcttccaacatgatttagaccgatttcctacaagattttctatggacacgactagattgacgcgtgggtttctccacacatattggtggcatacggcatacccattaggggtgaaatcgctaatacatgactagccatgcgcctctcccccgcgccgccatgtggcgcgcgcggagagggggcacgcggtggaggaacatgtgcgcgattctttttttttcggtttttctcttgtttccattcggttttttcgtggctttttttttttatttttttttgtttttcccttttggttttttctggtttttatacaactttatatgcgtatgtatagaaactctatatacgtacacaaagtttgtatatgtgcatataaaaaatttatatatgtgtctttttttatacgtatgtatacaaactttgtgtataaggtatacaagtttgtacacgcatatgaagtttatatacatgtatatatattttttatactcttttttttgttttttaatacatactccctccatacccacaaaacaagtcgtttaggacaaaattgtgcttactaaggagtgattaatttgaggctattcttccatgtctgcccctattaaatgagggtgcgggtgcattcatttgagaagcaaacagagctcaaatggctactgcagtgaggtttgaaggttgagtgcttgggttcgatacttggtgagctcattacttttttgctgattttgcatggcgcttgcgtgtgtatttttgggcacgtatttttcgttttttcgtctgggcactccgtttttgcgtatttttgggcgcgtatttttcgttttttcgtctgggcactccgttttttttttctgattttgcatggcgctctagcgggtgttttttgggcgcatatttttcgttcttttcacgggtagatgtcgtttcagtttcaccatgcctatttaaacggcttcttctctttccattattgtgcttaacctgctcactttcagtccgcgagagtttccatctactgcatgcaaggctgttccagctgttgctggctttgatttgaatgtccgcctagaagaagatgaggacggcaatgttcccttccatctcaacgagccaatattggaggatcacaacgttaatggtaatgtgtttgttctttccttttttttatattcacaacaacaacatcaactaagtttctattctaagttttttctttcctttttccgacaggatttgatttgaacatgccactagatgaatttggtgtagttgatttagatttttttacaaaaccacgctggtaatcttgatctcagtttgttctttcctttttcatttttttattaaagcagtggctattttttttgaatgtgcttgttttttttctttgactagaacatgctgtacagaaccaagctcctgttgaaggacaacatcgaaggaaggacatgacagaagaagtcacaaaacaagtgtactaagcattgttgaaggacaacaagaatgggaaactaggcaagaaagatacaagaagggttgctgatcaatttggagtgcacattcgatcagttcagcgcttatggaagcgaggtaaaatccaacttgctcataacattccggttgtggttgctagtcacaagaagggtagatctggtcgtaaggcaatccctcttgatttggaacaattgcgcaacattcctctcaagcaaagaatgaccatagaagatgtgtctagtaaactaggtatttccaaatctaggatacaaaggtatttgaaaaaaggtttgcttagacggcactctagtagcatcaaaccatacctcacagatgctaacaagaagactaggttgaagtggtgtgttgacatgattgatcaaagtttggttggtgatccaagatttaaggatttttttgactatgtgttcattgatgaaaaatggttctacctctctcaaaaatctgagaagtattacttgctacccgaggaagatgaaccacatcgcgcttgtaagaacaagaattacatccctaggctcatgttcttgtgtgtttgtgctcggccaaggtttaggaatggagaatgtgtttttatggtaaaattggttgttttccacttgtcacttatgaacatgctgtgagaagtagtcagaatcgtctttgtggagaactagtaatcaagccaataacttcaataacaagagatgtgattagagatttcatggtaaacaaagtgttgcctgccattcgagccaaatggccaagagaagatgtgaacaaaccaatttttatacaacaagataatgcaccttcccatttgatattggatgatcctgttttttgtgaggctgctagggaagaagggtttgacattcgcctagtttgtcaaccacccaattctccagattttaacattctagacttggggttttttcgagctattcaagcaattcaataaaaaaggaggcaaagacaataaaagatctagttccagccgtggaacatgtaaatggatccattgttcacttgtttcattgttttgttcaacaattaaagtactcggtgaaagatttattccacacatgttttgtaggcattcttagagtactctccatggaaagcaaacagaatgtttgtaacactacaaactgttttgaaggaagccatgaaagtaaaaggtggcaacaagatcaaaattcctcacatgcaaaaggaaaaactagagagagaagatcggctgccattgcaaatctcatgtgaagcatccttgcttgctgaatgcattgctagtctcgctgcagcaaattagaagtagaatattagatgatgcaagcatgttagtctttgcaacatgctagccgaagcaagaatattagcagcaaattagtttttgcttgcatgttaagtcgactgaatgagacatgtaacttactattcttgcttcatctttgcatcttccaactccttcatactgtagatctcgtccaactttttgataacgtgctcaggaagaagtatggtttcaccatccatttgaagtttctccacatcaggaatgtataactcacaatcaaacttttccatgttaagcaaaaaccttgctatgaggtcgtagtcttcatgtaaaaggccacaacgggcacacttgcgagcacggcggcgagcttggaagcatgcttctccgaagacgccgccagcgtggaatgtgccgcagcgaggacactgcaccacctcgacggactctggtaccacctcgacagagtccggcacctcgacggagtccaacgccatctccgattctagcccctcgacggagtccagcgcgttgacgatgtccagggtgtcgacggagtctggcacctcgacggacttcagcgactcgacgtactccatggcgcgaccaagctctgaaccctaactatagccgggcggcgaggaagagagacgcgcatgtgcgagcggcaagcgacgagcgtgtgctgcatgcgggagatgaagaggaaagatcgagcgccattaatcacgtccattcagcttaaggcggcattaatcacgtcgcctcgtttcttgcctcgccgctcgttgctcggctctcgcgtcaggggcatacgtgtccaaactaaaccccgctgaggaacgacgacttgttttgtgaaaacgggtaagagcccagaacgactttgttttgtgggtatggagggagtatgtatataaactttgtatatgtaaacaaagtttatacatacgaatataaagtttgtatacacgtatatattttttatatacgttaaaagtgcatggatatatataaaatttttatatatatgttgtatatacacgtatgtatatttatatacatataaactttgtattcacatatacaaagttacatgtatgtacatacgtctattgtaaatagaaacagtacactagaaggaattagcatatgtatgattgatctctttttattaataattaaaattaaaaatagttaacttgacactacgctaaaaatgctatattttgggacggaggagccagaacggacgttttcatttttgcgtcgaagacggccccgattgcacattgcaggccggaaaccggccgagcccacccattagaaaggacggacccaccgtgcagagctctcctccgctccccggcccggtcacgccgccaccgccgtcgccaccgctccccgccggccgttgtccgtctctctcgccgcaacctcgaccacgacctggggctggggcaggctccgcctcgccgccgcccggcgactgccagtcaggctcgcctcgagccctttccgagcccaacccgtagctataggccctaaagtggagttaggtccaacgccacattgcctcgccgacgcaagtagcccaccgcaccactgtctcgtcgactccgctgctctacaacgaccactccccgaacccggattgagagcgagcgagagcgcgcgcgcggggagaagccgagggtgaagtcgtcgtcgtcggcggcggcggcggcggaggaggaggaggaggagacgacgatgcagtggtacctggtggccgcgctcctcaccgtcctcaccagctcgcaggcaagccccggccccccctccctaaaccctccacctcatcttccccttcctcttcccgcgacgcgctgtccagatctacgcgctttgggtttttcgtcgacgcgtggagcagaggcctctgtaggaggcggcggcggtggcggcggttgctgctgcttcgatctgcggcgatgtgcgtaatttgatccattggagttgtggtttggagaaatgcagttcagataaggtgtggcctgggggtccgtgcctgcttcagggagcagctacctgagcaggcgtgttctgaaggtgtccattttattcccttgttggggatgggtttttggtggaattgtgaagttctctaggtgtttgcaagttgatgtaaatggtcacggggacgcaccatgtagaacaaacttataattccattgcgggaatgtgtcattccgttcggttagtatggcatgaagatggcccttcatttttcatactagacaactatccagaccattatggtcattttgcacatttcctggtgttccaaacagaattctacttacagttaattccagaaatggaaaaataataggagtaaaatatccttatgagaagaaagagaagaagaaatcaagatattaaatgcaaaagaaatcaagaacatgaccaatcttcagcgcgcaaccaagggctatgacctgacgaagaatctcgggctagaaatagtgcggcattagggaggttaagatggtgagtgacttctctggagcttgcccagcagttatgagatagtagtgtactccagaagggtacaccagaatagcatggtactgaaatgtttgattccaagcgccaaaccagaatgacccacagaacaaaactgacaacttgatgtagaaaacccaatcattggaggttaacgagcagacttcatggtcatagttaaattaacttaagttattctagaaattgtccattacttgtttttttccttcaattgcatggtttattttctaagctctagagtttttaattctcttgcatatgtgcagggtatcttgactaccctctcgcagagcaatggcaaatataagtacgactacgcaaccattccatttctcgcagaactcttcaaggtacatgaagtttatgctattgtttacagtgatatctgtatatcctagttactgaaggcactcaagagataacattcatctatttatttattctgcatgctgatgttaacctgttcttgatacagctgtctttctcaagcttctttctttggaaggaatgccagtcttcatctccaccaaggatgacaaaagagtggaggagtatacgactataccttgttccttcagtcatatatctcatccacaacaatgtgcagtttgccaccttgacctatgttgatccatctacctatcagataatgggaaaccttaaaattgtcacaactggaattctgtttaggtgactcttttgtaccttaatgtcaaatatttccactgttattcttcctgatattattggcatgatagaatatatattaaatatccttgtgtactctgcttcatttgataaaattcaaacttcaagtgcattctgaacttgaaagcagtcaaagacttatccaaaataacatacacgatagaaatttttagcttgtcttcaaattttaagcagcttacccataatgccaattgtcattagcatatattatctgtatgtttgatgattcttgataatttaaattttatattttcaactattctggtggttcactatatgacactcttttgttgtttaaggtttgccctgacccttgaaattcagttgacttaatgtccgttttttcaggtcataaaataatttaatttgctacactgcaatcaattcactgaaatagctatacattttttcattttaatgtttcttgctccacaaagtaagaatatcaactagtaagaattgtgcaccacacaagtgttgcagagccattgaatttgtgacagctgacaattgagaaatcaatatcttatgtttgtgtttcaaaacttatgcattgcaactagatattgacacttcatttagttgaccagccaacatgctgaccaaattaatttctggtgcttgattgattaagtctcattttctctctaaactgtataggcttgtcctaaaaaggaagttgtcaaatctacaatggatggcagtagttttactggctgttggaactactacaagtcaggtttgtgaacattttgaaactttattcccttttgttttagcatatactattgggttatgcttatgttatctcacaaaactcctcatacaaacatgttacaaaaaatggactggtggcctgactggaaaaaaaaacctagtctggtcggtttaaataaaataatgattgagagaaaatccaggcagattgacttttgctactgttgaggcttctggggttcaaacctgggatcttgagtcccccgaatgcatggattgggcctctaaccaactgagctgagctacacatttgatttatgggagatcttgtagatatttaaaaaatgtttttattatgtgtagccttaaaatctattgaaaatatcatttccaaactggccagttcaccggttaactggtcagatcagcaaacaatgaaccagcaaatgaccagttcaaccatacatgttttttcatactacgataccacggatgactgcttcatcctttatggggcactcgtcttagtggcatgtgtgtgtggatccaccttgtaagtgtgataatcattgatccgttctgatagtagaaaacatatttaagtctgcctaacttatatgtttttaacttgatggccgcaaactttgtgaacatgtaactgagtaatatgtgactgtatttttttcttctattctttggtgcggtatatttacacctgatatacatgctccaagattggatttttcataatgtttcacacttactcaggtttccaatagatatacatataaaaatcagatttctgatgttcattagatgatcgcaagctatttaatgtgtaggaaagatccactgatattggacacttctccttttttcatgtcaaaatacactgcaataccattaatttttctttgaatattttactgtaactatgttaagtcactaaatttgtttttcttactacccttctgttgcttacaggttaaaggatgtggcgatgctccatgtgattctcttttttcagccccatttcagggttacatgcttgggatactttctgcttgcctttctgcactagctggtgtctacactgaatatttgatgaagaagaataatgatagtctgtactggcaaaatgtacaattatatacgtaggtatctatatctaactctggtccattgtcacagacctgcacaggccaaataccttccattttcagtgtgcatattttctgactatacatttgattgcatcaaaacaattttaaggctacctggtgtgctgtcacaccaggtgtggcaaacactatttcacacttatcttatgcactgtcaggtttggtgttatattcaacatgggatggcttatctatggtgacttcaaagctggatttgagaggggtccatggtggcagcgtctttttaatggctattctatcacaacgtggatggttgtgttcaatttagggtctactggccttctggtctcatggctgatgaagtattctgacaatatagtcaaggtgacagtttattcttaatcttagctgtgcagaaaaaaatcatctcactagcgtgtttcctttatactgtgaaagacgtaaatgaagataaagttcacaatataaaaataagttatccacagatccaaaatccatggacgatagcatggggtcagtcatccacctacatatacacatgcaaaagaatcaagatatgcctgattctagtgcctgcagtgcagattgatactgtgtatttgatttcatgccaattacgtatttgctatttgtcaaagaaaactagttgaccagactcttcaatctttagagagcatgctttatttgtactgtacatttgtctttaagaaaacatggaaaaacaagtatatttggtgtcctaaagcaggataatgtggttattcatgtgtgctgaacataagattttcaccatactgaactagttaattttttttgtgagtttgtttcttctcttttctttccttggttgagctagctgctattcattcccaatgcctttctactggccactccttgataactccattttcctgtccaatcaagtgacccatggagcggcagttcaaactttcgcctatagacattattattttttgtcagattcattgaaattaatagaccttttttcagtggtacttttttttttaacaaaacgatgagcgccgttttcattgaatatagaaggggtaaactgtacacaaaggaactgtaaaagtaaggggccttaggccctagctaactatactgtaagccagtctccgagtctttttgctcctgccaagacccaacccaagttttagcctcctccttgatttttgccatcaaactggccgtcgagagctctttttgttggaaggttctccggttcctctcgttccaaatctcccaggtcactagcagcgttaaggtgcatagtgcctttttgggtactccttttgtgtttgcgatggcctcccaccactctagcactgtcaaaatatgttgccgctgggtggggtttagctgggcgcaagcggtgcagtctgctagtgccgcccagatcctttttcagtggtacttgtattggggtttagcaaaatgttaatgccatcacaaatctgtagacagtaagaaggatatgccttttttatcttatacaattgaagttgaaggattgtcttatgaacctctatttgaacaggtgtactcaacttcaatggccatgcttttaacaatggtattgtctgtatatcttttcaatgtgagagcaacacttcaggtacctctttttttttttttttttggttattggagccctttcatccgtttcagtttattcaattttttttacatgttggatatgaaaccatgtagattactgttcatacttacacatgctctatcccctcccttttacagcttttcctaggcattgtcatctgcataatttccctgcagatgtattttatgcctgtgaacatgcttgttgaattgccacaagcattgccagttacttcaaagtaggtacatgccagtgatgccactgttgtttaacctgttgatcagtgtgtacggtcttctgatttaagcagaaaggttagttgattatttatagctcagcttttgtgagtaatcccatggaaatcggaggctgcaatctccacagcatatgtgtacagtgtcatgtttcagataacgtgaaagaagagtggagcaaacatgggtttactgctacactttgccaattttttggcaaaaaggtgaaagcatgccttggaaaaggaaatccagaatccctatacattctttagttagtgcttaatggtttattcaccttgtatctaaattttctgacattcagtggatgcaaaactggtgagtgatcatgaaatagtaaatctttgcagaaaatttaagattccctcgtcagttgcaatattgcagcacagcagcatccatacttttttttttgtttcaggtaggatgcagaacttatttttatcacttgtcgagcagagctcctacattattttcaagacaaaaatgatttgataatacatatttgacatcataatcaaataatctattttttttctacgatgtaaatagcgtagttgacaatatgtcagatgacatattccaccgggactagtttctagcatcttttattctattaccctgtatttggatcatcaacaattacacgtaagggttttccattcctgctggcggtaactatctaagcttattgtgaggcatggacttgtcaaaattcatttgatttacaaaggtataacattgcaaaatcaatttagttaatgaatcagattgtttattaggctctgttttcttgtcatactgctgcagttgcttaacccttgatatgcatcccatcccatgatttgcaaaactagaaattctatgatgtccagataaaatttgcccatggaaatggagggcccctcctatagtaccgtacctagaatgatgtaaaatgctttcccaaggatggagtttgtatgttgtctttggcttgcgtgcaataccaagcttgctggtcagtggtcactgaaatatctttgaaactgccatatggttattgttgttcattggaaaacgatataagttggtgtaaatgtgcttgaaaattgatgctagggtttgtgggccgccccttgttttgctaattttagttctgcccagaacccttgaatagtgtgcctggtctcaaactgaatttaagtccttgttagcctgtataacaagtatatcttgttattcctcactacagtagtactagtaactacttcctccgtttcatatttatataagactttctagcatt

SEQ ID NO: 24826 - DNA, 30553 bp, Oryza sativa
gtgggcaatgctagaaagtcttataacctgaaattgaggtagtacttaatactatatgttggccttcggaaatagtgaaacatgtgaatgattaggataattgctagtttctgtttcagaaatttggccactgttaccttgtacaaaatcaggattttgtgtgttcgacatattgttagaagccatacatgtgaatcttttgctaattctgtgccctccactcctgagcttatcattcaaacccaggtagtttatgttttttttttagtggcatttccaggattgaatttttggtttctttccctccatcaagaaatatcttgagtggcaattttcaggacagagggattctttcccctccctcaagaaagcttttcacttccagctgagctagctgtagtctactttctagggttctaaaggcttacccatctgaccgcatgaacagtggacattcctttatctggctagtatgggttaagggataacttgcttttcatgtacataaaaaatgagtctaatgctttctcaaatttagttcttttatgcatgtttggttttttcaacactataaatgttcacttcattcatatgtgagaattgagatgcaaaatatgttagctgtcacaaacttaagttacctgcatcagctggaaatttgtctcagtgcatactcttatggaacttgacaggtgtcatactacaattatgcaaatgcttttctttttttttttaccctgatctcagtaccgtagtgcagctgtatccctttgggggaaggaattgatttaaaaattggaaaatcaattgattatatcaattcttcctgtataaatgtctgtatttttttttagtcaagtgatctcttggagcgaacatgcttttgccgattatattcttgatcgttccttttggagctgttgggaggaaaaaggtaaggtgggcaatatggcttgtcatgacagcattgtgtttgatatttcaagtaggcattgctaaagaagaaaagaaatatccctagtaaccataaaggcagaaagtggtatgcaaaaaattggagaaggtaaccatcggccaccaccgatgaatgacctgaaaagaatgtctctgttaggtggaaatcaactgtggttttcccagttcactggtttcccttcctcctgtgtcctgacctttacctcttccccgtcttgagagtaaaaggcaaagcaaaactgaccatgtaatgtacatacatttcatgccctacatggcactggagaaagagacatgctgtacatggaatggatatcgcctctgccattgcagtgaggtctcttccttctatattcttatatgttgcgggcaaaagcctatgcaaggggtggatgtggtttttggtgttgtttttaatgcggaactcttttttctgaatcctatcaaactttttttctatacttttttttttgtgttccaaaggtgtcttgtttcaactggacaagcaatctgaaaaaaataaaaacagaaagaaatgtgggtttaccgtgttgcctgcctgaaacaaagatgctgtttgtgcacaagcacacgtacggcgcccccagtttgttgtcgcccatagcatcggcgtccgaagtggccactgcagtgcgtgcgtgagactgaagcagcaagtcacatccgtggaacggaaatgcttataccacaagctagttctgtgttgcatgccgaactcgtgcaccgctcatccgaaccacattccattatccccctcatacgccctaacagttttaaaaatttccccatcggttgtccccgaattgaattcaggttattgtttcagtcgtaactgattttgaatttaattagagggtccgtcttttcctttttgtcactctgttttaacttgagtaaatttcacaaaactacatgttttatagttcaagttgcagaaaaccacacacactttaacacttgggacttaagtatatatattttaaagtgtagaatgaatggattcacccgcgatatgacgtgactgtttcacctaggacgagaacatggcatcctattatcagccatcgcacgaaattaataggatgccacgtcctcatcttagatggaacaaccacgtcatctcacggataaatccatttatcgatagtgtggttttgtgaaactaaactatcaaaatatatgtacttaagtgccaagtgtcaaaatatgtgtggttttgtgtgtggttttctgcaacttgaaccataaaatatatgtagttttgtgaaatttactcattttaacttctactttactatgttagtaaaaatataaaattctagatataatcattgtgcagattagtagcgagaagttaatttttgctgagacaaagagtacttcactatgagtagcaatataaaattttaccctgaaataattttcgtagacttataatggacaccctactgttcgttccttttctcttaccgatctaaatggcgtggttttaagaaacttacttcataagaaagctttccaaattcaccttgttaactttttaatatttatttgtgcccttaaataatactccctccatcccattttaagtgaagttttgggtttctatgtctaacatttaaccgtccgttttatttgaaaaatttataaaatatttttaaaaaataagtcatgcataaattactattaatattttatcatctaataacaacagaaatactaataattttattttaaataagacgaagagacaaacgtttaaaaaaaaatccaaaactgggagtagtaataaactctgtgtgattcataatggatcatccatcagaatatatatatagtaccgaaaagaaaattcaaataaagatgaatcatcagacttccacacaaaatgattagcagcagcatgagtggcacggcatatcccagcctcttaattaaaccccactcgtaattaaatggtgcgcgccaactatgcttaattcaacatctcaccactaaaaactcgcgatctccacttctccgcgccacaatccatctctctagcactctccacaccattcgttcctctcctcctcccctataaaaaccctcacactcatcagcaaccttctctgtactgcgaccaacgacaaacaccacaagctaagtaaggagtaagtagctttgcaagattcagcacaaatgggatcgttgggccctgctgttgtggtgagcgcgagcgcggcgaagatggccggcggcgggcagcagccgtcgacggagaggaaggagacgtcgtcggcgttcggcggcgggtgctgcggcggcggcttccagatgccgctgcactacccgcggtacaagaaggcggactacgaggcgatgccggagtggcgcgtggactgcctcctccgggagtacggcctccccgtcgacggcggcgtggaggagaagcggaggttcgccatgggcgccttcctctggcccgaccagtactgaagcttgctgtgcttcgccttggagatattcagaagccgatcgagcagggtaccagtaactgcatgatgctaatttgattaggagcgctctatatatattaattaatctattatgtgtttttattatgctgagctcgtgttaatctgtcatccgcatataatggcgccatggaaatatggaatgatgatgttgtaaatatttcctactactacgttcataaagatatggaagaatacattattttgctcttaaattaattatgttggtggacgtttaattatgcatgcaattttcaaaatttatatttatatcagtgaaaaatgtgttatgcgtccgcctcctcgtcctgggctcattaatcaacagcaaaagtgcaaacaggttgtggcgatcctggttgtcttgcttggcgaatggcgatggggcagtacgagggaagagtggttcctcttctctctctctcgctctctccaattctccatctgcatctccaagccaggatggtaaccgagagctcttgcgatccgtttcagtgatcaaagtattgctggtgttggacggttgtagatctactgtaggtgtagctgcagtcggcctcgtattgcaacggtcagttcagtgctagctttctttcctcaatggtgtgtattagtattgttggcatcacaactaaaaaaacatttttccacgcggttgaggcgtttgtctgtacagaaaggtctaaaaaataacgttcgctattttcgcatgtgggtgcttatgttggccacatgcaaaaataaaaatccaaaaaaaatctcaaaaaggaagaaaaatcgaaaccctagctcctgatggtggcagtggtgcggatccggctgtcgcagcgcaggccgtggtggatcgggctaactcttcctcgtcgtcatcggtggcggtgccgagcatggagccgcccactctcgaccacttccctgtcattgtcggcggctccactgcctgagatcgctaagccacccgctgcccagtcccggctgcctcctcatcgtcagcgacagcgccgctcaaggccaccgctcccgctcgcctagctgcccgccgccgccagctcccgctcggaggagaggagaggagagtaagagagagaatagaggagaggaggttgaaaaaaaattgaagcggtgaagagggaaagagaggagggaaaaaactgtggaaaagaggggtatattttcgcatgcggaccacttaagaggcccacatgcgaacatatattttcacatgcagccccttaagaggaccgcatatgaaaataaactatttttgtatgcgggcccttaagagactcggctgtgaaaatagatttttgcatgtgagcttcttaaggagctgtacgtgaaaatgaaggtcgatttttacaggtacgactagttatggtccacctgtaacctatatgggtcctcgtaaaaaaattgttttttaagtagtgcatgctgttgcccacttggctgagtttggtgctagtttcttttttcctttcttttctcatgactatagctttcgagagttataatattgtatttttctcttgctttatccctacaaactttacactgactaaccgtttgtttaagtagttcgtactttacatttaccctagttcggaaaagccaatattccggcagagatcctagcccagtacaatattccaggccagtacagttcaaactgaaaggaaaacccgttttactcccttgaattgttctgccagaacactttacattacaaacagtaggatttgtagaggactcaaaatcttgggattttattcctttagtgtccttaggactgaagcaatgaaactatgaaaatcctattgatgatttagtttagatctatgccccatttcgaggaaattaaaataaaggctcctctggatggaatgaaattcaaacgaattttaaaggtttttaaacctcaaaaacaaatttccctatatgtgttgtttggaacaaaggatttgagcatttcaaattcataaaaaaaattacaattagctcaaacatcattttatttttctttggagaagttcaatgcatcttttatctttatctcttttccctctcacaattccatcaaaatcatgtggtttctattaaccatccaaatacaatataatgtctcaaattcacgtgctttaaaaaaacatgggatttgcgcatacgtgacattccaatccttgtgtttttttttcatatttgcttgttttttttcaaatcctgaattccaaatcatgagctcaaacctcaaagctcttatagtttcctttgaaaagtctaatgcattctctacccccctccccccctgatctctctatgacccaaataaacttcctaaaaaattcctatgtttatttcaagtgaaccatccaaagtcatattattgtatatattcctgtgttttgaaattattgcgggttctataagagcatggcagccaatcccggcatttttcttgtttgtatattttaaaatcctactttccaaacgagtccaaatgttagctcaggaatcctaattagcttttatgaacaaatagtaaaatttttaatataaaacaaaaatgttatcaaaatatactcaatgttctaaatatttaatggaactaaattgatgttgtagatgttgctaattttttctataaatttgatcaatcttaaagatgtttgactaagaaaaaagtcaaagcgacttatgatatgaaacggagggagtacaaacaaataaaatatatctacaatacttatagttttgtgggatgttttttttttgtcgatgagaaaaaaaacttagatattttcagttgagagtttcacaaaataaattctaagtctttacaactagtttcttgaatcatgtgggtcaaatgtttctatttgtatatgacaccaattttcatatggaatgttttatgtgaaaatgatgcttatacaaatttgagtaaatttaataaactccaaatattttgacaaagatgcattttagtccattgtgttacaaaactagacatttaaggttaaattcatgaaaccgctatggatttaacaatatcacaaaattacagatttatcataaagctacatattgtagagggttctgtcaaggcattgttaccctaatagaggcattaaaattatagtttttgtgataaatttggacttaaattttgtagtttcttgatgttgtggcttaaatatgtagttttataatatatttagcctcgaatgtatagttttgtggtactataggttaatttgtgtaattttgtcatagtttttttttcaaagtacatatatagttttgtgacatttactctagtatatttttttattctgcttggaattgtttaaaaatattttttcagtttacatgtgagaattctttgaaaatgttttgtttgttgcaccgtcacctcttatccattaaccattctacttctagtgacatttctatccaataagtcatatttgaagttctacgtttgaaagattatatgttagtagtatcattttgtcttatgttagtattttttaagagtctttaatcactatgtacacagtaggttggaacgacctaaggtagatttgaattgagtttttaaactgcatgcaaattgttagaagcaatttatattttgtaaaatataaactaaaacctcgagagtaaataaaacttttcctaagtgtgcatacataggcaacatctatactctacagtgatggatggtggcagtgaatctaatacctaacaccgatttttacaattttaactaaatccatatattttttgatattatggaatagtccaatactgttcaaacaaataaacaccatagattagaataagcagacaagccatactatcataggtagtattttatttaaaaaaatccttttatacatcataaacgtgagctttttctagtgtttatagatcacactagcttgaaaaagaaacacatattttggtcgaaactgatgcaaatagacaaagatcaaggataactgtttgattagattttataagtgatataaaatgaagaaatattatagaagttgatctttctaagagtgagtttgaggtagaagtgtttgtcattataggtcttacattatgctacgtcgcaactaaggagtaaggactcgaagtcccgaaaagaaattctttgcgctctcaacttgaaacacaggccgggtttagttcctaacttttttttcaaacttccaacttttccatcacatcaaaactttcctacacacataaacttccaacttttttcttcgaacatccaattttaatcaaagttccaattttagcgtggaacaaaacatacccacagtttcatttcagacaggtaactctggacagtcacctatcaaacactgtctgaattagatcctcagaacttcagaccctgtagctaccattgcatagaagaaacccactagctagttaattaatacaaattaattgttgttacctcccaattatgcagttactaaggctgagttttttttttaacttcaaagaacaactttctcgtttttctttaacatgtttcttaaatagctaaatggtgcacttttgtggaataatttttatatagaagttttttaataaaataaatctatttttaaatgtataatagtttctctctctgaaaaggacaagcttatgtctggattcaaagttaaaattggtttttgcagaacgcgatataacactcaattaatcacaccttaagtactcaccttgttttgcacgcagcaaaaaaggtcaagcaatttgcttgttcgaatgcaattaagctaagtgttgcttcttgtagccacatccttcgatcaatcatgcatgttacagatgatggagacatgatcgagctcagacagcgacgccggcgagatgcggtgcccggaggccgacggcgccttgccggcgatcgagatgttcatttgttcagaatttattgatggttcctgtccatattcttctgaaacttggcactgttttcattagcgatggatgggaatatggacacgaactcttgagtgttcttgtcaggccaagtcgttggctgctttgagtggcattattaatgcgaaggtcaattatatggatctactggacacacccatcgtttgcgtctcgaataatctcgagaattatgattgcgcatgaataataataattattattattattatcacgccgtgtaatcttgtggcgaagctttgtttcattgattcattcaggtttaattttgatattttctattcgatggaaaagaagggtaattcacttttattttacttatatgtttaatatagaattatatatactagtatttgttacagattctagagtcctaattaataaattataattaagctttataagtatatctatctattattatatactaaaagtccattaaacttcctacaaacgctctcaagccgccacgtggcgctctaataaattagagaaaatcctagaaattctaagaaaaaattaaaacatctacccctcgattttcacttaaattggtgggtccaatattatacactgttagatgaaattgatcttaacacaaaccaaatactatgggtcccatctctcctccttctcccacgcatatgtacgtacgtatacttccttccttttctttttcatttttttcttctttttttccatttatataatggatatatatatatttttaaataatcgatcataattttacaaagaaagaatttaccatcgtacaactcacatgtaactaaattagctctacaatatttgaaagtaaaatttacaccattatatgttacccattaaattaataatgtaagataatttccacttaaaccggtgtactcattactttgtactattatttaaaaataatgcactattttaaaataaagtttacacaattatactgtgcacctatcaaataaacaatttaagatctatatacgtgcactaaaccgatggacccattatttaaatcatcgtatctattttttattacattggactcttactctcaaataatacactgtttcaaaataaagtctacaccattatattgtatacccattaaattaacaatttaaaatatatattaactaatttacacttatactagaaccgatggacccatcatttaaatcatcggatctattatttgcaaataataaagcgtccaaagttctcttttggcccattgcacaatgcacgtctacacctttacctttcgcacacgtgacaagcgttgtgtctgagacatttaaggtgatcacgaccgctgcaacgctattgctttgccacatatcaaatcatatatggagatcattaattttgttaataacatgaaaagaaaattaaaggtatgatgcaacgagagaagaattatgcaccgtgggttgtgttttttccagcacttagttatgtttaagctgaaaccgagagttggttacagaataattataatgtattatgttatgtcgtatttggattttgtactatttgttcgtataggtgaaagaaatcattatgttataaatatgagcataatattaacgaataacaatagaactcttactaagacaaggttgttataagggagtttatgacccactttttttccctgattccatagttttgatttttgtttgcacactttccaagtttctaaatagtgtatttttaaacgataatttaactttctagaacctaattcatttgtttatatcctcaaatagctatcacataaatcagataattcatcaatttaacctgtccaacacttttttttcatgcgaatcatggtaatcagtaaattggggatcaaccgataatcaaagtcgtaaaataaatatgtaagagctactatgcacaactataaataggtgtcaaaattaattgttattaattagacacataattaatttcttatataaacatggatgaagctggaacaaatattaccatatgccccatacatatatattacatggttaatattctaattatatgtgttaagtccttaaaaattccttaaaatgctctcaagctgccacatggtgctctaataaattagagaaaatattagaaattctaaggaaaaaaagtaaagtatctattacttgattttcacttaaatcggtacgtccaatattataaactgttagattaaattgatcttagaacaaactaaatactacgaggtcctacctctcctcccgcggcataggtacgcacctacatacgtgggtatgtacgctttccctcccttttttttttcatttttccctttcttctttttttccatgcatacgcttccctctctttcttaatatatcttgcgccttcatgagatgatttaatcccaggaattttgagtatcttgctctcgcatttttcatttgtggccatactacatgatatgtatatagatggactgcattgataattaactagtaatagtttcttatttagtcaaaaaaaacatgattcaaaagtcgtaagtacttaatctatctcctactcaaaattttgtgaatggttttctaagatatcttaagagaaatagaacccttaaattattatgaaataacattatatgagatgaaatttttgagcaaacaataattgtaactttcaataatataagtgcccgcgcatgtgcgcgggccaccttcctagtttttatataaaatttagagcattcacgatgtagaaatgaccttatcaattactgtaagagcatgagaagggacagcaccagccaccagcactcatgctgcaatggttttgtgcgcgagaatcaatctagcagaagtgctcaagcatagtaccaactagcgagaggccaaatgaagtctaagttttcattgatgccatctctaccactccgccactgtccgttctgggggcgccgccggcgttgatcccggtgacaagaagccatcatcgataggctctgccgctagattttaagctatggtgaatccccaaacttacactgtaggggagcggcgtgctaagacctgcggccactaaagcgcagaaggtcacaatgaagaaatttaggattattgacgaggatgaggaggtaaatgaggaggtggttcaagattacatccaggtcttcgacaagccgctgccgccatagcatgtgcaggcactggtggaacttctgcagctcaacatctccgcctctacacagcaactgccaaaggacgacgcggtgacattgccaaacgccaccctgcaggctgtggcatcgttaacatgaggcgtcttgccctgtgtggtactgaatagtgtgtgagtgtgtatatgtccttttaatgtagagttttaatctgctagtgtggaatgttagaggtctaaatgatgttgccaagagtgctagtcaaagggtcagtgttgttctccaattcttatggagtttgtttccaagagtcgaaattggatgttgtaactccctcattgatctatgaactttgtggtcctaggtccaattgttttgttgtgtttcttgcaatccacacaaggagaggagtcattatcatttgtgttgtcgaaagacaactgcgtcacgtcaaaggacgtggttcactcaatgagttgttggaatagtaaagcaatatattaatcggtaaaaaattttgggatcccccaattacacggccctagggagctatttatagttttagtacaggctcataccctctagggtttagttaataaggggaatttacatggttacccctatgatagggacattagagttggtatacaatgtgttttgtattcatgggccctaaggcgatcttcttgggccggcctattagtggcaaagggcctctatgggccgcaggacctccttggcccttagccgaaggcatcttctactttggacgacgacctcatgcttcgccctacggccttcgcccttagtggttcttcggccgaatggtgagcttggtggcgaacccttcggtctttgtcgcctggctttgcctaggcttgatggtgaaccctttggtctcgtcgtttgacttcgcccaagagcttcgccttaggcgcaccccttggacttagccgaagcttgatggattaggttgtttcggcaggttggtcgaaggtcctcgtgacatgcctccaacaatttggaagggggatttattccagagggggtgtggtgcacatcgggcagtggttagtctcagtttacctgaaatggattcaggggggacaaatcttggttttgtcttcgatgtactggcctcaaagggatgatgagatgttgatgttcttggaagagatgacaactattagagaggtttatccaggggaatggataattgtatgggacttcaatcttatcacctcagctacatacaagaacaattctagaatcaaacaccagatgatgaacatttttagaagcaagatagatgaactagaactcaagaagatgtacttgtttgaaagaaggtacacatgaagcaatgaacaataaagaccaaccttggtgaaacttaacaggctttttgtcacaacacaatggtaggaggtttttcctgaagcgcatatgcaggccatgagttcatctggctttgtccactgccctttgttgctatcgtgtggggacagaccgattaggcacagaagattcaaatttgagaccttttggacaaagttagatgacttcatggtccatggaggtggttcaggaggcatggtagagggatgttgatagtgaagacccctatcgtattctatatgtcaaaaaatggaagattgtaaggtgctaaccaaatggggacagcgacgcatcagcaactttaggttgcaactgtagattgcgaatgagataattctcaggttggatgtggcgcaagaaaagttctgacatgtttgtagcggcgacttagggcaccgttgaaggaaagatatcttacactggcctctcttgaaagtataagaataaggcaatgagccagaataagagatctgaaagagggagattcaagcattgccttcttcttcatgaacatgagaactcgacgtagaacgctgttgatcccaaggctggaacatgaggacactttggctacgataatgaaggataggcaatagatgactaccagctatttcaagacggttatgggcttggccaggaatgcatctaaactgatatttttccatgaggtgcagatggccacactcaatctgtcggagttaaatgccccttttactgaagaagaggtgtgggcatcaatcaaaaacataccaaatgagaagtcactaggcccggatgggtatacatgcctattttatcaaaaatattggagtatcatcaagccaaaattaatggcagtgttgttaaagtttggttatggtaacaaccaaaacctggacctactgaacacggtgatcatcaccctgcttcctaagaaagaattatgaaccctgctgaaagattacagacctatcagtttaattcacagcttggccaagctggcaacaaagatcatgactcttacactgaccataaaaggtcaagagctccagccaaaattaggttcttcatgtggctggccattgtttaacggctgacaacttactcaaaagaggacggccacatgagacaacatgcacgctgtgtaacaccggctttgaggaccacaaccacctattcatcaaatgtgtctacaccaacagagtttggactttgctgcaggactggatcaatatgaatttccaactccctatcagtgatgattggacgttggcagattggtggcaactggcgcggaatcatttccgaacgagctataggaagtcttttgactcgttgtttttgatggtgtgttggttcatttggaaagagcaaaacgggacagtgtttgaatacagatttgaagtggcagagcagctcgtcaatgatatcaaggaagaaatctccatttggaagacagcgggcattttttcaatctggtgaggagtactcttctctctctctctctctctctctaggtttacatgttttcttgagggtgctcaatcactcttaacttggcagtttaatgttgagattatactcatgaaattatcttatctaaatcttaatgaaattcggtcggccaatttttcagctgacccggcaaaatatttcatgctcttccttttactattaagaataagaattaatctctgcatcaaataggggcagtttcacaagcataaattttcttaaccagaaaaatcatccttaaccttcaaaatggtggaagaaggcatatgtgcaaggtaacccatagaactgatgatatgttcttttagaactaatactaccaaaataaatcaaaaatcaaaacatcaaactgaacaacaatcttttaattggccaaacttggatgacctctgaaactaaaagagattcagaaaggcagaaactaacgacctcatcttttcgcttattcttatgcttatcaaccaaaatttgaattttcaaccttaaatttgaagccaattttgaggttttttcatcgaagtttatttttcagcctttgcttttactcccttcgtcccataatatagcaacctagtactggatgtaacattttatagtgtctagattcgttgtactatgaaatgtcccatccagttctaagttgctatattatgggacggatggagtagatcactaaggacacgtatataaaaattttattcacaaattacttttcgtttgcaaatatgccgtttggcttattccgtagataagccaaacgatgggctgtaacttatgaaggccaacacaagtactatgtactcttgactcttgacagtcaaggaacacaaagctgtagcctctatcaaacttgctccaatgcattatggtaatttttgttttatttatttactcaattcattggcccatttctttcatctcttgaagtttgtgtagagattaccccttacgcaaggggtggcttctcctttgtcctcccttctctccaccacctcaccatgggagcttatatggcacataggagcgagtgtttcgatgcttatagtacttgttgtaaaccaaatttctttcagggatcccgctaagcctaattcccttcaagtaatcacatttaagatagacattagaaatgaaatttaagagcttttatggtaatctttttagttttcttcaatgtctccacttctcaaaggataggatagatacttgggcatcgcaacactagaagtttttaaataaataatcaaatttatagctggacgtgtagtaagaaatgtgacaaagagttcatctcatttgtactacctccgtttcacaatgtaagactttctagtattacccacattcatatatatgttaatgaatctaggcatatatatgtgtctagattcattaatatctatacgaacatgagcaatgctagaaagtcttacaatatgaaacagagggagtacttcataatatacttagttacttactgaaaacaacccaccacttctatgcaagaaggtatgttcgtctcttacattaagacgcaagtccctaataggtgaggctctcccttataaagtcataagcccacacatcataagagctttattgggatctgttctttaaatagtcatgattagctcctttataaggtagaacacaaaccgtaacaactaacgagatgttgtaagtttgatcagaatataaactccacgcagtttgagttctttagtttatattacaccgtccatctaaccctcctaattcactaaaaactagtaccacctgtcattactgtgctcttctcaggagacgaccaaattgacaaggtactacatcagaactgcgaagttatggattcttagttattactccatccgtttcaagttataagactttctagcattgtctacattcattcagatgttaatgaatttagacgcgcacacacacattcattaatatatatatatatatatatatatatatatgaatattagcaatactagaaagtcttataatatgaaacggagaaagtactatattttagttaatctctctttttaactaccaccatccaaaaagaatgcgattctcatcttcctcagcgattaagcacgcacatcagcgataaattaatcgcaagttcggcatacacaagaaacactaaacagtaacatacataacttgtatgtgaaatcagttaatcacaagaagtacatgacaaaagaaaacttctgcaattaaaaaaaatggcatgctatatgtattgatccaccattatctaagtttcacattttgcagggaagagtttaacttctaaagaaacataagctcattaatcagatcattgttgcaatctagagtggatggcaacaccataaacttaattgactagagacctcaaaaacagcttaagtagcaaggaaactcaatatcagagctcaaacggttaaatgcatagacaggagccaatgtaccaaccataatgctaatattgcaatcacaaacactcaacatgagtttcgaagatatgttacatcttcaacaaacattagaattttacaattgcgcactaatataaattacactactttccccttttatttatgacacaagatggctacaaacgaagcactagaagccccctattaacacagcaccactaaatcatcaggatccacagttcctaaatacacagcacggtaggaacatataagttacttgccagttgaaatgaaacagggcccagcgaagggaatggttggtgtttttaatgcatgaactgtattacagccagttgcgatcagaggtgctagccccggtgctaaagttcaattgcttctgataatccatactgttagcaagcatagccgcaatgttgccaccatgcaccctgccttctggaacaggtgattgaacatgatgaagagcctgcttggtgttagcggcaaatgtctcaccaaagttgaaagagtttccaggaagggtcccatgactaacatcagaatcagcaccagtagaaccaggcagggcaatagttccaactgtctgaccaccacggactcgactatcttccaccagcgcattgtgtgcaacgcacaggcctttcttaccccttgcaaagcgctcacaagtaccgctgccgtctccaaggccagaccctgattggccccataagcagcgtttacctcccccatgtgccttgcaaaagtctgtactcccctgtgcactcttgctgcagccggtaaactggcaccgcttaccaccgccatgacggacacagcagtcagtccgtccccttgcactcttggtgcatcctggtaccacacatcgctttccgcctccatgggcaacgcagaactcagtgccaccatggacactcttagggcacccttcagctgaacagcgtttccctcctccatgggccttgcagagagcagtgcttccctcagcacccttgctgcaattcggatgtgtgcatctcttcccacctccatgagctttgcagaaattagtgctgccctgagctccctttgtgcaaccatcatgtttgcagcgacggccaccaccatgagcgatgcaaaagcctgattggccctctgcactctttgtgcagttcagtttttggcatctcttccccccaccatgcttaatacaaaggccagattttcctcttgctgcctttctacacccatcacggctacaacggcggccacctccatgggctatgcagaaatctgtgcggccttcagcgctctttgtgcatccaaggtgctcgcagcgtctgccacctccatgtgctttacagaagatagtttttccctcggctcctttcttgcaaccttctctctggcaccttctacccccaccatgtgcaatgcagcgccctgaagaacctctagcaccttttgcacatcctggttgtgaacagatttttgtgctgttgcagcgttgttgaaagctgacaacaccagaagtactggttactggactttgtggcgtttgtatcatttttggcagtggggcaagatcttgagactggttggagctacctggtaactctttacttgaaaaatgaccagtgttgttcctggactgatacagataaggaagtagcttaccaccagatttccagcgagcagatgttgatccttcgtccactgtaggcactgaggacatattgcatgattgcagaaatacggcctgttgtttggttgctgcagagaagtccacattcgtcacagcagattcacagggtccaaaattcaaagataactcgagatccacaggcttctccaaaactttcttgccattacaatcataactatccagttttgaagtgccttcattatacagattaaactgaaaattcatgtccaaatcaacagatgaaccatcgtccctgtcctttgctgaagacatggtgcagcatgttcccatgctctgcttgctcgagtctgatgagcttgaggagttacctaaacccaatgacaagtcaacccacttccgcttgatccctcttgacaaaggattgtgcatgctatcttgggcaagcacatcaagttgtgaagaacaagccattggttggctgactggtggactaacggtggtccatttttcagcatttcttggattcgtgccagtaaattccaagaatccaagctgtttatccattgcctctagtggatgaggatatgcagtaaatcctgggagcccaagttgtaattcaactgcttcaggtggctgagaatattaagactcaaatttgaccaatcttaagggaaaagtacagtcagtggcgcttctgggttacataatacacaaagaaactaagaagtcagaaatataagcagctcctttgcctttttgcatcccccactgacaaatccagaagtatcattgcgatccatttcttagtttttaattaagagaaaggcttcttattcagatggcaacagtaaagctacaatcagaagcaaatgtcgctgctttcatccgatcaaatcaaggaagttagattctgcatgaaaagaaatacacgtgttgaacaacccatttagaagagcaacatataaaaaacaaaatgcacataatagaaaaaaaaagaacatactgcatggctgtaataaaagtggcgcatttgttttatgcctttgaatgtttagaggcttaaagcccatatagagtggttcagaagaaatgttaatagattatttccatgcagcactgtagctaaaaaagttttagtatggaatttagtcatatggaatctagtccttcaattcgatgtctgaaatttggttgaattgccttttttatttaaaaacaagaaaagtccatatttgatctccaatttttcgtccctcgattacagaaccatccattatttggtgcctcaacttttacaaccgtgaacatctcattactaggcacagatcatttaataccatcaatttcaatgacacatcattagagtaaaccccggtttgggctcaaggatgaaatatggacggttttaagaggtgcgggacaaataatgaatgattttgtagttgaggtacaaaagtcataccaagtccatagttgagggaccaaatatagacccttttttaaagactgtaactaagtaactaacaaaaagaaaagtgttctcaacatttgtttttgtaaaaccaagggaagcagctctgccattcattttaagaagagaatctttacgtgctaacatccaacatcaacaccctaatcagtcaagtgatactggcattatatggattcagtggggtgtgtaaaatttggtctagtgtcaatttttaaatactaggactaacagctcagtgaaaacatcatgcatatttctaatctctccagtacattgttctatatatgtccattacaaatatgtacaatgtgacatcaaatgtatatgtaaagttgctgaacaacacagatcagttcgttgaggatactttcttagaaaaaggtttgctttgacttagtcttgttgcatattatcttacttattgaaataatttatttgagactcaagactaagaccagaacaaccacatgcatttttcttctgaagaggtggggtgaatgcttgaaattaatgttcatgtaggcatggctttcaaatacaaaaggaaaaatgatgcttagaattgatcctacatgagaagaaacatgaatcaatattcacaattcgtgcagtgcaatgaatggatgcataaggatgatatttacaagcaaccgtaaaagagaagaactaggaatccacattcgtaagtcaagcagtgtaatgaattgatgcatattcttttgattactgcaactagatccatatgccgcagtaagtacaaaaactaaatgccagtgatggatcgaatgcttatgatcagtaccagcgagtgaagaaacaggaacagcccatctaatactgaaaaactctagctgctggttgagaagttcagcaacctcactctgcaatcggggaaaaacagaataaaggcagaaagcaagaaattagatgaaaccttttaactaggtcaacgcgacaaagtaatctggttatctgaacagatgaaaccaaaacgataactttttacaggaaaaggacgtatacatctaaagcactagaaaagttttatcacaattgacaccaagcctagcagctttacacgaagggatcgaatatttgcacatgcatgcagtacaacaactaccacaaaagtagaatcagtgcactccagataggtatcacagtcagcaactttacatggtaggatgatgcatcatataaatcgaaaatcagtgtcgggagaatattattattatcacagtcagcagcttcaaatcttaggagccatgacagatcgatattcaacctaaagagaatattctatattctagccatcatgcaccaggagaagtggaatttggtctccagattcaactatatcacttgataactagtgatcagaaattcatggtttacatccaagaatctatgaagcaccggacggataaaagagagcatcttccacgcatgcaacctaatcaataaaccgaatcaaaaccccaagattttatataatacaccccaagcaccacacctacatcctccatatgcctcaattaagttttctttttttttcttttaaatattgcaagattcagtatccacacttgttgcacggtaaaagttaagaacaaatatttcaaaaaaaaaaaaaactgaagagttgtatcatgtggatactggtaaaaaagattggatcagagttaacactcccaatacgcaggtttacacacgcatccatccaagcgtccacttggagcgaagtcagtgatctaactactaccgaggcaacgagagaatgaaataatcatgacgcaatacacaaacactacaactacaagggctcgggctccccgcgagagagacggataacagtatcattcccgggggcggcgcaacgaagtgaacgagaaaccctctaattcccttccccgtcgccggttcgccgccaagcgccgccggaggccggagcagcatgcgccagagcggcaatcgaactcgcacaccaaaccagcacgcgtcccgccgcgcgcccgttccagcgagctatggtcgggcacgggaacaggcggccgacaggggaggaagaaatggaagggaaaaaaaaaagaattagagagaggcagcaggagacggacctgtggcggcggcggcggaggaagaggcggcgagtcggaggggagacaagtggaggagggtggagaggagaggcgagacgagacgaggcgatgaggtggtgggatgggatgggaggaatggagtggtgtggtggtattgtggtggtggagggagagggagggtgatggtggtggggaaaagggaaacctgaggtgggtgatgcagagacgggtggatggagagggggagggtgggccgtggcgccgtgcaaaagtggagatctgttctcgcagatgttttgtcccctccccatgtgggaaagtgggatgcgcggtggaaaagtttattttcatttatacccttcacaaaggtcatatttacacatattgcttttttattgttgattttacagtgagtcataatttggacagctcatgtttaactaagtcgtataatggtgtatatcttagcttacgcttttacgctggactatattttttttctacaaattgtatgtgcattttggacctggtttttcccttctcttctaccattatcagtcgcacaccaccatcaatcttggctatatattgtctcgcggcacctaagcgcttgagctattgagcacgagaaccacatggctacatctactctacctagcagccaacaagtctttggccactaccgcctctataatctttatccaaattgtgcttagtcaccttggtgctaagcacatgacaactcgagctcgagggcataccacgtgtaggtgaaggttgaggctagccgtctcaaactagcacagagcaaaagcatgttgcttgagctcggtggtcacgttaatctgaggttggccactaccacctttctcctatttctttctagattgagcaacctgtgctttcatccagatcgggctactggaattggatatgatcgcttgtctagcccgctgcaaaagaactctagcatcctatttctagccacctccccattcatttctttctcgatcgagtgtggaaaggttggagcgttgtcataagggaccgctctgcgaagcttacattccctccgctttctctaccaatcctcctcactcctctcggatcaacagctttgtgacatggcacccaacgatggagaagaccattgcggcatatctgttggcaacttttttaacaagtagacaagcacgatcggacacctaaacgcattgcggtaatatggagtcaccaaccaccctcaatttagcaaaaagctagaccaagatgggttttgatatattaaaccggctaacatagccgatttagatagaacgatagataactacacgtcttatgggcaaacggaaggtttacgggacaaacctacaaaggatttcgcactctcgcagcgaagacggacgatttacaacgcaaatcgacaaagatggacgaactagactagaactatgtgaaaagtagatgcaatgtttgaaaaagcgattcaattggctaattatatagatcgtacattgtatgttccttgtcccttatattagggttggtcttgcctactacaagtcctcttccacgtccaatttggcataggaaccaaaggaaagctgaaacatagcctcccgagtaaggaatcccgagactcgataaaaactgacttgggctcggaccctgccggtctgcccggcccatacacggcgatcaaaccggtccagtggaggaaactggcaactttcccaaatcttggcaattttccttattttgaacctagctaccaaatttgggtgtaaacaatatcgttgctcgaatcccctcaaagagagcttgtcgctgaatcgcattgttgttgcgttgccttagttttctctctgactcgctgatcaacgacatgtagaaaaaaaatttcacacaaaacatactccctccgttcaaaaaaaattaatctaggaatagatgtgacccctcattgtattaggagggatcacatttttcctaggttaagtttttttggatggaggaagtaagtgatagaaagaagtggttgtatacatccatgttggtacagagatcgggttttataaattcccaatatcttttaaaaaaagggtgacgaagagaccaaaccaaacgtaaggatccataatcagtaaattcctacaaagcgaaggccgtaactgcaaagctggcaagaaacaacgccagtagtccagacttccagtacaccaaaaccagcacgaggcaaaacgggaaaacagccaggaaggcaccaccctcgcacgttggaaatcggcggcaaattaaccaggcgacctacctacgattccccgaagatctccacacccgtgacagacaggtaggccacaccaccatctgggacccacatgtcatcggcaaaatctgggctcgctggtcaccccatctctccccagtggctgcgggccgcggcgaccgcgggcatggcggaaaatcaaatccccacctccacgtcaccgctgacgcgaacacccccgccgcctctcgtaccactgacacgtggggcccaccccgagcgacgtagcgttcgcaatcttggattttttttattctttacgccgttgtgtgggccccactcgctcgcgcgcacgcactagggggagggggaggcggaggggaggacgagatctttcacgtgggacccaccccgtgtggcctgtcgtgtgtcggaggcaccaacttggcaccgccaccgtccaatttggcacgctgcagtgcaggcgcacgctccctctgtcgtttcttttcaacttttcacttaagtacaagtgtacaactaccactactaccatatcaaaaaaaaatactgcccggtatatcatataaaatactagtaattctgaaaacaataggctccgtggacctgcacgatttggccatttcgataattcgattgtgtgacggcgaccgtgtttataacactgataattaactatcatataaaacactgtgataactggtaaattaacatataggattgtctaaaagcattagaaaataaatggaactcatttagaatcagaaattgaaacgacgagatgcgccggttttcttcttgtttgtttttcttttaaaaatatccaagtagctcgcccatacaacttaatttcgaaagcattggaaaataaatggaactcgatttagaatctcaggatgcgccagttttcttattgttttattttcttttaaaagaattcaagtagcccatgtaagtcactgctatctctaatctcaccgatacaacttaatttcgtaaaaagaacacttcctgtggctctattttcttttctaactttctaccttgatctagtttgtagtaatttcctatcgcacttagcgattttcttatactctatggacctccagcatgatgagctaagttgctccatgtcttctctggttaggcatgaaaaatacacatctccgtagtatgtgattgtcgttgtgtttcgtcaccatagtgttaaaggaattaaagtgcataaaagcataaggtggaaggaggccgaggtacatgcacttttggtgtcgaagggttaacttcgctaactagaatggaggtttatgggtgtgagaaatcgtataaaactggatagagacgagaaataaacttatgaacaccgttataagggtgagaattgaaagactactcacttgtaatgggtatttagattccttttttttaaggttaattggatccatgccactgtaactttgtgagaacaaaaaagggaaaattagaactatgccattataattttacaaaatttaagatatgccatcctgacccacatgtcattgactcatgtggattctacatgtcattgagataccgatgacatatcttaaattttacaaaattataatggtatatctcaaaatgccactcctattaatcatatcggctactcccgtccccttttccgactactctcccacaccgtctccgttcccgtcccacatgtcggtcccatctccccatcttttcctccatccggcgcgaccgcagaaggacaacggcagcagcggctcccgagcactctctccgcggatggcgtcgaggacagggacgcgggggacgaggctgagcaccatgtggcggagggtggggaggggctgaaggtgaggtcgcggtcaatggcacggcgcgcagggcgaggtacaggttgtggttgccgccctgcaggtgcgcgttggcgcggttggcgagcaccagcaggcggacgcggcggcgggaggaggcgagcgcggaggagaggttcccggcgaacccacgtgcaacgaggaaggactcgagcgaggcgagcagcagcgcggcgaaggagaggagcacagcgtgggagcccgagagggagcccttgagcgcatcggcgtcggcgaggagggagcggaggttgtcaatggcgcagatgaagtcgtggaagtgcgcgcggcagagctcctcgatctcggtctcccggtcccgcgccgcggcccagagcgaggcgagtagtggctcggggcacctgcacgtgaacacgcgccgcactaacgggcccaggtcctccccggcggtgatggcgatggagagctgggcgaggtcggcctccgacgccgccgccgacatcggcacatcaccaggctgcttctgccgcatcgggatctggtcatccccattgagttcttcgtcgtgttctcgtcgtcctgccgccttttgatttggttggatttgttcgctttggtcattgcttgttgacgatgaagttgggcatggcagattccgccagcaacaaggtggcgtcggcggggcctcctctcccagctcgctgttgacgccgccctcgccgtcgtcgatccaactcacccggacctcctcgcccagttcgccgtcgacgccgccctcgccaggaagtggtcgggatgaggacgggaacagagacgcgtgagagaggaggacggaaaatgtgattaaattggcatggttctaattttagaaattttcaatggcatgtagcctatataacgaatagtagtggtatttttttaatttgacaaagttgtaatggcatagatccaattaacttttttttaatgttcacaatcatccgtataaaaggaaaattttgttgcacacagcactaaggtttggaataagaggactcgcccataccctctttttttttctccttttgtcctgacatcttaaagttctacgaaaaatgaaaggatggatcatggatgaacctcctagccagccactacggcgagaccttttaaagtttacactttatacatgtggtgatgagtaggcaaacactatactccctaagtcaaaaaaaaaaagtttaatcccaactatgaatctggacacacttatacacaaatttatagctaagatttgatcttttatgggacggatggtataccgtatacaccaccagatgatccctcctgcatacatggaagctcagagtactcataagttgaacacaagaatttaagcgatttcatatcgatttaccttctctgattcacttttcatactataaggcgttgtgggtatcaaatagctagattcatggatcgatgtatgtgatttatatatgtgtccgaattcatatggatatggagtccaaaacatatataatgtgaaactgaggaatacatattataaaatggccaattacataaatgccacagtttcttgtatttgtcaaactgctaatggtttttttatctaatctcatgtaccactagtttcattaaaaaaagttgttctaaaataccacttacttttaaagttgactaatagcaagtcaaaatggtttcaactctccttgaaaaaaaaaagttttacctttttcaataccaaaatgctctgaagactgaacaattgactaaaaatttaaaagcaaattgataaaaagaatacaaaaaacatagaaaactcctcatctcttcccccgcgtcaccatcctccttgccaattgccatgactggccttcccgcacgtctagcgggccaacgacctccaaagccatttaccctctcattatactgttgcatgagctctctctctacgtgcatggccgatggccatgagcttttaacacgtgaaaccgttaatattttgatacacgtttgagtattcatcttaattattaaagaagtttatagaattatttattttttattatgaatttgtttatcattaaatgtacttttaccattatttacattcgtatatttacacgtgatttttttaaaagaacaaacgatcaatcgcgtgtcaaatagttaacgacgtgatctatgaaaatccgaaggtgattttagtccctccggaagtatattggatgctttatacatcgacatatcgtgtatcactgaaattaaccgtaattatgaacacttgttaaatttaggatgtatataaacccgagttgacatgttttaccacaagaaaacctaacctgccgagctccacacaattcgcggagggggcataatatattaatgtaatgctacaacttaattgcaattttaaccactgtcatgcttaattaatcacccgtagaagaagaacacgactagttgagtcatgcatctgatgctgatcgaagttgtgtgccgtgcaatgcgtacgtacgtaggctgcatgatctcatcacgctatttcatattttcctcttggaggcagcaggtgtgcaataatctaagctaggaaccaatggaaacttcacccactttgccaggaaattaggggtaaccgtgtgtctaatcacctactactctgctcatgaccatgaacgcctacgtttcatttgtttctttgaaaggttgattaattaaccaggcgatatatgggcaacgcaatcagcctggaaatatattgttagagggaagaaaataggcgtacgctaaagaacgtgaagacggcatgtcgacattatgggcccaccactgacgcgaacgagtccagctataagataaattaattaagtctagcacgatgacgaaatgtgatgaactcatgatggttaatatctcgatcgatctgctttgattaatttccgcttcgatcgatggtgagagctttcttttcttttctttttgaatgaacagttagaccaaaagcaacctctactctacatcatctatcaaaaagaatgaaattcggggaggacgtactcgttcagattcatctaaaaaattgtttctactgggatggagggagtactcatattaaggggtattcacgcttttgatcatattttgtaacttaactataaattaatttgatctttttttcaaatttactcattgaaccctttttttttaaaaaaaaataaaggtcagatctaaccctattaactcaagaaaaatatatttttatggcgttgatttgatccaactttctcagtgttttttttgcgcaaacctaattaatcttgataagtaattgttttaccatgataaagctcatgacatttacataagtaaaaaaagttacacatctaattccagcactataaaaatgacagaaacgttcacttccaccgccacacgctcgctcaaagccgaatcctgctgaccatcacttccaaccgcaccaatgtcctcctgatcggatcgaggaggagcgccgccgacgcctgtcatccatcgtcctcctcattatttggatcgcccattgctacccgtcatcctccccgagtcctcactcggatcaaggaggagaagcgacgccactcgtcgtcctccacgtttagatctaggagaagaaacgtcgtcgccctgccacctttgagcacgtagccgtcctccctattcggatcaaggagaaggagcgtcgccgttaccgcctcccacagcttgcacatgccctccgcgcgtaaccgccgccattccctccctccacgtgtcgtccctccctccgagtccccgttgacaagcgagatcccaatagcctgctagccccgacgcttcccttccactgcatgaaaaaccctacctcaagttgtggctgtagagatggaaggataaggccaagtgagttaaggggcattttgatcattttccgcctctaaatatactttctagttgcattactaatgttatggttacgataggggccaaatggtaggtttggtttggaaaataggatctaatgggcaaagtaaaaaaaaaaaacagggtcaaattaatagttagcttttggaatggagtcaaacgcacaattaacccttaatgttaattagtggcaccaattgacgtaagctaa

SEQ ID NO: 24827 - DNA, 5660 bp, Oryza sativa
  unsure (1)..(5660): unsure at all n locations
cgcccatcgaaggtatgtagctcactattttcccaagccctaaaatctctcagagaatttgtagtattattccgtgggaacgaatgaatattaggctgattaagtgattagttgctatcattcaaagaaactgtatattgtgtgagttttataatttgtcatggtctatatatgcagatagaagtaatattggaatcagccaatctgattccaaattctcgaggagacatcctctcgttatttgcatatcatttaaataattatgaaaaaaaattataagatatattaatatgtgataaattagatcactccacaaactttgcagtaatacctttttcatacgtgcaccagacgaatgatgtgttaagataagagagatgaaaagttcctgagtatagatgacataattaaaatgtctatgttgataaataaactttttccttcctcgtacctttgacgaagttccttgatttctagcgaataaatatatccgccttatacactggtggagaaaccctttgtagtcccggttcgtaacccccctttagtcccggtttccaaaccgggagtaccaatccgggactaaagatcgctatctttagtcccgggtgaaataaccgggagtaaagatcgatctttagtcccggttggtaacacgtggctggctgagccatctttagtcccggttggtgttaccaaccgggattaaagatcgagctgaccttttttttttgcgaggccccgggggtgcgtggtttatatatatatatatatatatatatatatatatatatatatatatatatatatatatatatatatatatatataaaccatgcaactatatgtttcaagacatatatatgcatacatatatatatatgtatatatatatattatattatattatatantatgtatanacatgcataatatatatgtatttatacatatatatgttatgcaantgcatatgtatatagatatatatatgaccanaatatatttacattataganaatgtgtacacatgcatatagaaacatatgtagtcatgtattaattacaatccattatatgtcctagctagctacgatttcaacgtagtagtagtcgctgctagctcagaagctaaggaccggtgaattgtgtntccgtcgtagtagaattcacccttgggatcaaggatttcttcgttgatgaatcccatgagttgttcttgaaccgttgcgataaattccttgtgtgtggtcaagttatccctcatgcgaataaactatatgaatgtatgaaattgattagtaattaaacaagaaatcgttacgtaatgaaattttgaatttatttgtacgtacatcgagctctcttgtggtgatgatttggtctgcaaggcagtggcaatactcacacacgtaatagccgcacaagttagttccctgcttttgctttgcgcactacaaataaatgacaaattaacggcgtgagatctaattaatatacagttgtatgtattaatttgaatcggagaaatataaatgtagagcatgtgtactcacaggaaatttgaacttccgcctaagtctttctctccatttgccgcggaccaaatgacggaaccgataccaagccctacatggagtttaaagctatgattcgtagtagcaattaacataacaagattttcttaattaacagaggaacttatgacggtacctgtctataaattcgaaaaccttgtcaaacgtagactcttttttatccattgagtcatatacgttgatggtgcaggccgacaggtcgaagagtaaaagcacccagtggaatctgcaatgtgcgtgggatgcattacatatgaaacacttagcaagttcgtacgggaatgaaatttggtatgtaggaagacagtaaaattgaactaactctgtgttgtacggcaacagtatgaacgtcttgtaatgctgcgccttcaggagatggacgagattgtcctctgtttcttgtggatattggtcgagcattgcgacgtttactctccgagggtcgatgaatccagtatcgaaaaccctccgccgtcgggccctttgaatctccattctacaacgataaaagggagtattttattttatatagtctagttatatacaaggacctaattaattaaaggagacgtatagtaagaaatctaactgaacgatatacttacaaaatccagcaactcataatagagacgtcgagggcgtccagctggtatagttcgtagattcccctgaaattgatccagagaatgtcatctccttgcaagaagtccgtgtccctgatcctcgctccgatcatctctctaccggtggcgctcatctccatgtacagctgatggaacttgtacatttgtgtgggtagggactgcagcagctcaggcttgacaagcggtttaccgagttcgtacatgtatttcacttccgccttttcgattggtgcgactcctagcaattgatccgtagttagaccggtgtcagtaataaattgttctatcgtcatttctttaccggtcaccaatggctcgatctcctggtttggttgctctccaagctgagggactggtttggactttccagaagatgctttcttcagcgttcgctcatagtccgatagcttgatggcctccttgacagatgcagacatacccctgaagaatttcctgacactggggtctataggaatcttcttttctggacttcgaggcttgaattgtctcttgacttctgatgcaacgtaagcgtcaagctcctcttgcgtgcaatcgtaccccgggtccttgttcttggcggcgtcaactttcgccttcttcgttgcccttgtgtgggcaggcgatggagctgggggggcccttgactttgaagggccggaagaggagcttgcggaggagtaggtgtaggagcccgaggaggagtcggtgcaggatcctgaggaggagtcggtgctggagcctgaggtggagacggtgctggcggagcatgaggaggagacggtgcaggatcctgaggaggagatggcggagccagaggagatggtgcacgagacgccgcttgtcgcccagggaggatgatgtaccgcctgcgccatagaataatggcatggcttgtgtctcgtagatgcgtctcaccgtctcctccagggtaatccagctcgaggtcctcgtacgggccttcgaccaactcaacttcgaccttcgagtatcctgctggaatcggcctgcagtggtaagtacctgaagggtccgttgggatggccatgcccgacgccaccttcatgttgtgagagattatttattagtaatcaacatatataagcagcaactagcggaatggctaaatcttacctttattgataagttcttgaaaggaatatgcagctcacatggtgtccgctgagtgatgtcatcaacgggacaggtcgattcgtcctgtgtttgcatagcgtccatgctctgtgatcctacctgccccgttgaggcgcaactgctacggtttcctgacgggctcaccattgcaggaggaatggtcggctggggatcatgggaccgatgtgcggccatgcgttcatcaaccttccttgccacctcctcttgcatgttgagttcgtaactcgatacccggaactctaggtctgcaatcttcgcctcggtatctctcttgctcctcatccgactcctgtacgtgtggatgtcctccttgaaaccaatcttccaaggaatcacccctttccctcgtgttcgtcctggatgctctggagtctgcagggcgagtgtcagctcttccctatctctgtctggtcggaacgtgccctgagaggaggcttccactgcatctgttagtcgtcgcgcagcctctcgtatctgatcgccgaagaccagtgagccatcagctgggttgagcgttccaccgtgagcatagtaccagaacttcgatcgttccggccaattggctgttgccggttcgatacccctctcaatcaagctagcctccatctcctcccacttcggcatcgcgacgctatagcctcctgaccccaagtggtgatggtacttcttcttggcggcattttctttgtttctttccatcatcgcctgcccttgttcacctgtcttatatgcaacgaactcgtcccagtgatcccttagctttgggaatgtgtcgaagttcggtgtctgccccttcagtatatacttctggtacagatctcccttgaagctctgaaactgttctgccattttcttcagagtccaccttttcactttgtcctctgtacccgcaggaagggtgaatgtctcgagcattgtggtccacagcatctctttctccgaatctgggacaaagctctcatgatctccgcgtgcccttgttcttcgccagtacaccgtactgacaggcacgttatcccgcacaacccaaccgctgtgacgtacatagttcttggcggcttcggccggggcactaggacgtccatcttcttccacttccgttatgatgtgccgaccctcaagcttcttcgctgcacctcgttgcccgcgtatgctaagtgtaaatgtcgtacattagaaccctacacaaccttacgtgctaagtctaattacaaatcgtgatataagctaagtctaggtgacgtatattatacaaccctagctagtaaataattatatactaagtctaattacaaataaaataatcttatattaaaactcaaataatatgacatgctaagactaaaatagtcatgtatatgctaagtgtttcgtgcgtatatgctaagtctaattaagactacaatagtcaattgctacttgtcgcaccaattccgtagtcaataattacatactaagtctaattacaaataaagtaatcttatattaaaactcaaataatattacatgctaagactaaaatagtcatgtatgctaagtgtttcgtgcgtatatgctaagtctaattaagactacaatagtcaattgctaggagtcgcaccaattccgtagtcaataatgtcatactaagtctaatttgcaataaaataatcttatattaaaactcaaataatattagaacactacacaatcttatatgataagtctaattacaggtctaataatcttaattaattgcattacaaatataacaatcatttatattattacgtcacttgcctgctccaattccttctagggctagctcttccactcaggcttgacggacgactccgacaacacgtcttttctgcaagatacaaaaagatgtattaggataaatgcgaagtaacatatatatatatatatatatatatatatatatatatatatatatatatatatatatatatatatatatattgcatttcacgttaacgttcgtcctcgttcgttcgctcgttcacgttccctagctcgttcacgttccctagctcgttcacgttcgttcgctcgttctcgttcacgttcgttcgcttgttctcattcacgttcgttccctcgttctcgcttgtcttcgttcgatcgttctcgttctcactctcgttcgttcgatcgttctcgttctcgttcacgttctcgcggcaatgtacgttgacgtgttcgttctcgctctcgttcgttcgatcgttctcgttctcgt

SEQ ID NO: 24828 - DNA, 575 bp, Oryza sativa
cgggagtaaatatcttttcccgctatttcgaaattctttttaaacccggttagggttaagaaccgggattaaagattaaagcactgcatatgattttcgcttacatatgtgtttataaaatagaagttaatgcattaacattatttaaagtacaaagattaatgacaattacttcgaaaaattatttttgtcggtaataaattaagtggataaatcgtaataagcaaatatatgacttataattaataaaaattccaatatatatatatacttagcatatatatgaatgatattattatattggtaaaactctaattaagatatgtatgtacatactgcatgatttaaaattaataaaaattgtaatcatcatatatacttagcgtaggaattatattaaattaaatgctaaaaactctaattaacatatgtaaatgccacatgcatgatttaaaccttttaaaaattcgaatagtcatatataagtagcatatgaaagatagtaaattaaattgtgaaaaactctaatatatgaatgatagttttaaaaatatattaaatttaatacttttaaa

SEQ ID NO: 24829 - DNA, 8429 bp, Oryza sativa
tgtgcctgtcagcacggtgtactggcgcagaacaagggcacgcggggatgatgacagctttgtcccggactcagagaaagagatgttgtggaccacaatgctcgagacgttcacgctacccgcgggtacggataacttagtgaaacagtggactctgaagaaaatggcggaacagttccagagcttcaagggagatctctacaagaaatacatcctgaagggactaacaccgaacttcgacgtattcccaaagctaagggatcattgggacgagttcattgcttacaagacagggcaacaagggcaagcgatgatggccagaaacaaagaaaatgccgccaagaagaagtaccatcaccacttggggtcaggcggatatagcgtcgcgaagccgaagtggaaggagatggaggctagcttgcttgagaggggtatcgaaccggccaccgctaattggccggatcgatcgaagttctgatactatgcccacggtggaacgcttaacccagttgatggctcccttgtcttcagcgatcagatacgcgaggctgccagtcgcgactaacggacgcagtggtagcctcttctcagggcacattccgacctgacagagagaaggatgagctgtcactcgccctacagactcccgagcatccaggacgaacacgagggaaaggcgtgattccctggaagattggatttaaggaggacatccacacgtacaggagtcggatgaggagcaagagagataccgaggcgaagattgcagatcttgagtacagggtatcgagctacgagctcagcatgcaagaggaggtggcaaggaaggtggatgaacgtatggccgtacatcggtcccaggatccccagccgtacattcatcctgcaatggtcagcccattaggcaatcgtagcagctgcgcctcaacggggcaggtcggatcacagagcatggacaccatgcaaacccaggacgaaacctcctgccccgttgatgagatcacgcagcggataccatgtgagctgcatattcccttcaagaacttatcaatcaaggtatgctcgtagtttgatgatttttgacttgtacattccgcaagttgctgcttaggttgattactaatagatagcctctcatcacgtgaaggtggcgtcggaaatggccgtcccaacggacccttccgggacttaccactgcaggccgattccagcaggatactcgagggtcgaagttgagctggtggaagccttgtacgaggacctcgagttggactacccaggaggggacgatgagacgcatctacgagacacaagccacgccatcatactatggcgcaagcggtacatcatccttcctgggcgacaagcggcatttcgtgcaccatctcctcaggctccgccatctcctcctgcaccatttcctccgccacctcttattgcaccatttcctttgggtcctccgccacctcctggtgcaccatttcctccgtttcctccgcctcctccgggtccaccgtgtccgtttgcacctcccaagacaaggtcttgccaagctccaccgcctggccgcacaagggcaaggaagaaggcgaaagttgacacccccaaaaacaaggagcccccatacgattgcagtcaagaggagcttgatggttatgtggcaggagaggtgaagaggcaactcaagcctcggagtcctgaaaagaagatacctattgacccgagcgtgaagaaattcttcaagggaatgtccaaaacaaacaaggaggcgttacagatatcggactatgaccgaacacttcagagagcctatcacaagaagtccaaaccagttcctcagcttggagaacaaccaaacaaagaggtcgagccgttggtgaccggcgaagattttggcataacggatttcattgcagacaccggtctatctgtggatcagttggttggagccgcactaatcccgaaggcggaagtggcatacaagtttgaactcggtaaaccgcttgtcaaacctgaacagctggagtcccaaccgacacagatgtacaaattccacgacggtacatggaaatgagcgccaacggtagagagatgttcggggcgaggatcagaaaccctgacttcttgcaaggagacgatgttctctggatccatttcaaggatctcttcgatctgtaccagttggatgccctcgacgtctctctcctgagcgcatggattttgtgagtatctttgagttcgatttgtttcgttcaataattagctcctggcatatatgtaagcaataatactttcctttcatcgttgcagaatggagattcaaagggcccgacggcggagggtctacaatactgggttcatcgaccctcagaaaatcaactccgaaatgatcaacaagtatgagaaagacacagaggacaatctcgtccatctcctaacgcagcagcatttctagacgtacatactactgccgtacaacacagagtgagtttttattgtcattcgaacaaatttcattcccatacatatagcatgtacattttcgatcatatatatctcatctcacgcatattccagattccactaggtcatgttattcttcgacttggatgcatgcagagtcactgtgtacgactcaatgaataaagaggagaagatttttgacaaggtcttcaaactgatagacaggtaatataatgccatctattcgaaagtcgcggggaatctattgctattatgttgatctcaggtaataattaattaatcattgcttgcaactacatatgtagggcttgggatcggttccgtcaattggtccgcgggacttggaaagaaaaacttggacggaggtttcattttccagtgagtacatgcatgatccaaaattatattgaattgaatctctaattacagttaatataaagagtatattaaatctctctttgtttctcgtgtagtgtggaaagcaggaacagggaactaacttatgcggctactacgtatgcgagtatgcccactgcctatcaaaccaaatatgcacaacacgagagcttgatgtacgtatacataaaccattcaaaagttcattgcgtatcgatttgttaagttgtttattaatttcatatattgatacatcattatttttggaatgatagcgtattcacatgagggataatctcccacacaaggattttatcacggctgttcaagaacaactgatgggattcatcaacgaagaagtccttaatcccgacggtgaattctactacgacggatcaacaattcataacgtcggtccttcctcttctgacataacgccggcgtcgaagtcgaagtcgtagctatagctaccgagcaaatgaattgtactatatatgcatgtatatatatatttatatatgtacacatttgcttttgtgttaatatatattttggtaacatatatatatatatatagcacataaaatgttaagtagctttaattaaacatatgtgtgtgtatataatatatgatttatacatacacacacacatatatatatatatatatatatatatatgtatatatatatatatatatatatatatatatatatatatatgactatatatgtattgtaacatatgtatgtgtatatatatatatatatatatatataatcaaccatgcagcaaacagggccatgcaaaaaaaaaaaaggtcagctcgatctttagtcccggttatttcacccgggactaaagatagttatctttagtcccggattcgtagtcccgattggacaaccgggactaaaggggggttaccaaccgggactacaaacggtttctccaccagtgtaacttaatttgatcgtgtctactttacatatggttacctcgaccatggctccctcacacacttttcgggagaaaattgtgattttgctatcgcaaaagaatggtttcgctggaatactatcccttcaaagtgattcattaaaatgctatcctaaactaggggtgttcactgaaatgctattttggatctttttgattattactaatgtttttactctcttttattttttctccggaccaaaatgccctcgtctctatgtcctcctttcgcccaggataatggcaggttaacattgctctagcaaaatatattgctatatatttgtgaaacctatgcacgcctcatgctccgctgcgtgatatgtatatactaattgatcactaacactaatacaaaagctcccgtgcactggtttgaaagtcaaacaacacctctctggttttgacacatgctttgctagagcaatatattttgctttcacatttgtacaataaaaatggtgtgtagtccagttcagtcacaagcgcgcatacacatcaagatataatggagaagctagcttaacccataaaatttgggcatgaaaaaattgtaaaaacaaaatagaacaaatttggacagcatgtagacataatattgaatagcatgtggttcacaaaatacctcacataacaatggttcacaacataacagtggtcacaacataacagtggttcacatgcaccatggttcacatgcaccatggttcacaaaagacctcaaataacagtgcctcacatgcaccaacaacaaaggtggttcacatacactaacatggttcacatacaccaccatggttcacaaaatacctcttataacagtgcctcacatgcatagcacacaatcaagtaggcttcattttcttgggtgtgagcttctttgtacatgtcctctttgagcttgattcagcaatattcaacctccttttacatgtcacttgtgaagcaagtgccggttgtgtgcttgtccctccttgttccattaacattgcaagccggctacaaggaaattgttgttgttaagcaaaaatacatctaggttaatgtaattgtagttggttgtactaaccgtcttgtcacaactgttgggctttcttgaataatggtttgtacagtaggcctagttggggtatgtggtataggagcaggagcaacatgagcagcaggagcatcaggagcatcaggagcaggggcataaaccacatcaggagcattaggagcaggagccggcccatacctcattgtgttccatcttgcctttcgtttcctacaaggtgagataaatatattttaattttacaaggaaaaacaaatgtagtacaatagaaaaaaaataatgacatttagacttacggcttcttctttgtaccattgagcttgcacttgtagctagtttgtccatgacccaactcaccgcattttttacacctctttttcctctaatcgttgccttctctttggcagtctttaggcttgctaccaccaccttccaagcaacccttgatccttagtttcctgtaccttcctaggttcctttttgcaaggggtgcaccaagaacaaaaggtaaatccaccttaggccattgtgatttgtcagggagtggctcaataattgagttgtatgcattccagaatagggccacagagtagtagggattaatgtagttctccaactttacatccctaatttgctaggaggcaatcactgccaaggcatgttggcaaggcttgctagtgtgttgccactcctgacatgtacaagactgctcatgtgtcctcacaacatgcctagcatggctgctactattgtcccaaacctcagcagtggttatgtcagcatgcacaactgacaagtggcctaaccctcgagtcctagctctcaactggtgcaaaatggcaggtagaattgtacctgtgaatttatttccaatccttctcctcctattccacagggtcattatcatctccctacatgtgtcagcaagctcacaaataggtaaggcctttatatctctgatccaattgttaaagcactctgcaagattgttagtgacataatcacatttaatttcagcattgaagccactcctgtaccatatcaatttatggtaagtgtcaagccagagagccacatcggtgcatgctttcttaattgtatccatacactcctcgtgcacttgtgccctatatgatctagctacaggatacatctcttggaagacagatccaccatatttcttgattagattttgcgtaaggtggttaaaacattctctatgtccagcccaagggaaaactcggtgcactgcaatctctaatcctttgcatgcatcagtacaaattgcaagaggagatacttttcctatggccttgagcaattgaatcataaaccaggtccaattatcagtagtctcagcatcaaagaaaccaaaagcaatggggtacatccagttgtttccatctatagctatggcagatgctaaatgtcctttccacaaaccatttagggcagttgagtctacactaaggtatggcctacatccagttagaaatccagtaatccatggactaagtgcacaaaagaatctgttaaaataaaccttcccatcaacctcaatagtgtcaatctcaataacactaccaggggacctctccatgactgcagccctccacctatacaacatatggaaattttcttcccaactaccttgcaattggatcatagccaaactcctacccttagccacagtatcataattgattttgcatttctgatcctcttgcaaccttttttgcagttctttagggcccatacctgagtctgtcctaaggatatggatggccttggaagcaacccaggcgctggttggtgtggtagtctttcttctaccgctagatgtacacgtgtgataattagtaaactttgtcacctgcaaattaaaacaaataaaacatggcattagagcaaaataaagaaaataacatagaagtgaaaatgtcaatgacattaggaaaaaaagtaccattacggttcgctcgtcagcctgtctacgcccattcacatgccaagggcaatcacttgcccctttgcatgctcctacatattttttacgatctgtcgcctttacccaaagttcaaactcctcattgatagcaaactgtctaaccgccaatctaaagaccttcatgttgggatacacagttcctttgaccaaggatggcttattcgcgtcattcaccatcatcctttctcccgcaacctcgtcctcgaccggaggctcaacctcaacctcattttcatcgtgattccgattttcagcaccattgccattgttaccattaccctgttcagttgtagccgccgcttgagcattctcggcggcttcatcctcagccctcaaacccaaaagcacatacaactcgtcatcatccacgatgtttacccttccttcctcatctaacgattcgataatctgtaggttttcccaatcaacaataggtggtggatgtggttctggctgtggctgttctccttgagtaggaggagaactaccaccactatcaggttcatcagcaggtgattgtacaactactaattgactcccaggctcctcctcgagcctagagaaaaagatgcaaataattgcaaacaatagtcagatctatctaaccccttacttccagcaaatcaatcgtgtaatcatgtcactgaaaaaaaaatagagaagtgcatacctcccaacaatctgtagccaggtggagtcatccatggagtcaaaccctaaccacacattgagggaggggaggagggagtggagggcgggaagagctgaccgaggggcagcggctgatgggggtggcagcggatggaggtagcggtggatgggggcggcggtggcggcggatgggggtggtggtggatgggggcggcggcagatgggggtggcggtggatggaggccgtggtggatgggggcggcggcggatgggggtcgcggtggcggcggcggatgggggtggcggtggcagcggaggcggatgggggcggtggcgctgactgggggaggacgaggtaggggagtggcaggggcgggggccggcgccggcgccgaagacgaagccgatgcggaggcgcgctgctgtcgcctctgccgatgccgctcccagcttctccctcagtcaacaccgacgctggatggctggagagatcgattcgatctggtgataaggacacaagggtattttggtcagaacaaaacttaaaatagagtaaaatcatttctagaaaccaaaaagatcaaaaatagcatttcagtgaacaccccttagtttaggatagcattttaatgaatcactttgaagggatagtattccagcgaaaccattcttttgcgatagcaaaatcacaattttctcacttttcggcagggccgtctccagaaattgggggccccggaacgaaatataatttgagattctaaatttacttttgattcagtcgattatttaaattagtaaattatattcatggtatttgatttaaaagaatag

SEQ ID NO: 24830 - DNA, 1019 bp, Oryza sativa
gctttccatcccgaccagttcactgttcacaaatcggttgggagggcaaggggggcgattttttgctaaaattcaaggtaaaaaacacattattctccattccttctcaatatatcgatcatcatatatttttcttcgtatgttgttgatttcagatggatcgtagatggatgtactatgcgcatcgttcgtctaccgagtatagagagggggtcactgaatttgtcacatttgcggataatgacagaaaaagtaggatgagcatgcacatgttgtgtccatgtagggactgtaagaatgaacagatgatcgttgatagcgatgaagtgcatgttcatttgataatgaatggattcatgaagaaatatacctgctagaccaagcatggagagcaagaggcgcctgatatcgcagctgaagaagtgttggatcaggatgtagagaacaccgctgtgactcgagaaggcatgttcgtaccttctcctttaggtggagagaccatagatttggacactcaatgtctatctacaatgttgcatgacattgaagacgcagaggacaacgacagagattttgagaagtttagtaagttggtggaagattgtcagatgcccttgtatgatggatgcaagtcgaagcacagcaagttgtcatgcgtgttggaactcatgaagcttaaggctagtaatggctggtcggacaagagttttacagaacttcttgagctgttaaaggatctgttgccagaggggaacaatttaccgcagacgacatatgaagcgaagcaagtattatgtccgttgggcctggaggtcagaagaattcatgcatgtctgaacgactgcattttgtattacaaggaatacgctgacttggatgtctgccctatctgtggggcatcaagatacaaacgagcaaagagtgaaggtgaaggaagtaagtcaaagaggggaggcccaacaaaggtggtgtggtatctcccaattgcggagcgcatgaagagaatgtttgcgaataag

SEQ ID NO: 24831 - DNA, 2464 bp, Oryza sativa
agcaagtgtgagttctggatgtccgaagtcaaattcttggggcacgtgatatctgccaaaggagtcgctgtggatcccgaaacagtgaccgccgtcaccgattggaagcaacccaagacagtcactcaaattcgcagtttcttaggtttggcaggatactaccggaggttcatcgagaacttctccaaaatcgctcaacccatgacacagttgttgaagaaagaagagaaatttttgtggagcccgcaatgcgagaaggcgtttcaaactctcaaggaaaagctggtttcctcgccagtgttaatcttgccagatactcgcaaggatttcatggtgtactgtgatgcttcgcgccaaggattggggtgcgtgctcatgcaggatggtcatgtggtagcctatgcctcacgtcagctacgacctcatgaaggcaactaccctacccatgatttggagttagcagcggtggttcatgctctaaaaatctggcggcactatctcattggtaatcgctgtgaaatatatactgatcataagagtttgaaatacatcttcacccagtcagatctgaaccttcggcaaaggagatggttagaactcatcaaggattatgatgtgggaattcactatcatcctggtaaggccaacgtggttgccgacgctctaagtcgaaaaagccattgcaacactctcaacgtccgtggcattccacccgaacttaatcaacagatggaagccctgaacctaagcatagttggtcgtggattcttagctgcgttggaagccaagcccaccttgcttgatcaaatccgcgaggctcagaagaatgatccggacatgcatggactcctcaagaatatgaaacagggtaaagccgctggtttcacagaggatgaacacggaaccctatggaacggaaagcgggtatgcgttcccgataacagagaacttaaacagctgatacttcaggaagctcacgaaagtccttattcaatccaccctggcagtacgaagatgtacttagacttgaaggagaaatactggtgggttagcatgaagcgggaaattgcagagttcgtggctctttgtgatgtgtgccagcgtgtcaaggcagaacaccaacgaccggctggacttctccaacctctccaagtaccagaatggaaatgggatgaaattgggatggatttcatcaccggccttccaaaaacccaaggtggatatgattctatatgggtagtcgtggatcgattaaccaaggtggcccgatttattcctgtgaagaccacctatggagggaacaaactagcggagctctacttcgccaggatcgtgagtctccatggcattcccaagaaaatcgtatctgataggggaagccaattcacctctcacttttggaagaagctccaagaagagctgggtacccgattgaacttcagcaccgcataccacccgcagacagatggacagaccgagcgtctaaatcagatcctagaagatatgcttcgcgcatgtgtcctagatttcgggaagacctgggataagagtctcccctatgccgagttctcatacaacaacagctaccaagccagcatacaaatggcaccgtatgaagcattgtatgggcgcaagtgccggacaccactattgtgggaccaagttggagaaagccaagtgttcgggactgatatcctgagagaagctgaagctaaagtcagaaccattcgggataatctaaaggtggcccagtcccggcagaaaagttatgcagataaccgacgccgtgatctggaattcgcagtggatgactttgtgtaccttcgggtcacaccattgcaaggtgtacacaggtttcagacaaaagggaagctcgcacctcggtatgtgggtcctttccgtatcattgctcggcgtggagaagtcgcttaccagctggagctgcccgcctccttgggcaacgtgcatgatgtgttccatgtgttgcaactcaagaaatgtcttcgagtgccatccgagcaggccgactcagagcaaattgaagttcgcgaagacttgacttatgtggagaggccagtgaaaatcctgcacaccatggagcgcaggaccaggaaccgagtaatccgtttttgcaaggtccagtggagcaaccacgccgaagaagaagcaacatgggagcgtgaagacgagctgaaggcagcccatcccgatctcttcgccagttcctccgaatctcggggtcgagattccgtttaaggggggtaggtttgtcgcgtcccaaatcgactctaaaattcatcctcgaaattgtgaaaagaataattaaaattcatgtgaaagcctccaacaattaaaatgtgcaaagataaaagtcaaatgaggcttggaggatttttgtatatttcctaaaagcctaaaatgtgtaaatcaattttggtggaattttcagagcacaaacaataat

SEQ ID NO: 24832 - DNA, 4147 bp, Oryza sativa
tcccatatgtcctcgatggcaccgtaatacgtggcagttgttccatcgtgtcccatggcatcgacacgaacagcgctgttttggttcgtgctcttcatgtcttgggctctcgtgtagaatgtgtacccattgatctcatatccctggaatgtcgcgatcgacccagacggtcccctcgccaggaaggcaagttgttggttgatcgactcgttacccatgagatgttgtcgtagccacgcggggaaagtatcaatgtgatgccgtgtaatccatgcatcggacttaccgatgttcctggcgcgaactagagccaagtgctcctcgatgtaaggagctaccaatgaagagtgttgcagaacagtgaaatgggttttacggaataaattgttgtctaccgtcattattgctttccttccgagagttccctttccccgtagtctcccttcatggcgtgattcaggtaccccaattgggcgaaggtcttcgataaattctacgcaaaattcgatgacctcctctgttccataacccttggcgatgcttgcctctggacgagcacggttacgaacatacttcttcagaacgcccatgtacctctcgaaaggaaacatgttgtgtaggtacataggcccgagaatacggatctctttcacaaggtgacaaagcagatgcgtcattatattgaaaaatgaaggtggaaatatcaactcaaaactgatgagacattgcaccactttattctgaagggcttctaatctatccggatcgatgaccttctgcgaaattgcgttcatgaatgcacatagctttgttattgttgcccggacattgtctggaaggataccccttattacaactggtagcagttgtgtcatcaacacgtgacagtcataagactttaggtttgtgaacttcttctccttcgtgcttattattcgcttgatattcgtggagtatccagacggtacctttatgctctccaagcattcaaacatactttccttctctgccttgctaagagtgtagctggctggactcaagtaatggcttcctttctcctttggttccgggtgaaggtcgccgcgttgttccatatgcttcagatcattacgtgcttccagtgtatctttcgactttccgtatacacctaggaagccaagaaggtttacgcaaaggttcttagtgaggtgcatcacgtcgattgcgtggcgtacgtccaagaattcccaatatggtaactcccaaaatatagagttctttttccacatcgccgcgtgaccatcttcgctctctatatgctggcttccaggcccctttccgaacactactttaagatctttaaccatagcaaacactgttttcccgctgtgatgtttaggcttcgtacggtggtcggccttatgttcgaagtgcttgcctttcttccgtaccgggtggtttgctgcaaggaattgtcacgtcctgataaattcatcccgaaataaaaataattttctaaaaggaataatagaattaattaaaattcgaaaagaaattggcaaacactaaaatacgtacaagaaaaattcaaatgtggcccggagaatttttgttaaattctccttggtctaaaaggagccctcaaattttagtggaaatttcagagcacaaataataattattaagaaataaacaaagttaaaaaggttttataaaaagaaaaaccctaaaaagtctttttcccccccttcccctcttgggccggctcggcccacctccctccctctctctcctctcccccgcggcccatcggcctccccccgcgcgcgcgccgctgacgggcgggcccgcccgccaccctcgttgacgggtggggcccacccgtcatcccctacctcgcgccgcacccgccgcctcgcccgtgccctagcgccgccgccgccgcggattccgccgcatcccgccgtccccgcgcgcaataaagagggggaaatcactccctgtgattccctctaccatttacccgctttcccctctctatatccttgggattcgtccggattcatcccgtaatcctcgacggcgtcatcaatggtggccgagatctccgcggacgtttactccctctcaggccaccctctgtccctaccggcgctatataattgctccccgtgcctctctcctccgtttccgccgttcgccgcttgctctcgccgtcggattcgtgctcgcgacgtccacctctctctccgccgtcgccgccgacctccggtccgccgccgtcgtcgctccggacttcctcccgactcggcgtcacctccttcggcttcgccacgtcgtcgtcgaccccgtccgccccttcgcttcgcccgccgaccgccggagctccgtcgccctcgtcgtcccgaaccgcgccgccgccttcctccgcttcggtcgccgttcccgtcgtcgtcgtcgaccggggtgagccgtggaccgtccctttcgcttccctctctcctccgctctctcgggcgccgctccgccgcgccggtggtcgccggcggtgaccatcggggcgcgggcgcgccgcctcccgtcggccgtgccggcgaggccgccttcgggcgcgccccgcggctgccatgtggggcccggccgtcagccgcccgcgccctcgggtgcggctgacgcgtgggacccacggcgccggccggcgcaagccgcatgcacccggtccaccgtggaccgtgaggctgccgcgtgggccccactcccgtggacccggtccgcgcgcccctcccctcggctgacgcaataaatccgattttaaattaaaatttaaatgaagaaattcgcaaatattcatttaaagagcatataaacttcaaatggccataacttggccatttgaactcggaattggaccgttcaagtctctaatttttccttaagaagtcaagaacccatttttgtgctttgtttctacttgttatatggagtttattagagtaaaagccttttcttttccgttggtcgtgtagacgctgcagcttcggaagatccgctcttcgtggaagttgaagccgacgtttgggaaagcgagcaaggcaagtcacatcatccttgaacatattgaatcccagtttataaaactatgttgatttaaattattgcattatcgctttatttaaattcccgcgttatcactgttttatctagccatgcctatttacctttgttatgaccttattattgttattgttattattaccttgttcaccctaggataaacaaaaccccaactagtgggtactctattcatggttccactagtatgaatttaggtagatgcttcgctgattaaataggataacattaggtggttttacaactctagactttgggaatattcatatcacctggacactttggaatggttggcttatggtggaattggacatacacctctcttcctctttcaaaacccctaaaacctgttttccggtggggtttgggtgcatgccagttgtgggaagtagcaccccggccactataaggattaagctcgggcctctgttgcaaagcactaccgtacttccacatgtctagtgggtaaggcttagtttgtggctcagtctggttataaacaaaagtacacggatggagatggacgaagtcgggggtcgatggacatctctaggacaaatgaaggctacacgagctgcggcccggtagtcgagatgtcatggcacagggctggtgtcctgctgctgggggctcattcctgcctacctgtcccggaggttccggccgtaggtggggttgggtcggtactcttgtttatggctaggatgggttgggaactatgtcacgtcttccgttcgtataccgtggtggtatgtggcacgtggttacacgtgaggaagatgtgtcttgtgggtaaagatgtacacctctgatcagagtataatctattcgaatagccgcgccctcggttatgggcaagccgagcaatgtacccaagtcagtgttttaattcttaaaatttgcttaacaactaaaatgtggaatggttggcctgggttggcttgggacgagctgggacccagggtcgggttgccagttcggtctgaatcatcgtaggccttgggttaaggcaggttcgtgagggttcacggccttg

SEQ ID NO: 24833 - DNA, 7791 bp, Oryza sativa
  unsure (1)..(7791): unsure at all n locations
ttcaaatggccataacttggccatttgaactcggaattggaccgttcaagtctctaatttttccttaagaagtcaagaacccatttttgtgctttgttctgctattatgtggagtttattagagttaaagcctttttcttttccgttggtcgtgtagacgctgcagcttcggaagatccgctcttcgtggaagttgaagccgacgtttgggaaagcgagcaaggcaagacacatcatcttgatcatattgaatcccagtttataaaattatgttgatttaaattattgcattatcgctttatttaaattcccgcgttatcactgttttatttagccatgcctatttacctttgttatgaccttattattattgtttttgttattaataccttgttcaccctagattaagcaaaaccccaactagtggacactctactcatagtaccactagtataattttaggtagatgcttcgcaatttaattaggtaacattaggtggttttataactttagacttgggaaactttcatatcacctggacacttcggaattgttggtttattgtggaattggattcacaccatcccctttattcaaaatccccaaaatggttttaggctgggctcggggagcatggttttgatagtagctcctcggccgtataaggaccggtcttcgggcctctgttgcaaagcactaccgtacttccacatgtctagtgggtaaggcttagtttgtggctcagtctagtcataaacaaaagtacacggattggagatggatgaagtcgggggtcgatggacattctccagggcaaatgaaggctacacgagctgcggcccggtagtcgagatgtcaaatagcacagggttggtgccctgctgctaggggctcagttccgtctgcctgtcccgggggttccggccgtaggcgggattgggtcggtactcttgtctatggctaggatgggttggaaactatgtcacgtctttcgtctgtataccgtggtggtatgtggcacgtggttgcacatgagaaagatgtgtcttgtgggtaaagatgtacacctctgatcagagtataatctattcgaatagccgcgccctcggttatgggcaagccgagcaatgtacccaagttagtgttttaattcttaaaacctgcttaacaactaaaatgtggaatggttggcctgggttggcttgggacgagctgggacccagggtcgggttgccagttcggtctgaatcatcgtaggccttgggttaaggcaggttcgtgtgggttcacggccttgattaataacactgtatagctctaggatcgtctttataaaatggctttgggcaactaagtgacttttaaatgctgtttactgcaaaacctaacccctattattatccccttgtacccccttgcattaatcatgcatctgccggtgtgacttgctgagtactgtggttgtactcattcttgctcaatcttttcccccttcagtaagagaagctttggagaagatgtcttaggtggagtcctggcttataccccagttgagcgcctgtgaagatggagccgtaggcccgctagtccgctgctgtttatttttgattgccaagcctgaagcgcctctgtaataatgtaaatactatcgatataataaagatgtgtcttttatatcatgtttgtatggtgtaccccggcttttcctgggacggggattaatacactagcgttcgggaaaatgcaattttctcggtcgcgacaggaatcgacgatgacccatgtatacaaccttcctacagtgcttaagatacgtactttctgtttcatccatacagtgagtgcaagccttgtaccccttgttggactgtccggataggttgctaagtgcaggccaatcgttgatggttacgaacagcagcgctcgtatgttaaactcctcctgtttgtcctcgtcccacacggggacaccttccttcttccacaactgtttaagatcttcgaccagtggtcttaggtacacgtcgatgtcgttaccaggttgcttggggccttgaataataatcggcatcattatgtacttcctcttcatgcatagccagggggggaggttgtagatacacatcgtaacgggccaagtgctatggccgctgctcatctctccaaaaggattcataccatccgtactcaaaccaaaccgtatgtttcgtgcgtcctttccaaattctttaaattttctgtcgatgtttcgccactgcgaaccatcggcggggtgtctcagcatcccgtcctgttgacgctcttcagcgtgccatcgcaacattctagcattccccttgttcctgaacaaacgccttagccgtggtattatagggaaataccacatcaccttagcaggaattctcttctttgttagctgcccgtcaacttctcttggatcgtcccatctaatcttgtatcgtagtgctttgcaaacagggcatgcttctaggttctcatactcctcaccgcgatataggatacaatcgttcggacatgcgtgaatcttatgaacttccagtcctaacgggcagactatcttcttagcctcgtacgttgtctcgggcaatttgtttccccccggaagaatgttcttgacgagtttcaataaatcgccaaatgccttgtcactaaccccattttttgccttccattgcaacaactccagagtggtatccaactttttgtgcccctgctcgcaacctgggtacaacgaagttctgtggtcctccaacatcttgtccaatttataggcctccttttcactttcgcagtcctccctggcgtcctgcaacatctgaccaagatcatccgcaacgtcgttaccatcagcagctatttcctcctcgcccgtttgatttccttcaaatccaacatactgagcaaagtccggaatattgacgtcttccacttcatcttcttccatttcaacaccttgctctccgtgggatgtccaacaattatagcttggcatgaaccccgactcaaacaagtggaaatgaatagtcctggatgcagaatactccttctgattcttacacttattgcatggacaacaaataaaacccctttgcctgttagcttcggccactctcaaaaaatagtgcacgccgtcaataaactctttggaccgccggtcagcgtacatccattgccgatccatctacatgagtcaaaaaaaccgtacacaaataattattcttacaataatgacagtcatacaataattataagatatctttattcatacaaaaatcataaaatattacaccaaataattcttaaaaactatttgtaaagttttaaactaattttaatgtgttttacttcttttaattttcattttagtttgttttctattatttaagattaactttcactagagttttccttctcaactattttataaaaccttgtttagcaaatgaactaaatttctatatattctttcttccccacacacattttctctctcatcaacttacaactaaattttggagacaaaaaaagtatgcaaaacataggtgcaaatgtagtatgacaaaaaaaacattggaggatgaatttgcaaaccttttaggcacctccgatttgtatgtaattaccaaaataaattcaatagaaattttggcatgacctcccctcttttttaaagaaattttgaagcttgctcgggcagctggaggaggaagaagacatatatataggggtgggactttagtcccggttggtagcaccaaccggggctaaagatcaccgggatctttagtcccggttggtaaagttacgactttagtcccggtgatcccgggggggcctgacatgacctgacagcattcgaaccgggactaaagatgatctttagtcccggttggtaacacaaaccgggactaaagatcaaatatgcccgttacccttttgaaccgggactaaagatcatctttagccccggtttttattgcatccgggactattgtggaaatcggccgaccgacgaaagatggtttctccaccagtgatagcagtctgcttctgtgagaaggaacaactagtttgtagtatttttatggtgcggactactgaatttaaaagatggttgtaagaagtatggtccctactgcatgatcacttcaatttcatcattgagacaagattggtgtgtgtgagtggatgtcacacttcaactttcttcagagatatcatctaaatgattggaataaattattggccttcttggctgaacttttgagaactgcaccaaaagattgatgacattcaggatacaacttttgagacctttacatgcatgtcttgtagttgggttgtcaccgtagcataacaattgtagtgtaattaaatttattcccgttgcagcgcaagccatttggccaatataaaaagtatcatttaggttccttcttatatttaccttagaaaagtgtacagagtaccaaatagacttattatgacaaacattacccaaatctcacatctaaatagctgaaaatatatgcaacagcactcaaatagacttattttgaagttctctattgtgctgtatacattataattttttggtattcacatatctaatttatattgctggttgctaaaaatatgagaaactttgctgagatctgacttataaacagtacatacatcatacatgtacaggaacaatgactgtagatgtgcagtacactatctttgtcaattagcggtaccattcatttataaatccatatagtccatgattaatgaaattttgaagtacatgcactggttaggccaatttctgattcaagtccacatccattctttattattcctttgggatatcaaacatttgacatgtgaaatactgtgttcgtttgtgatatcattcattattcgtttgggatagagttttgaaggaattaaattcaagattgtgttctcaatggaaatggacatgaactcataacttaacatattggttttctaataaacatacttttatattagattgctactcaaataaaaggtgaggagaccgatcgatgggatctggcagtcttaacctgtgattgattgagcgagtcttgttctctgatcctgacgacctactctgctccagattggaaggaatgcggcaccctcacctttacacaccgttagacctgcaccttccaaacttcgttcctctgtgattgtcacaaggggaaatcatcgtgccctacctgggaacctccatctttatcgtctttgccatctggttcatctctggtacgcgactctccttctacctactgtctatcgtatcatctgtatcccctacttcctttccaatcccgcatttgtctccaaaattgttttttttcagagtccagaaatcattcctttgacctcctttgtgcaaagttgggatctttaactacatatcactatgcttattgtttgctttggcagttattggcatgcttctaagtctctaaagaccaagacccaatgactataaacactaccagttagcagcaatctccatcagtggcgtagccaggaacttttcgccgggtagtcctactttggaagtttacatcacatacgaaaattttatcgcaaaccccacatataagtataaatttgggtaaaaggtgatacaaatatagcaataataatatcttaattgactaaaggagctgcgtactggtgaaggccgaaaggagctgcggctccatcctcacaactctagcgcctggccgcctgatctagttgggttcttgggcttgtgttgttgggccagttgggtctgattttttttagggttgggggatctggtctgtgggccaaaatcgaggtagtcacgagcccatcgggactacccctgctacgcccctgatctccatgccattgcttctgcttttacctttgcaggaagatgtggaggcaagctgtccaagactccaagaccgatcgtttgctcatgtgctggtgggccttcaccggtctcgctcacataatggagggaacctatgccttcgcgagctcatgagaagaaggttaaagtcctcttcagcaatcaaaacccctctttctccgatgaagtttgtatgtcgtccctgctgcttacttgccctgcccttgccatcgtttattcaccttggaggtaacaggtatatatggcctctgcatttgttcagggaaagagtacagcaaaggcgactccagatatgtcgccagagacccagcaaccgttacagttgaagcaattacagccgtgttggaaggccctggtttactcctttctgtgtatggtttctctcatcttgtgttctgattcaggatagacagcttactttatttcattttccggttataaatattcagcgcaattaactttgaccatccatcttatttaaaaattatgtaaatattatttattttgttgtggcttgttttattattaaatgcattttaaacgtgacttatatttttgcatatttacactaaataagatgaatggtcaaatttcatggtcaaagtctatttcctcaaatatttatgactgaacagagtaagagtatattcctcttaccttgaatttcattcgttaagtgtacagcactactgatgtacatcttgcattccatgtagttcagaatatagccttttgttttctagtctctagctgacaaaaggtctccctgcttgcagctatgccatcgcacgccagaagtctgacagccatatcctccagttcactgtctgtcttggtcatctctaggaataagttcaccggaggtccctcaacttaacagcgaaattttttgaggccccttaaccacaaaaccagaaatgtttacccctgaacttactcaaaccgttcaccggaggtccctcggcagtatttttgcccggttttgctgacatggcatcctagtcagcaaaaaaaaattaaaaaggtacgtgaggcccatatgtcagctgcacatatttttttcttctcttttcttcttctcttctcttttctcttctctcctctctcttctccttcaggctggcggcgggcgcagccgcgatggctgagcgcggcagcagagcggtggcgggctgtgggcggagcggacggcgggcgagcccggcggtggagcggaggcagcggaggctacgggcggagcagccgcgtgccgtggccgccgtcgtcgtcggctccccatcgtcgtcgtcgccgtgggcgaggctacacggcgcggccgttcggcggcatcggccaggcgtcgcagtggccgtgcataggtggctcgaagtgccggctgacgatgcaccccagtcgctcacgctcctcctgtgccgcggctgcggcagtggtggcggcggcagcgtcgccggcctgatcccatggtcctcccggatgcccagctcgcgcagctgcagcaggagcgtgtccacgctcggcgtgccatcggcgtcgtggacggtggtcggcgcgggcgcggtancctcgtcgtcttcgttgacgtcgcggtagcacttgacgtcgtagctcatacgcatatattccgggtacagacggccgcatgtacatgcgtcttcgtacgagcatatatatgcatgcatggagacgaccagctatagcctagctagcttcttgttggtttgccgcccgataacatgcagacgtatatattagccaagcatgtgtatatggctgagcacactcacatgttatatgcaattacgtgcagcggaggagcgcggatgcgggggtgcag

SEQ ID NO: 24834 - DNA, 2526 bp, Oryza sativa
gatgctaggagaggcaccaccggcgggggaaggggaagaggcagaggaagcgattgtttcttggtcgccggccgcctccccctccctcccaaactcgctggccgccgcgctcgctcgcctccgctccgccgccgcgctcgcactccgctactctgtccgcggcctgctcgcgctccactgctcggcccgccgccgcgctcgcgccttccgctgctccgttgccgcgctcgccctccgctacgctgcccgcatccgtgctcgccgctccgctccgccgccggacggccgcgccgcgtagcctcgcccacggcgacgacgacggcggccacggcgcgcggctgctccacccgcagcctgaaggagaagagaagagagagaaaagaaaagagaagaggagagaaggagaagaaaagaggagaaaaaagatgtgaagctgacatgtgggctccatgtgtttttttaattttttttgctgactaggatgccacgtcagcaaaaccgggcaaaaatactgccgagggacctccggtgaatggtttgagtgagtttaggggtacacatttatggttttgtggttaagggagctcaagaaatctcgctgttaaattgagggacctccagtgaacttattcctcagctctacggatgcttggtttacttgcctacttgggtggcttcaacttctgggctagtccgttctacttctgggcttatttcattggacccaacagtttgtgggttgtgatacaagggaaaagttcattttacaccctcgaactcttatgattgtcgaaaatacacccccgaactacaaaaccggatataatacaccctcgaactgtcaacaccggacacttaaccccccccccccgggctgttttcaccgtggtttttgccacatcggctgccacgtcggatgccacgtcagccctcgccacgtcagcgcacaacataacatgggccaagcccatattctctcccccctctctctccctctctctctccttgccgtgtttgttctcctctctcccacgaccggtggcggcagctgcgtcggcggtgtcgccgcggagctgcgagggcaacgactacggtggctgcgtcgagctgcgagggccgcggctgttgcgtcgagctgctagggccgcggcggctgcgacgtcggcatcggcggtggcggggagaagtccttatcactctcctcttaccgatgtcaagcaaaaagagaagagcaaaatgttagtatgcacaaattcaggtctcagattcagatgatgtaattaacctacattgactgtatcttgtgaagacttcccagattgtacaccaagaccaatgcacgtcgttgcttccaccacgcgtcgagctgcttcttccctgctaagccaaatccaagggcgcgtgcggcgatgacgcccggaccttctgttgatgactacgcgcagaggcttccaccggcgaccgtccgcgcaatcggggcagcgccaccgccctcacagtagctccctcccgccgccgcctcgcagctccacaccaacgcggcagccgcagccctcgcagctccacgccgacgtcgatgccgcagccgccgcggccctcgcagtttgacgccgccgccgtagccgtcgccctcgcagctccgtgccaccgccgctgccaacggtcgtgagagactggagaacaaacagggcagggagagaaagagaaagagggagagagagggggagagaatatgggcttggcccatgttatgttgtgcgctgacgtggcgagggctgacgtggcagccgacgtgtaaaaaaccacggtaaaaacagcccggggtgttaagtgtccggtattgacagttcgagggtgtattatatccggttttgtagttcgggggtgtattttagacaagcataagagttcgagggtgtaaaatggacttttcccttataccaactcggaaaaagtatacatttagtccctcaactatcgccgaagtatgattcatgtcctccaaccacaaaaccaggtatatcgacttctccaactatcaaaaccggtgcaaacaatacccctgggtggttttggatgacgtgccacctacgtggcagtcttgaccgagtctttgtcctacgtggcattagaataaaaacaaaaaataaaaaggaatatgttggacccacatgtcattcaaacaaataaagcattgtgggacccactgacatgtgggacccacatgtcatcctccctcgccatcccttcttcctgctccctccctctctcccccccgcctttctcctcaccttggccggagcagcagttgggagcagcagcagcagcgggcaggagtggcggcggtggcggtggggacggcggtagggagcggcggcagcggtagggagagggaggtcctagccgagggcgcggaggtcggcgagggtgtaaacgctgaggggcatgtaggaggtaaggtcaccggcggcggcagcgggtcgtaggtggccttgtcgagtacccatgacgcggtgaggtggcagc

SEQ ID NO: 24835 - DNA, 13659 bp, Oryza sativa
atgaatgaatattgcaagaatgagcatatgacatactcaacaagccacacagcaaatatgcaagtgcacaggataacaaaggatggcataatatagctcatttgcagaaaatagcatttaataaatatttaagagaatagtaaaacagttgtataattaatcaatattaaataaacaccatacaacacacccgtgttgcataggcccaaccacatttgaacaaccaaccccagttgaacaaattgaacctccaaaccaggaattaaccattccaaaccaggaattaaattaattaacacattattaccattaatgagtagtgtgagactaatcacgaaaaacattgctcaactcacccataaccgcgggtacggctattcgaatagattaaactctgatcagaggtgtaccactgtacccacaagacacaaccccacatcatgtcaccatgtgcctcaataccaccacggtatctcggaaaggaattgtgacaataccccttgtacaatgtcacgcccggaaattcactagtaatttccgaactaatttgtgcattaaatcctcgtccaggaatcagccgaggtacacaaactgacaatttaatatacagattcatcaaattaactaaaacgataaatacttacttaagaggcacttaatcctcaccaagaagaaaactgcagcggaaaataaaatctagcgaagctccggctccactcccacaggcagctcaactggggtataagccaaacgtcttctccttctggatcctttttcttcaactgaggttgattgattattgcaagaatgagcacatgacatactcaacaagccacacagcaaatatgcaagtgcacaaagattccaaaggatggcataatataggctcatttgcgaaagcagcatttagcaaaacatttaagataagtaaaacagtagagtagttaatcatcgattttaatcaacactgaacagcacacccatgctgcacaggcccaaccattctgaacaaccatacccggctgaacagatctaactccaaaccaggagctaagcaaattattaccagatataacatccataattattgtgagaggtgtgagactaatcacgaaaaacattgctcaactcgcccataaccgcgggcacggctattcgaatagttttactctggccagaggtgtaccactgtacccacaagacacgattccacacatgttgccatgccccgaaataccaccacggcattgcaaagggggaaatcgtgacaataccctttgcacaacacaactcaaaacagtgcaccgttcctggatcataatcacccccttataaacaaggcatggactccccagcgacccctatggacttctcgccacttctcagtctggcgcactataataaatcatgctatacaaaggataaagccgttgcccacgctggcttgtggttggcacgataaatgtttcacaacagtagctcgcgaaccggtccttaattgccatgagcacgaccttcaaaaccatgtgctcacaacccaccattaatcatattttaattaccaattaattttcataacacgattaaccatcgtgagctaccattaaatataaccataaatattaatgtagtatatatgattcatcccattagtgagctaatgtttctaagcattgctaagcaattatatatatacataacatttagctgaaccaaaccaatacataaggttcaagctaatcaattttattaccccaaggtatcaaggaatagggcattcaatgcaaattggccataacaaaggaataggttcacaccacccgatgacattcgaaaataaatgcacagttgaaacaaatagagaatttaaatataggatcaacatgctcaaaggattgtgtttaggatctgtgtgacttgccttgcaataatcggtcttcaattaatcttcttgatcacttccgacgcactcacgaaccttcgcaacgacggaaacgacaagctaacacgcaaaacgaagaaaaaaactaataaaaaccaaataaacagtacataaaaagtaaacaaacacgtagatcataattttagatgaattatgagacttgaacggccttatttcgacttcaaatgaatttattatgaattttacaagatcaaatctaattaaagcccatttaaaaagaattaaataaatttaattcaatttatggacaattttaatatgtagatctttattttagaaaaatttagcaactcgaaccacctgaaacggatctacggttatttagttatgattttccgaagatttaatctattagaaaaacgggaaaaagaaaaactgatgacgtcatcgacggcagccacgacatgggtggcgacctcgccggagctagagaggtcggccgggctattggagggcatgtacacgtagaggacgacgagacgaacccgatggtactcaccgaagcgacgaacgacgacggatgacggccggcgacgaagaagcgacggcggcgacggcttgcacggtggcgacggctctacgggtcacgggagaggacgggagagggggcaaacgaaagaggaggactagggggtcctatttatagccttggattgaagagatcggactcctcccgcaagaaatcgatccgggaaaatcaaaactcggttttggagataaactcgaaaacgagtttgattcggataaaatacccaacgatttgctccgattcttgggggaaaagatagaggaggatgagaggatcaaacccctcaaaaatccggaagaaacggggtcggattggagcggatttagaggaggaaggcggcgcggcgcgcggctcgggctcagctaggcagccggctggaggttagggacgacactgtagcagggaggcaaactagacttttctgtgtggtttcctatgctaggcccgattgaaggagggaggcaaaacagactttgacagagagaagggcggctcggctgcagctgggccgattgggccggttcggccgcgcggagagagaaagagttgggccgaaatcggcccaacgacttagggaaggatttaaaaactttttccaattaaaataatcacttaaatgatctttcaattgttaaaaatacttccaatgctcaaataattccaagaaaaatcctgaaaatacttggacactaaaagtacttaacaaaattataattagaccatttaatgattaatttaatatgtgggtaattactgaaatgctctttgtatgattaaaattaataattgagctccaaaaaatccgagaaaattccagagagtataattaaccatggagaatttaataaaaattaaatccatccatgctttatatttaggaaattttatttcccacatttaacttcacttgtaaattgatgaacatttaatataaattctattaataatttattaaataatttataaatcctaagacgaaaatcagggtgtgacatacaacataacccattacagcgcacctttcctggatcataatcacccccttataaacaaggcatggactccccagcgacccccgtggacttctcgccacttctcagtctggcgcactataacgaatcacgctatacaaaagataaagccgttgcctacgctggcttgtggttggcacgataaatgtttcacaacagtagctcgcgaaccggtccttaattgtcatgagcacaaccatcaaaaccatatgctcacaacccaccttagtcagatcttaattatcaattaattaacatcacacgacttaccatcgtgagctaccatataaaataaccattattcataataattatgtaatataatttatatttaaccccttttagttggctaatgtttctaagcatggctaagcaaacctatatatagcatttagctgaaccaatccaatatataaggttcatgctaatcaaattataacccataggaaaataaagtcatcttcggccattaattaatagggaaaggctcaccacccgatgacattcgaaaacaatgcacagttgaaataaaataatagctttaaatgggatcaacatgctcaaagggttgtttgggaactgtgtgacttgccttgagcttccgcaaacgcttcggaaccttcctcaacggaaacgctctcctccggaacgtcggaaactaaagcaaataaacaaaatcaataaaacagtacaaaaacaagcataaacagtacatgtggatatttttaacatgtagatcttgattttagaagaatttagaaacttgaaccacctaaaacggatctacggttatttagttatgattttccgaagttttaatctattagaaaatcgggaaaagaaaaagaaaaggaaacgatgacgtcagccctaatgatgacgtcagccctggtgatgacgtcatgctgacgtcatgctgacgtcgcaatgacggccggctcgggttggagagctcgccggagctagagaggtcggccgcggaatcggagggcatctacgcgtagagggcatcgagacgaacccgatggtactcaccactacgagaaacgatgcacgacggcggccggcgacgagaagaagcggcgcggcggctcgggtcgacggcggcggaggggctccggtggtcggcggcgaaagaggaggggcagccgaggttcctctcaccacggcgcacctaacggcgatgacggcaagcggcggcgacggcggagacggcgcggcgacgtgaccgaagacggccggcggcggcggcggacttggagcgcgtcgcggcggcgctaggaggcacgggagagctcgggagagggggcaaacggaataggacgacgaggggaagctttatatagcattggattgaagagatcgagctccaaacgagaggaatcgattcgggaagaaatcaaactcgattttagggataaaatcaaaacgaattcgattcggagagaatactcaacgattcgctttgatttttgggggaaaagaaagaggagaacgagaggaacaaaacccctcaaaaacccggaggaatcggggtcggattgaggcggatttgagaggagaaaggaggcggctcgggcggcttgcgaggcggcggccggaggttgaagacggccctgacatgtgggccccacatgtcagcggctggaggaggagggggcgggcggctcggcttgggccggcatgggccggttcggccgcgcggagagagagggagtattgggccgaattcggcccaacgaccaaagaaggggttttttgaacttttttaaataaaacaatttgtgaaatgttgtttcaactattaaaaatacttcccttgctcaaataattcccagaaaattctagaaaatagaggagcaagcatagtatttaataaaattttatctagcctacttttatgttgaaaattttcctagaaaattagggtttagcttgtaggcttttaaaacaatttctaaaaattccaattaaacaacaatttatatatttaagatttttagggcgtgacaagcagcttgttcgcctcgtcggagttgtgctcgcgcgaatgagagagagagagaggaggtgccaaggagaacgatgagagaaccgctcgtgtttttattcacgccatcctccacacacgcgttgatccaccgtggccggctggtcaagtgtggcctggggttaattaaaggggttttggactatttgccactctcccggatggcgtgttctcaaatgctactctcccggatgacttcgctattccgcaaggcgccacgtcactcgatctgaggacaaaatgaccgtcttgcccttcttcttcatttccccttctgtctctttcatccccttccttcgctccggcgaggttcttgggctccggtgagctccccacctcgcactcctccctccttcgctctgctccttacctccccggcccctgctccattctgctgcggccaacaccggcccctgccttttcttttgtggcatcgccggttcctcaccccatcaccgccgacttcgtcttcctcctctcagcttttctacactctcccccgatgtcggcggctgtgccaggtccacccttagggcttttcctaccttgtcgttcttcacccagcaccaggaggtcggttcggcggtggtggtggtggtgtcaccggctcacatgcagggaggaaggttagagaagagggacctgagctagaggaagaagaaggacaagacaatcattttgccctcggatcgggtgacgtggcgcattgcgggctaaaaaatagcacacaagcaagaaatcttctctctccgatggcaaaatagcgaagtcatccgggagaatggcatttgagaacacgccatctgggagaatggcaaatagtccaaaaccccttaattaaatggttttagtaaggttagggggttaaatacctggtttgttaggtgaggggttaagtaatcacctggtaataggttcgggggttacgtagatttattccttcttgtttctttaggaattaggacggttgtgtataattcaatgatgcagccatgcaggtattactcagatcaacagctataccagcttaaattttctgatccatgagaacatgtacttagcaatttctggctagtttaacacgagtctgcttcgaataaaattgcaaaatacaactcaatcaagatcaattgcaccgataaggtggcctcggcttcggccacggctgaggaggatgatgggccggtgttaacggcaggctagctaattgggcctagagaccggccagtgtcgtggctgtgatcagaacctttcaaaactcgaacacatgcattcagcattcggaatgttcatcgcatgaattcttacgcggtggtccaaataatcagctcgatctatttcgggcaaacaaagctacagagacttgcttgcagcttaattacttaattccaaataaaaactggccacaccatcaaagattattatttttagtgaaaatcagtccttgtccacctgcctcgttggagacttggaatggatcaaggatcgatcggtcgtcatcaccgagttccttttcttgaataataactacagatgcatatgcatgcatcgaatcaggacttgagaagtaaccaaatgattaggtccctgcttaataaaatagttaagagatgtggacagtataattcatttgttccgacgatatatgtatcgatcaaaatctagcgcgcgcccgtccagtggcgactggcgatgtatatatcctttgatcaattcattgatgcatagtgcaagtgtacgatgtgtgacctctgaattatttgacaacattgggttggtacgtgacaacttgttactaatatactagtatttgagtgttacacgttttgttttgttttgtaacttttgattgcttacgttttttctctcctttcccatttttcgtcttgttggcgacctcgtcacgagttgccgccaagtgagcacgagctttgccctgttgcagaccaggaccccgtcgtcgtgcgctctcgtattctcccgagcacgagcgcgcgcgcagcttggggacacgccacgcccacgcgtgaactagccatctatataacgcaaacgattcgctgcatgcttcgtactcatcatccaccacaacatctcctccaatcagcagcagcagcagcagagctgatcaccatcacttcggagcttgtcagcacaaggctaattattaagctagggctcgatcgatctgatcgtgatctgatctgatctgaccatcagcagccatgtcgtttaggtgtaagggcggcgtcgcttgggttgctctgctcgtcgctgtcgcggctctcgcctccgccgctcagggatttccaaatcccttcggtcacgaggagttcacggagagttactacgacgagacgtgccccaacgcgcagagcatcgtgcgctcggtcatggagcgccacgccgccgccaacccccgcacggcgccggccatcctccgcctcttcttccacgactgctttgtcaacgtaagtacaccaatctctccatcgtacgaggaggccaccattagaagcataacgaatgcatttgtctaacaatcatcggtgacatttgcagggttgtgatgcctccatccttctgaacgctacggactccatggagagcgagaaggatgccgagcccaacgccaccctcgccggcttcgacgtgatcgacggcatcaagtccgagctcgagcgcagctgcccggccaccgtctcctgcgccgatgttctcgcgctcgccgcccgcgacgccgtcgccatgctcggtgggcccagctggggcgtgctcctcggccgcaaggactccctcaccgccagcatagacatggccaaagaggatctcccgaacccgaaagacagcctggccgaactcatcaggatgttcaaggagcacgacctcgacgagcgtgacctcaccgcgctctccggtgcacacaccgtcggcatggcacatgactgcaagaactacgacgaccgcatctacagtcgcgtcggccagggcggcgacagcatcgacccatccttcgcggcgctgcgcaggcaggagtgcgagcagaagcacgacaaggccacggcaccgttcgacgagcggacgccagccaagtttgacaacgcctactacgtcgacctgctcgcgaggcgggggctcctcacctctgaccaggagctctacacccagggctgccagaccggcgacctggtgaagacgtacgccatgaacggcgacgtgttcttcgccgacttcacaagagcgatggtgaagatggggaacatacgcccaaagcattggtggactccggcggaggtcaggctcaagtgctcggtggccaacacacattattgatgctcatactgttgagtacaacacaattatgttgcactcatttataagtgtgatatttcctttcgatttaattgtgcattaaactgtaagatgtatttttcttttgtacctcaatttttttattcatttttttataatgtatgggagatcactttgccttgaatgttcaaccactcatgcacaatgcaacatcacatcaataaataatttttttaaagagtactcatttttaaataatgttttctttcaaattacttctgtattctatgagcggatcacatcaataaattctgtgtaattaaatctttttataacaagaccacacttgtagtaattagttttttagtttatttcttttaatgtgttttatttaaatgtttcagttgatatcttatgatatttcaatactagttaatttgtaaatgttgtatgatattattcgaattttatagtaagtattttataatgtttcaatatttaatgttttgaatatgatattaaaacttttcaacattatcatgtttttgcaaaatatggtatttttatatgttttttttgtatgttttgctcgttggcaattagtgtttcatatagttgttgttagtgctgcagttagtatctttgaatgttttatttttctcatacattttacattgtgagttgaaacgttttgacaaagggggaacaaatttccagtgaaacaacgttaattttttaatcaaagtataatcatgtgagatcgtgttataaatatttaattataaggaatacaatgatataattgaatcgtaaattagataattaattgaaccatttgattcacaggaagataatagaaaatttcattgaaatgcattcctatgaaggttatgggtaccgggaatctacatggcctacatatttgactacagaggttggatccatttaatatataatagagtaggactcggtcactatgttgtcttgtatccttaaacagggcataaagccccggctgaatactaccatttatatattaggaaactgaagtagtatccggctaacttttcctctctataaccttctccccaacatataaggtaggtagggggctccctcaagggcaaccagataaaaacctaatatcacatgattaatacaatctgacaaattcaatccaccaaactggataggagtagaggacaacctctcatcgagagggtctgaacctgtctaagcccttgtcttccacatccgtccacttttaggtcttatatccattcacttttaggtctcgtatacttcttgctgatataaaacatcgacaattcctatggtcaattgcataggaaaataagcaacatgttaaatctcttgtgaaacttccgtttgtgttatggttatggataaggcatatctcctaccctacaacttatagaatatacgagtatggtataccttcacgtacacgggttgtttccgtatgcgttgtaggaatctgtcacgaattatggaaaatatctctacggattaggtgatatacaaagtcctaatcggagaggatagagttaacatcaatctccatgccattgcttctgcttttaccttcgcaggaagatctggaggcaagttgtccaagaccgatcgcttgcaagcactgtaagtcttccatggtttcccatgaactggtccttaattgccatgggtgcgactagcaaaaccatgcacccacagcccaccattcagtcgaattttagttggataattacgacctatgaaacatggtcgggtgtctcgaacacgcagctcgtcatgatactaaaaggtctaacactataattatcccattatgtgagctagtggtaattaagcatggctaagcatatataattctagctagatcaacataagtatcacgagctagataaattatcacctagggttgataaaggacgggtaacaactaaacatagcacaagcaagcagataggttataccctgatcccatgtaattagcaaaacatgcatatttatttgcaaatggtaaatcatttataaatcgggatcaacatgctcaaggggaatgtgtgacttgccttgcatcttcacttcgatctggggaggggttcgcggcagaggggtggttgcagtggcgatctggggaagcaaagcggatgctggggtggtgctcggcacggtgatgtcgacgacagcctcagtgctgtgcggggtggttaggggtggtggcaaggtgcggatggacgcgacgggaggtggtggagctcgggttcatggtgaaggggtgattgcggtggtgattcggggaaataaaggggcggccgttgtgtggggaggggctgcggagctagtggtggcggcggcgcagagtggcgatgaccagggcggcagtggcgcgcagctggagtcggcggtagcggcggagagaggtggtgcgcgtggcggcggcgtttcggaggtggagagggagaatggagtatgggccggggtggagcttggcacagcgatgccgatggtggcagcggtggagtgcgggcgtagctagagcagtggtggcgggcggccagagggcgccggcaagcgacggcgatggggattggcacaggaagagtggtggaaggcgcggggagctcgggaaaactgggaaaatgggagagggtggtgcgaggagcatttttataggctcggggaggggagaacgtggccggacggggcggcaacgggcggcggcgtgggactctggtgatgtgggtgagtggatcggctcatcgccgattttctcggggagagtgggggatttgagtggaggagtggaggggatccgatccctctcggtttgggcgcgatggcgcgagcgggagggctggaatcggcggctatgtgggcggctcgggcggccatggcggttgctggcccgggctggaggttggggaagaagctgacatgtcaggtcccacatgtcggccagagggggagaagggaggggggttatgtgacctttggaggggaggggagcgagctgggccggcctgaatgagggaggagagaggagggaggccggcccgacagggaggaaggactgggccaagcccaaagggaggaggggaggggttttgtttggtttttctttttatttaaattgattaaacaaactttgtaactttaaaaatattacttcctgagctccgaaaattcgcgggaaatttcagagagtattttagggcataaagaatattataaaatattcccggccatgatttttaaaggaaatttttaatttcctctataattcacttgattaaattgctttaacttttaatataatttctagaaaatgcattatttaataatttttaatcccgaacgaaaatcggggtgttacagtgaggaggcagtggagctcagcccgggcgccgccgctgtcaccgctccagtgcctgctgccgccactccctcgtctctgcctctcgcaggccacaacaccatgcccgcgcctccgccacttgccgccgtctccgcccgccgtgctccggccctcaccgcccgccgcgtgagagagagaggagcggcaaggagggaggggacagagagaagggacacgtgagtcccacaatttctttttatgtgtcaatgacaaatgggccccacacatatttttttattctacatgccacctaaacacgacgtcaaccccacgtgtaagggagatccggtgaataccgccacatgggcgccacgtcatcaaaaccacctccaaaaccgtaaggggaattaaattgcaccggttttaagtgtttggggttgaaatatccggttttgtggtctaggatcacggattagatttcgatcacttttgagggtcacaaagtgaacttattccgaatatgaatccatgtacgaattcatcacagtaactgtgtgaccgtgatcagaacctttcaaaactcaaacacaggcattcagcattcggaatgttcatcgcatgaattcttacgcggtggtccaaataatcagctcgatctatttcggacaaagaaagctacagatacgtgcttgcagcttaatttattaatataattccaaataagaactcgcctcaccatcaaagattattattttttagtgaaaaccagtccttgtccacctgcctcgttggagacttggaatagatcaaggatcgatcggtcatcaccgcgcgagttccttttcttgaataataactacagatgatgcatgcatcgaatcagaacttgagaagtcaccaaatgattaggtccctgcttaacaaaataattaagagatgtggacagtataattcatatattccgacgatatatgtttcgatcaaaatctagcacgcgtccgtccagtggcgatgtcactaatataaaaaggcaaataggtgtcgccactatacgtgccgacacaccaaaaaccggcacctataatgccttttccacccatgcacccacccccacgcgctaaatattcaaaaccgacacctttatgttcaaataggtgctggtttttaaataaaaccgcacctaaaacttgtgttagtgaaaggtgccagttctagacccaaaaccagcacctttaatcttctccctcccacactagccgttggtgggccctatacataggtgctggtttttttttatgacaagacaaatgtgccggttctcgacaaaaaatcggcacctttatttcaatagtgctttttaagtctgatggtgggccctacacataggtgccg

SEQ ID NO: 24836 - DNA, 9371 bp, Oryza sativa
ggcacctattaggaccatataagtatcggttttgacctcaaaacatgttctagaaccggcaccgatgacaagtatcatcagtgccgtctctcgatcgtatgaggaggccaccattagaagaatcacgaatgcttaatttgtctaacaatcatcggtgacatgcattgcagggttgtgatgcctccatccttctgaacgctacggactccatggagagcgagaaggatgccgagcccaacgccaccctcgccggcttcgacgtgatcgacggcatcaagtccgagctcgagcgcagctgcccggccaccgtctcctgcgccgatgttctcgcgctcgccgcccgcgacgccgtcgcgatgctcagcgggcccagctggggcgtgctcctcggccgcaaggactccctcaccgccagcatagacatggccaacaaggatctcccgaacccgaaagacagcctggccgaactcatcaggatgttcgagaagaacggcctcgacgaacgcgacctcaccgcgctctccggtgcgcacaccgtcggcatggcacatgactgcaagaactacgacgaccgcatctacagccgcgtcggccagggcggcgacagcatcgacccatccttcgcggcgcaacgccggcaggaatgcgagcagaagcacggcaacgccactgcgccgttcgacgagcggacgccggccaagttcgacaacgcctactacatcgacttgcttgcgaggcgcgggctcctcacatccgaccaggagctctacacccaggggtgcgagaccggcgacctggtgaagacgtacgccatgaacggcgacgtgttcttcgccgacttcgtgagggccatggttaagatggggaacatacgcccaaagcattggtggactccggcggaggtcaggctcaagtgctcggtggccaacacccattattgatgcccatactattaagtacaacacaactattttggaatcatttgtaagtgtgaaattcctttcgatttaattgtacaacaaactgtaagctgtattattcttttgtacttcatctgtttattcatttttttatgatgtatgggagatcactttgccctggaagttcaatcactcgcatacatgcacaatgcccgctctaggtcgcccgctctgatactatgtcggatattatagggaagacatgaatactgtaaatatttgacaaatatacatgagtacatagagatcgaggagataaggaatgattacagatatggaagtaatccacacaaatcaatcatatcctaatataactctaactaccatatactctaacactgaccaccacaacacccgccacctgccgtcgcctactcgccaaaatccatcagctctttcttcattgccatcacttacttcattgcaactgattttatttttatttgctcacgatttaaaaggtatgataggatttggaatctatggttcatagaggtagaaggaggggatcgttctggcttgtggttaggtcgggacctagggccgggaggacataaacttaaccaagggcaaaacagtcttatcaagttgctttgtatttccattaaattaattatttttgtcctattaattgcatcagtttggacggcagtggcaaacagaagcacagaaaatcaacttcagttttaaatttgcagtttgtgtttttataatggctatttcgaattaggggttgaaagtagtggcatatttgcaattctccctaaaatataatatctggtcagccaaggagagaaagctatgcaaaatgtctatattgccctcctcttctaaagcctctataagtgatgaatatgttggtgcatctgtaggtgaggtacagcaggcttgaaaccatctataggtgcacctagacacatctgtcccattcatgtaaaaaatacaaagtatatggggcccactgtacaaaatacactggatgcaatctctcctcctccggagaaaattttggtgccatactgaatataaactccaggcactgcaactcggccacgctgaatgacgcttggacaaccgacctaccggacacatgcaagaagacgtttgttgcctcggctccaggtgcagcgcgatgacgaaacccgcggctcagctcgggtccacgcgctgacgcagtcgcgcgcgactcccatcttgatctcctcgctcaccgccgcccctctcgttcaattctgtgccgactgccatcttcggttgttgacggctgagtgatgcagtgccaacggcgtccacgccagcatggcgaagcgccagaaatgtcgcaagtgttgccgccgaccccacatgcatgatcgtcaccttcattgcccaagttttgtcaatttcatgtgtttctctctccattaaacacagaagtaataaaataatcgttgcggcgtctttcaacaaataaccaagctttttgggtgtcctatagctaattcacgttttagcggtgtctaccagcaaaggccacaaactttggatgtcatatagcaaattttgccattccgttgtatggtggctggaaaaaacttgtcaatagacaaacatttatcagcaatgttagtacaaaatacttcaattttctgcatgttctatcaaagttatgcaaattctggcaccatactcccctcgaccacaggggtgataacggcacatgcgacagctgtgcaggcgctgtcctgttgcctattgccctggtcacacactaggtttttatgcgttgcctcatatctaatacaaggcttacttggttggtgacaactacatcatgccgtatcccatcacggtcaatgtgctgcctctacctcgagcaacccttggggcccgagcttgtgggaaggtggcagccgcatatcaagctcagggcccaacctactctcgtaggaatgatgccgagctcaagatacctggccatatggatgacccagagttcaccggccccctgctaggtcgcgggcatatgatattgttctgtttctcctcaggtgcatcttagtcattttgcttagggcggattgctagttgtgtggtccaccaaatctgatggcgtgtccctaggcaccctgagcatccggtggtaggggtcttggtacccatttcactgatagtagtccctggcctcgaccccgggcaccggcacggagcaaatgggaccaaggtcaagatcctccttgttgatatgttaataacttcattgttaactgggtcgttccctcgctcacttgcaacctaggttgggtgctccacatgctcgggagcaggaggaagccccaaagccactaccagaaacaatattacctctgacggctaaaacccgtcaggaataaatgaaaaactgtcaggaaaataggtcctgacgtgtcaacgtcagaaaaataccgtcagaactagcttgtcggggaaaaaataatttgcctgacgtttgtccgtcaggaaaactattcctgacgtgagcgcacgtcaggattaattttcctgacgtgaattgcacagtcagtgatattcccccatcatagataggtttgatagtcaaagagatttttgtgacgggtagaaccgtcaggaaaattattcatccattttttttagtaatatacaatatacagggatgatccatatgtacacaatatctaatagtaaatatggtcattctgatattcatcacacagcacgtaaactgctcaaattcaatattgcattccaaaaatagaaaggtcaaatccatcatcatcatacatagttctagttcactatttcaacataacacacaagcatgaacttctgaagtttgcctggcctaagacacctaatagtaactttcagagtctcaccctccatctatatggttagaaccatatatacaaaatatccaaaagcattagcatatgccgcaactccacattggtatgtccaaaaaccttagtccatctcgcatgacatgtactgcaacagcatcaaggagaggcattcaaacaaccagtacaattgttgctggtgttgttactgccaccattgctggaagcaatatcacatccatcatttttgtggcagccattgcagtcaacttgctgtgagcttacatggggaagaatcagttccttgcaacgattcgaaaagtttatgattaattcatccaattctaattagtaacaaaaaagcatgcccatgcagcaactaaaataacaataatgcatagttatccaatccctgcagcaggtcttgagcttttattttctcaagtaacttatccggtaactcacatgattcttggatacatttggtcacacggctatggtcatcatcctaggtcaatgaacgttactaagtatatatatacatatatatgaggaaataagattaaagtacacaaggtagagagaacatacaaagcattttagggcccttttcctactggttgctgaactactacaagtgcaaggtcatttttcaaaccaggtttcatgacatagatgtagaacaaaattcgccttaccttccaaatcagctatctaaatatataattcaagaatgcaaaagcttaacttaggaaataagcaagcaagtacaaggtatgaaaattgttataccacatcgcgatatatattttctgttcttattagttggagcaacagtccaatcacttttggagcctctaatgcactgcattgagaaaataaaaaaaacgtatgtgaatgaaacagtgttattattataaaatgaaaataaagtgtttactaaagtgtttctggtagtgagcgtgcgatcccaggctaatgactgtggtccctagacatcggcagtgcctagagtgtaatagtctagaccgagcatcacatcctgtcgccgactcgccatagtctaagctggcctgaccttggggttcgcttgaggccccgggacttcggcaatggttggggcgcagtacacgttctggatacttgtcctctgtatacaagtctaagttgcctcaaggtcatacaacaaaattacacagcagttaaaatgtaacttttaagttatgtattaatacttttactttaaattaggaaatatatataatgtagtccaataatctacaatataagtactttatatatacttggagctctctagtactgttagaaatgtgtttaaaaaatatgacttatttggttaggagtctcgggtgatttgtttttaatgaagctacttattgttttaatctagttaattacttttatttgtctcatattgttcgtatattctaatgtgaagatatatattatgcatggttaaaaatctgtgtaattttctcttgaaattgtgtgaatgagcaataactagtcccgaggttgaatatgaatccatcaacgaacttctcacagcaactgtgtgattgatcagaacctttccaaacataaaaacatgcatcggattcatagcatcaattcttacgcggttgtccaaatagttaatcagctcgattgtctatttgcgacaagaaaagctacagagacgtcagcagcttcattaattaataccagttactaataaactataatcaattaatcagaaaatcagtccttgtccatcttccccattggagacttggaatggatcaaggatccatgggtcatcaagttatttttcttgaatattaccccctccatccaataatacgaggcgcgcacgtatattaagattcaacctttgaaatgtttgaccaacatacactttgtataatatgaaataaatttactccatccatcccaaaatgtaagtatttttagctatgaatttggacaactgtgtgcagggtcggtcctgggtttttaggccccagggcgaaaacttatatggaggcccccatatatatacataaactaatatatatatttatagtcttataaacacaccacttaatattcgatgtgataaaattatctatatatatttagagtcttcagctgtggctgtgcctgtgcgagaggcaagagctctcaacctagcaggtagcgttgcgtctgcactctgcagcagtagctatgctgtgcagcgatcagcggcatcggccagcggcgtgatgccgtgatccagcctccaggcgagtaggcgacgcaggcagcaggtcggcaggtggcgtgatcgagggccgaggcgatgggaatcgggaacgggagttagatagatcgcttcgacttcgacgcttcgattttccttcgctcggtcgctcctcttcgtgttccgtcttcacacgatacaggcctgcgaagtagcatacatgggggtgccgtgggccatgggccatgggccatgggggcccctggattttgggggcctcgagcgcgcgcacgggctgacaccccctaggggcggccctgactgtgtccagattcatagccaaaagttgttaattatattttaggatggatgtagtatttgttaaaattatatcattagattgagatttaaatttattttcatatggttatcattttgttgctacaaaccttataatgtatgagaaattataagctaaaaattagttttggagaccataccaactttaaccattcattatattatggggtagagggagtaacagatgcatgcatgcaggcatcgaatcaataattgagaagtcaccaattgattaggttcgtgctaaatagaataatgaagacatgtgaacagtagtttatacatatgttaatccgaccatgcaataatgatcaaagtctagcccgtccagcagcgatgaatatatcctttgatcaattcatttgctgcaaccctgcaagtgtacgatgtgaccactacccgtagagagacacgttttgttttggttcgtttccttacttttcttttctctatactttcccatttttttctcttgttggtgacctcgtcacgagttgccgcacgagctttgctgggtcttgcgcttgcagagaccagggaccccgtcgtgcgcacgttcgccacgcgttaactggccatctatataacgcatgcttcctactcatcatcatccaccacaacatctgcaatcagcagcagccagcagcagcagagctcaccatcacttcggagtttgtcagtaccaaggcgaagctaatcattaagctaggggcctagggctcgatcgatctctcgtttcggagctttgtcgatcgtgatcgatctctcgaggccggagggagaccatcagccatggcgtttaggtgtaagggcggcgtcgcttgggttgctctgctcgtcgctgtcgcggctctcgcctccgccgctcagggatttccaaatcccttcggtcacgaggagttcacggagagttactacgacgagacgtgccccaacgcgcagagcatcgtgcgctcggtcatggagcgccacgccgccgccaacccccgcacggcgccggccatcctccgcctcttcttccacgactgcttcgtcaacgtaagtacaccacaatctctcgatcgtacgaggaggccaccattagagcatcacgaaatgcatttgtctaacaatcatcggtgacatttgcagggttgtgatgcctccatccttctgaacgctacggactccatggagagcgagaaggacgccaagcccaacgcctccgtcgtcgggtacgacgtgatcgaagacatcaagtcggaactcgagcgcagctgcccggccaccgtctcctgcgctgatgttctcgcgctcgccgcccgcgacgccgtcgccatgctcggcgggcccagctggggcgtgctcctcggccgcaaggactccctcgccgcccgcatggacatggccaacaaggatctcccgagaccgacagacagcctagccgagctcatcaggatgttcaaggagaacaacctcgacgagcgcgacctcaccgcgctctccggcgcgcacaccgtcggcaggacgcacagctgcgagcactacgaggaacgcatctacagcctcgttggccagggcggcgacagcatcgacccctcattcgcggcgcaacgcaggcaggagtgcgagcagaagcacggcaacgccacggcgccgttcgatgagcggacgccagccaagttcgacaacgcctactacgtcgacttgcttgcgaggcgcgggctcctcacatccgaccaggagctctacacccaggggtgcgagaccggcgacctggtgaagacgtacgccatgaacggcgatgtgttcttcgccgacttcgcgagggccatggttaagatggggaacatacggccgaagcattggtggactccgacggaggtcaggctcaagtgctcggtggccaacacccattattgatgctcctcttgttaattatactgtcgagtacaacacaaatatgttggatactcatttgtaagtgtgaaattcctttcgatttgattgtgcaataaactgtaagctgtattattcttttatacttcatttgtttattcatttctataatgtatgggagattaccactactacaaatcacctaatagattatggctcgtacgtaccggtcttactgtctcccaccttgcatgaggaaaaatctacataaaaaccggcacctatgaggagtttgaaatcaacactgatgaggctttctgcagtaatgtactttgccccaaaagtcctgtcactctcactctaatgcatgcatcttgcagcatcacccataacatgcaaacatacctccctcttaatataatttttaaatacttatttcttgcaaattacttttttattcaatgatccgattacaccattaaatttgttgtgatcaaatctttataaaggaaacacacatagcacatggttatattccgatgaaaaaatatttagctttttaaaattttatttgttttaaacattgcgtgtggttttatttaaatgtttcagctagtattttatgctatttcactactagttaatttgtaaatgttacatggtgttatttgaatgttttagtgagtattttataatgtttcaatatttacaacttaatgtttcggacataatataaaaatgtttcaacatcatcaagtttctgcaaatacatgttaacttttaattatatgattttttttctatgtttcactcgttagtaatcaatgtttcttatagttgttatcagtgttgcagttagtattgttgaatattatatgtttctaaaatatatttaatattatattgcaagaattatacactggagtgaaggataaatgcggcggcatgcaaaaccgatgaatcacgtgagagcacacactacactggccaaggtcacctgtcacggacccaaaccatcatctttgacggcttcacgcatggtcagtgatcagtggtcactggtgagtc

SEQ ID NO: 24837 - DNA, 5667 bp, Oryza sativa
  unsure (1)..(5667): unsure at all n locations
gatacatcacagatatattccagtcacccccaatataacatcacagatccatctcaaaaatcacagatccccaacaacacagagatgcagttcaaatgccacaattttgcacagcaaattcacaccccttgaaagccacaatttcggtcgttgctcatagaaccgcatatatacttaccaaatggattaaagccataatgtcctcgacctccacaacctgtcaataaggaaaaaaaaaggagaaaacagatgaatagtacaacgtaaaatcgtagttgatcaaatttgatgacaatttagtaaactaccataaatattgcatatatgaaagtaaattatattgcactccataaaaacatatttttttacatcacaagaaattataaaaacatcttttttacatcacaataaattatctagccaagttcatgagtctatttgacatgaaaacatccttttttgttcattatttctgcaagaatgaaggcgcacacttcgcctctgatagcggggggttgatgggtgagatcttgaagccagctctgcctttctgtttaataaataagtggttaattagcacgttttgaatagcaatgttggtattgaaatgagcttattcgctattagcaacaacctcagggtcgaaatctttcacctctcttagaagtgttgacatgttgtggtacacgtggaaaaccacattggtctccgatctgttgtgcacatgcaaacttggtgtcatgataaagttcgtccttgccctccttgtgcctaccacccttttccacatatgggccccaagccatatttaaggccttggtgatttcactgaaatcataatctttggacttattggagttaaggtaggtaaccctactccacttaggtacgatgactaggagaatccaatgtcgcctgcgcagtggttatgtagcattattactaagaaccttaacttcaaaaacagtatacacgaagagtattgtcctcttactcttggttgtgtgcgcacatgatgtactccttgtcttgatgggcccataaacaccggttgacatagtgaatcacctcagtgaagctctgtcgtaaattaacctcgttcaccatggatggatcaaggaacccaacctgattaccaaggtgacgactctcgatccaacacaaccttaaaacatttatgtattagaactaatttaattaggagatatagtccaatcatatcacaagtatagaaggtatgcacatacaaggagtagcattttagaagaccagtgtccaacttccggatcctgaaaaggtcgaagaggtcatcaaagcctatagttatataggcaagcgacgataggaatggctggtggtcgtgatgtccaactatggatgactccctcattttccgcttggcattgcttagctccatgtattgcttatgtagctctcggcaagcaatacccatcacggctaacacattgtcctccaccaatggcatgcctagctcaaattgggctggcgccctcacgaccttccccgctttgctcactggcatcgacgtcgcagccttgcccctttttggctccggtgccaactccccgaccttccccttgccacgttcacgcttctggcccttgacaagtggtggggagctatcggcctttcttgtggtctttattggagccaagctttgagctatatctgcaaagtccatatcagctccaccaggagattgaggtactgacaatgccagtctatggggagcctcaattgatagcttagacttgggaggtgtaagctctgtcggtcgacttggacgaggagtcatcttcacaactatgtcttctttgggccattgtatgaacgtcttgcacgcatcgcccaaagtcatgatttcatcattggggggcacgggcagcggatagcctgaccaggtgtcctttactgtatcgatggacaccttggtatacccagctagcaggtctgcgccgtggaccttgtctgtaaccgagggcttgaaatccatgccctcagcgacttcaggagcgaaagttgggtggactctcgctagtaggacacactatgctgcgccttgcatatgtgaaagtttgaatttaatattggaacgtgtaaaggttttttattagatatggatcggataacatcaattacctcgatgtggtccactgcagctagtggtgcgaccgggagaccaggggccggcacctctgtggatgaacaactactcctatgctgtgacggactcgcgtcgtgttgtgcacgaggagttggatgcacagcaggtgttgttcctcggggtatattcatgtcggcgaggaccttgttaaccctttcttccacccttgcattcatgctagcttctagttcttgaatgacctcaaccttaagttcggccttcaaacgagcgtccctctcttcctcggagactttccgtttcctgtattgggagctgtactgcgggagtccatgcttccagggcacatcgctaccaattccccgagtccggccaggatgttctttggttccgagcgcctttgtgaggatgtcatcttcgcgcctcttcggcgcggactcaacctcgctttgtgaagcttgttcagcaaccaagcccaactagaaaaaaaagagtcgtttatacgaacttatactttatacgaacggaaattagataggttaagtagtgcactcaccagttcctgatagacgacggcatcacttttgttctcaaatgtgacagagccgtccgggttgaccttaccccttgcccgcgcgcagttgcgagctctttgttcagggatgtctgaaaacggggcagggacattcgctactgcagcggctgcatcttcttgggcccatattgcctccttgccgatgtaccctgcggtgcccagccgatgcgggtgctcattccgctattgcagtaggcgatgtgcctcgcttgattccctaaagtcttgggtgttcttgagagagcagaattcctcccacaccgctttggttatttgagggtactcatcgaacgacgtatgattgccggacgggttgacaaactcggtgaagagcttcgacttccaattcttccaagctttgcccatcttatggaatgccttccgcttgagcctatcttttgcttcagccggaaatgtgaaccatttctccattgttgtccaagcttgctctttctcggcttctgtgaccttcccggtatctttatggaggatcccgaagttctcacgtgccgctagcccgtagcagttagaccatcttccaatgacagtcctgggcgccatgggcctaccactagcgtcaacctgtcttataacttgcactgtggtcggccatatattttgtgaccggggatttctactagacctacttgcacttgtcccacccgacatcgacgtatgttgttcctgcggcaattctgcagcacaaacagaaggcaacatatgctaaggggtgctagccaaaatttatgtggtcatgtggtgaaaatttatcctataaattaccatgaatttcgggttgttcgaccgctgttgtcgagggatgaccttcggcaactgtctccgtggctgggtttgcttcttcctggatcctcgcaggtgttggggagggcgggtttgcgccgggcgttgtcatggtctaatttttgcgaaaaagcttatgaatttcctaccattatactaaatagcattagatcgaatgtaatacggggtatactataaaacatatggcctcagttttgctcagaaattatgcatcaattaccatcatttgcatgaagggaaaaaaagaggaaatcagctactaggagggaaaggcaaccataggcagcagcatgggaaaacatagacatcaaggcatcaaaaaatgaataaggggcataggggcagcgggggtagcagcagcaacaacaattcatcaaaaaagaacatgtgtacataaaaaaaagaacaagtgtagataatctgttcttatgcattaaaaaaagatcaagtttagataatctatgcacaaaaaaatgaataaggggcacaggggcagcaggggtagcagcagcaacaacaattcatcaaaaaagaacaagtgtacataaaaaaaagaacaagtgtagataatctgttcttatgcattaaaaaaagatcaagtttagaggtatttctgttcttgagcattcatcactggctatttaacataaggcaaccataggcagcagcatgggcaaacatagtcaacaaggcatcaaaaaaaattatcatacacatggcaattcattttataaaaatcatcaaaattcatcaaaatcaggcaatcaggggcaattcttatgcataaaaaaagaacaagtgtagataatctgttcttatgcattaaaaaaagatcaagtttagaggtatttctgttcttgagcattcatcactggccatttaacatagggcaaccataggcagcagcatgggcaaacatagatagcaaggggcaagtgtagataataaaacagcccacaataatttatgtggcagcagcagcaggggtatataaatcatgtatgtaaacaacaattcatgcaattcaactattcatagacaacaagggtatataaattaacaagtgtagataatctgttcttatccataaagaaaagaacatccactgcagcaaaattcatgctaagatcctctattgatgctaagattcactgcaccaaaatcatgtatataaaatctagcccctacattcatccaaaacatccgcagacaactaatcacatttaattcatctatacagcagcaccaacaatcgaaacaacaaatcacatttcattcatctaaacaatgccattcatccatcgaaaaaaggaggaatgggggagggtggcggcgtacttggagaagcggcgtacttggagacggcggcgcaggccgtagtcgtcctgaatcccagtggcggcggcggagaggcancancgaagaggtcgaggcggtcggcggtgctggccggtttcgtcaattcaggcgtcggggaggtcggggaagtagatggcggcggagagggcggcggtgcaaaggtcgaggcggcagtggtggtggagatggtgatggagagggcggcggtggtcagggatcccagcgtcgtggatcccggtgtcggggaggtcagggtcggggaggtcggggaagtcgatggacggacggcgagagtacgagcggcggtgagggtggcggtggagaggttgaggcggcggtggagagggcggcggagagggcggagatggcggtagaaaggtcggcggagatggcggcggagagggcggcggagaggtcgaggcggcgacggtggagatggcggtggagaggacggcggcggtcgagagagtgagtgaggaggcggcagtggagagggaggcggcgagggcggcggagtggacggagatggcgacagagagggcggccgagatggcggaggagagggtggcggcgatggtggatatggcggcggagaggacagcggcggtcgagagagtgagtgaggcggcggcggtcgagagagtgattgagtgagagtgagagcggtgccggatctggatctctctagaagatgtccaaccctaggtcacccctagtcagactcacctgtgacgggcgccaactatgg

SEQ ID NO: 24838 - DNA, 1218 bp, Oryza sativa
cactagcagcctcgatgcgtaacccactgttctgcactgtgcatttgctgtcttgctttaccgtgtgaaaggtatatccatttatgtcatatccttgccaggtggtggcactccatttaggaccctgtgacaacgactgaagtgtttcactagacatgttctgcaacctggcaattcggttcttcagccactcgttgaaagaagacatgtgcttatttctgacccaactctctgatcggcctaggttctcttgtcggataactgcaaggtgttcgtcaacgtacggcaccacctcagtcatctgctgtagtaccttgaaatgagctttatcgtacaccttccgatccaacctaatagtctttcttccaacagtaccaacaccaccaagcctcccttcgtgatgagatcgtggtaatccaattgaagatgtttctgacatgtagtccacacaaaaattgatgacctctttggtggtgtaactctcgatgatactcccctcggggtttgaacggttccgtacataacccttaaggatccccaggtacctttcgcaaggatacatctgcgtcatgaatgctggaccacagcactttgtttgcctcacaagatgcaccggaagatgttccattatgtcaaagaaagttggaggaaagtacatctcaagatgacatagggttctcacaagttctgcctgtagttcatctagtccctcgggatcaatgatcttctggccgattgcatggaagaaggaacacaaccgctggattgtgtgtcgcaccttaggaggcaaaatattccttattgcaacgggcaacagctgtgtgataagaacgtgacaatcatgcgacttcattcctaccaacttaagatcttgcagtgaaacgagcctactgattcttgatgagtaaccagatggaacatttataccactcaaacatgttagcaaatcaatcttctcttctttcgagagagtgtagcaggctggaggaaggtaaaccctgccggatttcgtggttatgggatgtagctccgagcgaacacccatttcttccagatctcgtcgggcgttgagaccatcctttgtagtacctgggttaagcagtaatcccattaaactctcgcatacattcttctcaacatgtatcaaatctatgcagtggcgaacttcaagatccttccagtatggtagtctccaaaatattgacttctttttccaca

SEQ ID NO: 24839 - DNA, 1225 bp, Oryza sativa
tcaacacgaccgaaagcatctttcaatttcaacttattcaaattacatgttgagcaatccaaaacatcaagaggttgttttaactttttagcagaattcatgttaaacatcaaactagcatgaaaagcaatttgatatttttgcaacaactttttagttaaaaaaaactcatccaaagtgcgtgtgtgcaaagcaaaactaaaagcaagagaagatctatttttcaaatcatgtgtagcattaacatctctaatttttgaaatctcattcattaaaacctcacaatttgagcaatcatcatcattaggaataagagattttaatctagcaatttcagatttaagagattcaatgataaattcctgttttctatacatcttctcacacttcttatttttttcactcaaaatattaatggcttcctcaaaagcacttacctcattatcttcatactctgtgtcagattcaccacgcgccatgaagcaaacatcggagatgttctttcccttatcatcatctccactttcaccatctacatcacttagtggctcgaaggcggcgcaaacttgttgaaaaggcttcctgagattgtccagcttcctcccttgggatgaacccttcagcttgttgttgttgttggtcttctcaccatctttgtcttctcttttgcctctcccaagcttaggacaatgcgaacgaagacgatcaattgaaccacattcaaagcaacgatttggaccacctcttttcctgttcctggcattattcatagctcgagcaattctgttagcaaccaaagccaaatcctcctcctcgatttgttcgagttgatcatcggatgtggcattaaaaacagcaagaaaagaagacttagatgaagaagcatcaacatccaaagaagaagaggaagaaaccaaagcactcgacttaaaatcaacttttcgagaaagaacattcatctcatgtgttttcaatttagtgtaaagcgaatccaaactcaaagtagacatgttaacagactcctgaatagatgtagctttcatctcccaaatagacatgtcaagaccattcaaaaagtgatgagaaatctcagattgtggataattagcattataagaagaatcaacagatctaagatcactcaaaattttattaaacctagaaagatagtcatccaaagcttctccaggtttcatctcaaatttaatgtactcctttttgaaaa

SEQ ID NO: 24840 - DNA, 1785 bp, Oryza sativa
tggagcaggggtctacgtaatacgacatcaaaacaaacaaaagacaaggattatactagttcaggccccttatcaggtaatagccctagtccagtttatatgggattgatgatgatgagaacaggttacaaagagagtaactgaaacaggcgataccggcaagatcatagttgagggatttgacgagatctcccggcgagttggctccgtggactccggcttcgtaaactttggtgggtgtgttggcgatgagatgcgatgccttttgcccctccctaggggtcccttttataccgtggaataccttcacccccaagcaagacttggagatatgtaaaccgacacgatatactaaagactttaccatttccgagtaggactttagcaattccttaactcgtagggatattttccataatttgaggcgaattcctaacagcatatcgagaaccaaccgtatacgcgaaggtataccttatcggtatattccataagtcgcaggatagagggtatgccttatccgtaaccctgacaggggcagcggcggcggcgccagctctcagcgtcaacgacgcagggaaaggggcggcggggagtggatccggcacctcctcctgcttccctctggcgacgacggcatagaggagggatggcggcttgcgcatgcggcagcggtgctcgagagaggcaaatccagcatcgacggaccttgggaggtggatccgccgccgccaggcctcgggagcggcgcggggatgcgggcggcgggggcggtggctctcagcgtcaactctcggctcagcggcacgggggagagggcgggagcggatccggcacctcctcccccctccccaccggcagcggcagcaaagaggagggatggcggcattaaggtggctagcgcaggcggcggtgtatatttgtgatgatgatgtattgttaatctgttctgctgatgatgccaatgttgatatttgtgatgctttgtatttggattgatgcttgaatgatgttcatatccattttcaattttttttggtaacttcctggatgagatggtagaaagggattttggggatttattttttttcctggaaaatcatttttagtggcggtaggcataatcttgccgcctgcagaagtctattttcgctggcggtccacttaattttgccaccaatagcggacgtcttagcgtggccaccagcgaaaatcgatttttactagcggtcggctacccatcagcacaaatgatgcattattttcattggcctttgatagctggcggtacagttggccgccagcgaaaacctattttggctgctagcaaaaattgtttttttaagtaatgggtggccctgacgatgaaaatggtggccccatggttagcaagctggttttggctggccaaagccaagatggcctggcatctggtttgtaagtctgttggagcctccccccggattgtcaaattttgacttgaagattgagatagtaattccattgcagatgctctaaataaatgttttgttgtctaagaccaaactcagtccagccactgagccagtgtaccaattgcaagagctcgtgaaagtttggaagaagtcaaaccttttttaactacggttttaggaggaacacagatcaacttttagaggctaggcatgttgacttgtttttagaagatgaacttgttgatttttggaaagcgcaatatttattctgttcctgttgatcacacgatgcaaagtttgttaacattgttttgtaaatcggtgcgatttg

SEQ ID NO: 24841 - DNA, 995 bp, Oryza sativa
tgaatagaattataagtctgcaaattagcctaatcccatcaggacggaatcaaaaaaatatatatttcctttaattttcacactttctcttaaatggttgtacctgtgcagttgcttttagcccaaatgctttgacaacaacagtgatattcggatttccagcccacttgatggaaggttccattataagttcttgctcatctgtggtgtaaaccttcatccctatatggaaagttacggaaatgcgatatcatctcatcatatacaaaaacacatcagtcagacacaataacatcatctaggtgcttaagagaaatatttagaattaggtagaattaggtaatgcagagcagagttatgtactctgaaattattgtgtatttcaggtaatgcggaactatcatagtggaaacatgctggtacagatagtaaaccttgaattcatatgtagcaccatatgttcatgcgcttgacttagcgagtagtaatgagataagttcatatagatactacaacacaatggcatatattcatacagagcttagtacttatcgtaaattttgtttcacaatggtaaatgaactgtcagatggcttgttggtttgcatctgatccgagggaggagagcaggaggtcatgattacccggctagcaccgtttgtttagattgctcacatgggaagcgttgggacatttcgcgttggggtctggcacatgagttcatggtcgacaactctgggataaattgggcctggtcatttggggctagcagaattccagatgaatacagtacactgaagcaacggttggtagaacagtgaaaccatttcaggcttcgtatatggctggttatactatttaccatttccaggtgattaggtcggtataaatcaaaacaagcgtcaattggtcaggaatctctgtgtcatttgcactcctatcatcacacgaccaatgtacaacttaagagtctacctggcagatttacaaaatca

SEQ ID NO: 24842 - DNA, 1113 bp, Oryza sativa
taataaatttatgcattctaccagatagtatgtacaagctgtccacttttattccatatgttctaacagaagttcaatttcaacggtgcaaattagtaaattccaaaaatacaatatggccgtcatttggccgtgcaagcataaaacagatattcaggttgtcctggaaccactccaagaataggttgtcctggaaccactggaggaaggaattactgtgatttttgtacttaggtgttttctgttggtcaagtcaattcctctgacccattgcaaaggacgaacaatattcaatctgaaacaggaagaaaagtagagcaccctgaccagctctttttttagaccaaaagcggaacccctgcttccatacaaagcaaataaaaaacaagagtactagagagaccttttgaggtcgctacaaaagggaaacaaagccgccacctccatttacagagaccttgaaattcaaaataaagtccttgaaattcaggagtactagcaacgaacatctgatttgctttggtacaaaataaagcccttgaaattcacctcatgcataacgaaaattcgtagattgcaaattcgtcttctcataaatcacatccaatcagatgattattcttcacatccacagtagagatgcagggctaattcgaaggatcccattagaacacaatcctactgttatacgatgaaagcaagctaactccagctaccctatacagcaagcccaaaccaaaggaaagaactaaacgatgagttttcaggaatgcatatcactgtatcatctcgtacagagaagcctcgaaaaccatcccgtttctcgcttccagctccactaattcaccccgatgccaaaccacaacgaggcatccaacgaaaagaagggtggcgaatcgtaccttgacgtcggtgggctggaagtagatgaagaggtagtacccaatcacaagccccatggtaactcccaccccaaacccgaagaaacccagcacagtgcggaaaaaccccatctcctccccaccaccgctcccccaacgcgagccgccgagaagagcaagaatccgaaagcgagcgcctcagatcacatgaagaggagacgtgaagcaagca

SEQ ID NO: 24843 - DNA, 2051 bp, Oryza sativa
tcaacaccgggcagaccggcggcatccactcggtcagacctgcagatcaatctcggtcagaccgacttccgtcgatttcgagggtaacttttatttccgctaaagttttcggtttttgggtataccaaccatttatccccctctagttggcttaattcttgtgattcgatcctacaataatcggcttttttttttgcttgagcgaaggtaaaggtgctggttctatttttcacatatataggtgccagctgcttgtaatggtgtagaccaatagataccggtgcacctgcgatggtttctgatagctagcgctgccttgacccgttgatctgaagcctgccccagtgttggtaattacgtatttttatatgttttatttgtaataacaataaaaagagcaaaattctgatcttacatgattcgggctgctctcagacttggcttgatttgtttgcttgggcctggcctgacattgaacaggcctagctaccactcccccgtccgcacggttttgctaaatgatagtgaaagcgacttgtaggtttgtcacgacctgatttttgttttaggatttataaattattattagaatttatattaaatattcattaatttacaagtgaagttaaatgtgagaaataaaattttctaaatataaatcatggatggatttaatttttattaaattctccacggttaattatactctctggaattttctcggatttttctgagctctattcctaattttaatcatacaaacaacattttagtaattatctacatattaaattaatcattaaatggtctgattataatcttgttaagtaccttgggtgtccaagtattttcaggatttttcttgaaattatttgagcattagaagtatttttaacaattcaaagatcatttcagtgattaatttaattggaaaagtaattaaaattcctcttttccttttcgggccgaaacaggaaaagtcctctctctttcttggcccaatctcctctcagcctgtagcccctccccctctttctgtcgaagtctgctttgtgtccctctttcaatcgggccaagaagtagaagcccagccggaagtctagttttcctccctgtcgctacagtggcatcttcaacctccagccggctggagacagagcccgatgccgccattgccgtcgattttctcctccacatccggccttatctctcgtgcattcctaaaattagttgaggggatttgtttcccttaaccttctctatcttttcccccaaaaatcccggtttatccctttgaattcgacgcgaatttggattcgttttcgagttgactgttgtgagacattaaccgtaccaaccacaagccagcgtgggcaatggctttaccttttgtatagcatgattcattgcggggtgccagactgagaagcggcgagaagtcggtgaggatcgctggggagtccatgcctctggttatatttatagagtgggtgattatgatctaggaatggtgcactgtggtgagttgtgttgtgcagagggtattgtcacagcctctattcgggtacttttcagtatcgcgacgcatggtagacatgatgttgaggctgtgtcttgtgggtacagtggtacacctctggccagagtaaaactattcgaatagccgtacccacggtcatgggcgggttgagcaatgtttttcgtgattagtcttatacctctcacaataattattgatgctataattggtaataatttgcttagctcctggtttggagttagatctgtgcagtcgggtttggttgttcagaatggttaggcctgagcagcatgggtgtgctgttcagtgttgattaaaattgatgattactctactgttttactattcttaaatatttgctaaatgctgcttttgcaaatgagcctatattatgccatcctttggtatccttgtacacttgcatatttgctgtgtggcttgttgagtatgtcatatgctcatttttgcaataatcaatcaacctcagttgaagaaaaatgatccagaagga

SEQ ID NO: 24844 - DNA, 1994 bp, Oryza sativa
ttattctagagatatttttagtatattttgttaaattttctcttgtagaggtattctttcaccactttaaaatatgcctgatatgtaaagacattttcttgagatattttaaactctgcagagacacttctaaaaaagaataatactgtatactaagagaataaatataagtaacacacgccataaccttacaagtattgacatgaggttaagttggtcaacgcattgaagataataatgagttgcctaaaagatcttgagttcaaggattgacagtagcaagaattaatagtttatgctcttttttcaacattggtttgatatgattatggtgaaatttaatatctttagaaaatgcatctaccctcttatagacataaaaaatgtctctattaaaataccacgagacatagagggatttatcttatagacatgaaaaaatcgcctctattgaaatgccacaagacggatatttttcgtttgtagatattaattcacaataaggcacgcattacatattttttaaatgatatagtgttgtaaatgtattttaaaattgttttctatggcattagaaaatgcctctacgaagcatttttcttggaggcgacgtgtccgtcgagagcaagacacccataaacacttcatcaatctcaatatataccagtctagtctctcggagatgttcataggggtagagtgtttgtgtgtgtgagttcagaaggatgagtgtgcgcctgtactgtgttaaaaaaaaagtgttccactcataaattgcatgcaagatcgatgcgcatgcatgttccctacaaatgaaatacgagtactatctgttatccaaaacaagtccatggtgcacacttcaattaaaatctaggatacaaggagtagatcaacctttatggccttgtcctttacctagaaagaataagccgttgttaaaactttgatcagaactcctatgggcttttgttatctaactaaaaaagctcgtgcgttgcaacggataaaaacgttttgtcagtgatacaatagctattagaaactgagcaataaattaaaacattaggatggctatacattataattgaaaaagctaataaaaattctttcttggttttgggatgaaagtccattctttccttcctagccccagcctattccgttacttccctccgcatgacctacctctcttcggtccagcccacaagtggagccataggcccaactcacacagccgactgccatctccgacctttagatagtctcttgcatatatgccggagccgttcatccccatcaaatccagccaatttcttcttaatctatcaaaattggttgagggctttttatccattcgatcttctctttccgtttttctcaaaattggaacaaatccacaaaattcaatagggggataaaacacacggggagatgatgtggcgacaatgctaggttttggtccggcggcggcgtgcaatagatcagatgagatcgaagaataccaaaccgaagcgtgatggaaaaaaacagttggaaaaaaagacggacacggacaaaaaatatttcagaagctttacctattttttaataaggtatagatatagatataaagttgcataattagctaggtgaccatccattattaaatcatacctcatgaaatttcacttggcgcagggatattattggctctaaattagtggcatggaatcatctattcccacgcatcgctaatatagttttgtcacatgagcaagatgagtttaaatggaatctaacaccagctggaagattcttggttaaatctcattatcttgctttggctcatacgggagctcccaatattaacaaaactatttggaagttaaaaatgcctcttaaagtaaagatctttttgtggtatctacgtcgaggagtggtgttaacaaaagttaacctggctaagcggaaatggaaagagagtaagatctgttgttttgccacaaagaaga

SEQ ID NO: 24845 - DNA, 5898 bp, Oryza sativa
cctgcagccctgctcccttcatcctccttttagctttgcttaattgtgccgctatagatctagtcgctatttgtgctttactcttgtttgtgtgatagatctacttgttgtgcttcattggtggatcagacagtctgatcaacatcagactatctgatattttcggatagtctgactgtggatcagactttcgaccttatatcagttttagcttccgcataaagttttaaattagcctctaggccgaattgaccctttcaggtagatgcatatgcgcacgagtgaatttaacatgttgtgcggcaagcaaataatatggctccgatgtggctgggtgaaataatatcatgatatctataaggacccaaggcttggcactagatggtacctaagtgaggacaaaaggatatatatacacaatatgttttttaaaaaataaatctaagtagaatcatagtcacgtaagatgagttatatacacgagtgtaaaatagtaatgtgcatatatttgatatctattagtactacatgtttgatgtttctgtcacaggacagagtaacccaaggaggtaaatttcctctcttttgctgaagtgtgtgttcttcttattatctatatatatatatagtttcctatataattatctgtttctgttcttcactctgattcttcttatgttatatcagttatcacaatgtatattggcatctcaatcatcaaaaattttatttctgaatcaagttcaacaagccctggctatttctcagtatagtactgattgagatcaatcattggttccatctgaattttgcttcatcatataaagatatctgaattttgtttgtaaaattttactgtacacctgttcctacagctgcatttggtttgttgtcaccaaccttgtagatgcagatgccttgccatcaaaacctaccgaaatgagggagctattaaatgtcaaggagcaggccaagttttctggtgaattcaccagaaatctctatgtgaggcagtgccagatgattccaagtcttcagcttcataaatgttgcaactaaacatcacagccaaaacagaccaggatcagggtacaatcatttgtgctgcatcttcaggaattctaacattagtaatctcaatgccctatctgatcccacagtttgcatttataatctttctcttctagtaataagatcataattttaaaaatgtccagacataaatacttctgtaatctgtactgtactgtactgtacttctgtaatctgtactgcatttcagttgatcagtgactgaaaaattttcaaactctcacctaacacatcatatagatatctactatttgatttagcagttgtgcttactttgttataatgaccagtactacaagtaagtcaatcatcgtagtcatagtacatatcaaacctagaaaggtcatctgaataggacttcctgattgggatttctccattgttcactggagtagaaaggaagaagaaggcctcaggctgggcgaggcgccgacacgtgtcgtctcgtggcaatctgcggtatctcagatctgtatataggcctgtaacaaattgaagcaacagtgaggtcaggtgagctaggcaaaggaagagctgtgagatggattcagctacctctaccggttggtctcaaacagcaggaattggttgtgtactctttcttgtacactgtcagaaaatcttggcaacaatctgcacttgcctgtcgggcatattcatgcaagaaggggaaacaaattattctcacatcataagctaatcatgctataacatgactagcagcagagatctagaacaaatgaacaattgctgtagcatgaaactgaacctgaaactgaatcaggattgttctactagcataaacaaatctgaaaccgaatcataattgctgcaagcataaagtttcagggtttagagaacaggatcacataagcaccagttcagtaacagtttcccagaaagaggcaacaatcagaaactcttttttctaagctataagatcagaacatttcttagctaacgactaattttcatcaaagcttcagttgcacactagagccacatgtgtgtgcaaccaccatcccaagtaaaagctgatcagatatggtgaagcatatcacaccatctggttttcagatctcaggccagtatactttgatgataatctgaatgaaatcaactacctatgacatatatcatgaaacataacagtaaaaatattatacagccacaaaaaaaaatgcaagttacattttagcattacaatggctgcacgtccgcaacaatagtacactccttaaccaatacaaccaggtctaaactagtcattcaacaacccaaccggaacaatagttcacttatgaactaggcacttattttgtttttttttatagaaaccaacatataaatagttttttaactgccaactacagcctcagatcaatggaattgaagcctccaacatgccgacatagcaatgttacttcgggtcagaacggagtttgtgcggagtaatttctgggacaactctgtagatgtgcacttttatgttatccttctggacaagctcgaagacacacacatcaaacttctccagattgttgccaacagcaaatttgccccagccaccactgaaagaaccaacagaacgatcactgtagtagacatagttaacttcccaagccttcccttgtggatcccagagtgtgatccttttgttggtatggggaagacactcacggacaaattcacatgggatattctgcaatataagaaaatgagttttggtttagatataagaaaacaagtagggaggttgagtaaacatatacagatagtgagcctttttgtaaaaaaaatgtattgccccgagggtaaggcataattggggaaatcggaagtttatctaagaaagatagttgaaaaatactaaacttggctcatttatgatggtattaaccgaatgcttgaaaattactactacagactgttgcttatttatagatcgctctctgctgtatgcagaaactttgtaataaggctatgtcaagatgggatgttcaaattagaacatccaaaactctcaaactatagcagcagcgccattgtgcaaattataatcatgcatgaaagaatcctctcatgcacatattttttttaagataaaatgtctcatgcacataaaaaagggaaagtgctggatgaggattaacacacggaagtaacattaccatgaaaaatccaacatagacatatgactccatcattatttgcacggcaaaaggattcttagatttaaactctcttgccctttgaagagcatggtccttctctgcttcagttaccggacgcctctgtgatattactgttagttgtctttgaccctttgaaacacctgaaaagtgcaacacagtcaaattgtctacagaagtaatttattagcactacatttaggggacaataacttacatctaccacgccgagacacctcaccagacagaaagcgcatcaggaatggtggatttggtgacttgctagaagaattatcttcatctgagctgcatgatgaacctataatgtgcaaaagtaattttttgggaaatcatatgaatccttaggattctgaacaagtatgatggaaataaataaataagcaacctctaaccaagagattagaaatatgtctttttgcaattactttgcatggtttggcaccgcgtagcttatggctatgcatggaacaaatcaggaatacaactaaacaagttctataaacgaaatggatgtggcaagtcatttgtgccgttatgcagacctccctggtcccccaacagttcaaaataattgactattaatagtcatcatctaagctgactatgccaaatatgtgtataacactttcagaaatatagaaatgttttacctctggtactgttatggcttgtcgatgttaccttggacttgccagcagaagctcctgcacgttttctcctagaactttcgcaaacattagcctcagatgacttcttaaatacaaccaccctatcttccataaggtaatctacatctctagttctctttcctgtgattccattattttccttcagggcgggagccattttctctgttgtgatagctgcggtgaccatgcccccttcatcactttctgttttaatgatcacatttttggaagggtgagcagagaaagttgatatcttgtcaatgcctgaaggttcaaagactgtcactgagaattgtgaccgtttatcataagtgaatactaaaaattgaccacactgaattgagttatctctgacaaattctttccatccatgcacaaagaagaatccctcagagtctgaagtcagctctgcactccatttatttccacttcgatcaaccagagaaaccatcccagtaggttgattctgaaggcattggttgaatgatgatgggattttctgcattgtaccaaagtataaaatatgttaatttatttttctacactacttgttaacattgtgaactactcatacgatgcaatgtcagttcaaaaacaaatatatcagacaaatacaatatgccacgtcatgtaatttttctataaggcatcaaattgtaaagaccagcaaagcagtcctgacatcatagcctcaaaaatgcaaaattacagaacatacgtgatgtatgactggaaaaactaaatgcttagaccaactaagatcaaaccttatcctgattaattgaattccttcttttcccacaccaaaaaataaaaatgaaaagtaagactcaaaccctctgaaagataatccaacccattagcagaggcccatgttgtgtaagttttaagccgctgagttgaaaaatgaaagacatcataggcaattttattgtaacacagtgctttctactattctttggccacataaatgtgaaaatgaactaagcaagtttggcagctagccagctactttgggaaaaccacgaaaatagtaaatgtagtcgtcatgaacttctaacaataactgattgtgtgaccaatacacctgagtgttagacaaacctggatttggtagtgggagtgattactctatgtttttctaaagaacgctatgagaacacataccaccaccaaacaaggttaatcaagatgttgtttgctgactatgaaaaaccaactgtgcagtgcaaatgaagagctacatatcaaaatcaatactttaatacgctcgtgtgaacaatgaaagtgtataaggttactaacgaatcaaagcaagctagtcacactagggaatatacataaccaccacaaaaactcggacatttatttgaaagtgtttatagttaccctgcaatcatacagccacctttcgactaaaacacatacttccaaataattaatctagcgaacacaatccacatccgtgggattcgcaaaaaggggggacaagcatatagctaccctgcaaccaaacaaccgccttggggaaaacacatactcctaaatcattaatctagcgaacacaatccatatccgtgggattcacacaaaggggggggggggggaagtatttagctacccacagccaccttggggataaaacacattcctaaataattaatctacacggacacaatccacatctgtgcgattcaaaaaaggggaaaaaagtgcagatatctaccttgcaacctaacaaccaccttggagtaaaacacatactcctaaatcattagtctagcgaacacaatccgcatccgtgggatttacaaaaagggaaaaaatacatatagctacggctacccacaaccaccttggggctaaaacacacactcctaaatcattaatctagcgaacgcaat

SEQ ID NO: 24846 - DNA, 940 bp, Oryza sativa
agccgtatggagcccggccgggggacgccgaccactcgatacggaccctcccacattggtgaaagcttgctcaatccagcacgcgtttggacgcggcgtaggacgaggtcgtcgacgcagagtgatcgggcccggacgtggcgctgatggtagcgccgcaggctctgctggtagcgcgcggctcggagggccgcgcgccgccttcgctcttccaagtagtcgaggtcatctctgcgaagctgattttgatcagcctcgcaatacatggtagcccggggagacctcagggtgagctcggatgggagaaccgcttccgcgccgtagacgaggaagaaaggcgtttccccggttgctcggcttggtgtagttcggtttgcccagagcaccgctggcaactcctcgatccatgaatcgccgtgcttcttgagtatgttgaaggtcttggttttaaggcctttgaggatttccgcattggcgcgctccacttggccattgcttctggggtgggcaggtgaggcgaagcagagcttgatgcccatgtcttcgcagtagtcgccgaagagttcactagtgaattgggtgccattatccgtaataatacggttaggcactccaaaccgggccgtgatgcccttaatgaatttaagtgcggagtgcttatcgatcttgacgaccggataagcctcgggccacttagtgaacctgtcgatcgcgacatacagatactcaaacccgcccggggcccgcctaaacggtcccaggatatcgagtccccagacagcaaatggccacgaaagtggtatggtctgcagggcctgggccggctaatggatttgcttggcgtggaattgacacgctctacatcgccggaccaggttgaccgcatcattaagagctgtcggctaatagaaaccctggcgaaaagctttaccaaccaagg

SEQ ID NO: 24847 - DNA, 1644 bp, Oryza sativa
tgtggaggaggaggcgaggaggcggagggggagaagaagaggagagaagaggagaggagggaaagcgatggcgggtgggtgcaagcaagcaaggtcgttggtgagagatttaaaagcgggatttaaatttggagggagtacattacatacaaagctttaaataataataattaaattataaacaaactacactgtactttgtgtatatacggcgtggcgccgaactgtacatcacagcaaagctgctgtacatctccgtcaggtccataccgtggattcgtggagccattgggttcggaatcatctatcataatatcattatcgttacgtgatcttaactttatattatcccgcacgacagtgtttataaaagtagtgtcattatggtagataatgtgaacccgatggactaatggtagtatcttcacctcccgcacgtaaaacgaagggatctattatggtattactaattaagtattagttaaaataaactttaaaaatagattaatatgttttgttaaaacaactttcctatgtaattcttttttaaaagactattgtttagtatgtttggaaaacgtgcgcgtgaaaaacgaaggagtataggttgggagttgtgagtgacaaactcagcctaaaatcttcataaacccgagacaatggctactgttcacacctctcgtattaatatgtaagatgtgtgcagtggtgaaatggtgatgtgttcgctaccatgtgtgatcacgtctgagtcggatgacgcataattcgtgatatattaaaattttgttattatgttaatagatggcggtgtaagtgattggtaattaatgcgagtgattaaaataaaccaagggtacatgacatgagtgttgaaatgtttgctagcttgattgttgcaatggcgtttaatcggtgttgtaggatccaggggggtgaatggttggtatacccaaaaaccgaaaacttttagtggaaataaaagttaccctcgaaatcgacggaagtcggtctgaccgagattgatctgccggtctgaccgaagcgtagccgccggtctgactggtgttgatcttccggttggaccgccctggaatccctgctgcgcctgttgtcgtccccggtctgaccgaaggtcacccgccggtttgaccgccgccttgccgccggtctgaccgccgatgtgtcgccggttagaccgccgaaacccggtgaaacataaattgaagaattctaaaagtagatgacgactttattgattctctctgtatttacgaagtgcacaaacagcactccttacagaaatttcgactaaactcaaaaccctaactcaaaactcaactcaattgctttcaaaagcgataccgggaagcctcatgctccccctctatttatacccgaggcaggcaggaaccaaactcatactaggagtcctaaacaccttagaaaaccctctagtacaagaaagaaactttacataaccaatcgtaccaaatttggactccttccaaattcgactccgcatcccatacacacacaatacctccatcgtatgccatatggaatctccatcaaccacgtgcatcaactctagcctaagtatcccgcataatctctgaccaccacggacgtcgtcttatcccc

SEQ ID NO: 24848 - DNA, 1523 bp, Oryza sativa
gacagaaatatgaacattagatccaccagttatctgtcaaaaaaaagtatgatttgatacttacagtcccagtcaacatattgacaactatgttgggcagcagttttatcaggtaggtacaggtaaaaaataaaaaatggaggcctgatgtccctattttacatcttcctaaaaaaatcaggtaagctcaaattgcagcacaactgcatgactgcctaaaaatatgtttttttttaaaaaaaaagaaagtttaaaggatgccaccatgtgcaactgcacttcatgttcttttccagaactggtattctggaacaactttctctcaagtttcaactggctttaaggttggaacaatccctgttttcctccatattagagcaatcatcatccagaaaagagttatcaacagataatttcgtcatatgcatagactttgtaaaagctccccctccagtttttcatcatcaagttatgtcatgtttgagcattgtgtaaggcgccaattttcggaaaggttcttagcatgtatgttgaaagaattatctttatcaggcaatattcaagtctttatatctactggaaagtcttccattaggtagcgattatcagctttgggaagtgacaatggcaaggtctcttcgtccacagaatctcggtatttcaatggaacgacttcaatcgaaaacctattttggctggccgactttgaacgacttgtgggtaaagatggtccagtacctatttggaaaaatctcattagacatgatgacatagtagtatctatgaaaatgtgtaaaatgacagattgtggcatactgtcagtcatgtcctttgtcttgtggaggagaaatgtcccagaaaggatggtcacaaaaccacacagctccgtgacaatttgtgttggattttgtcgatcccaatcctgcacgtaataaactatgctatcacaaattgaggaaataaactttccataaggcatcaattgtttcttgaagacagcaacattgtgaaagaaaattaaggtgcgtagtgcacggtaacaacattgtgcaaaattataatcacagcagcatagttagcggagcaggacacatgtagaactacacattaagccaaaaaaaaaaattgttcatagctttctgcaacaagaaagttgagtgtataagggctgaatgcctaatggaagtgatagaaaaagcttaccttaaacattatcacactggctaaaattgttagtgaagtaaacatcacgtaatatattggtgagacaactgctgtattaaaggtgtccaatgcctgcaagtcacagagataaaagaattactattgcgttaatgtaataagcccttatgtgatatgttacaataatggtagctcaataagctacatgttctgtactattgcccagagtgacatttcaatgccccagtgacgagccaggaaagttttacagcctgaagccctggaaaaatctaactacgctgagtatatgctgcaattctattttcaatccctacaatgat

SEQ ID NO: 24849 - DNA, 2021 bp, Oryza sativa
acttacagtaaggctgctgagggctatgttatgaacatattttaatacagtaaatacctggttcagttgcaagatcccaaacttcccttacagaatcgatgttgcgctcctgtggagcatggagtacaattgtgatagatccaactacacaaagaacacaaccaagtatgccaaaggtgtgtagtttctcctgcagaatggcgtgtgcaagtgcagcactgcacaaattgacaaaagattatggttttgatttagcaactagatagcaaaaacaaattttagcaagtttcttatttgattcatctgaaattacctgatgattatactgagtgccccaagaggagtaacaagaatagcaggagcaaatgcataagcagcaaaatttgcaatttctcccacaatcactgttcacaaaggtcatgtaagatgccattagtcaagtttctttccttagtgacattttttgtctaaaaacaaatgaaacagtaacttcagtatattagaaaatacacatttctgttcacttccaaccaataaattccaccaaatatcttactgaaagaataacaaggaaaaacaacagccctaggagcagacagtagtaagagatattcatgctaaggagccatattcaggtgacaggaaacactttgctccgtacaatcacttttcatgccccagttaagctcaaaggttctactaatatctagtcacatacttgtatcaatgtaattatctagaatatcgttttggcttcattgaattcagccccaattaaaaatgtttagtttctcctaatacaaagtaactgtatttatcctgattctcaagacacagaaacatcttattacaggtcttagggagttgacaacttgacatcaacacgagtttacatgaccaactaaccaggtaacagacaataaagatctcatcataatcaaagtgacatcaataaggaaaaaataattgcaggataatgtttgagcagagcaagctatatgttaagatcaaaggggaaaaaactgataaatccaatgatagaaaaaaaatattgtgcacataatgtgacagaaaagaaaggaacattttcaagaagtacaaaatattgtataatttaaaaaggaatcaaatgtggcttactagaaatcatgcctatccaccatagaggctccattaagtaagaaaatcctccatatcctgtttaatgcaaataaagaaaacatgtgacctcctgcattgaaacttgtagagcttgcaacacaatagcttatgaaatatcacacgaataatgaaagtgcattgatctgacatcaatcatttcaggtaagtgcataaggacatagatcaggttgagatgtaagtgcatgttttgttcatacgttaccactaggctgtcctaaagtaagctattatagagtaaagtatcatagtagttggttggtttgataaaatattgcacatgtgacatcgctatcatggaagtgaaccactagccagccaaaaagatgtaatttcgtcctggcatactgaagaaccatatcggttagccactaatcgcagaagcaccacaaccacctagcaatagaaacaacaacccgaaatttgacttgactttactctttccgcaaaccgaatcaaacaaaatccacagtaatcatccatgactcgatcagatacagcttacgatccagaaattcaaaataagcaaagcattggtaccacaagcattgaacatcatcttgtataaatatttaataatggaggacaattgcaaaaggccaaggataccaccacaaaagacaacttttttccggactcactcatcttagttccaataaaaaaaaatctcacaagtaacaaatgccgtatcaaatgaagcaagaaaaaaaaattcttcagagagtcaactgatcctccttgcaagtaaagtaaagatccttagactcgattagaactacttttgcaggtagaactttccagcttccacgcccaaatcattgcaatccttttcacccgcgaga

SEQ ID NO: 24850 - DNA, 4786 bp, Oryza sativa
catcctagcgacgaacctgcttagtgctaccatgcatccggttagcttttgtacttccttgagtcttgtgggcgacttcttgttctcgattgccttgatcttctcgggatttgcttctattcctctgccagagacgaggaaaccgagtagcttgcccgacggtactccgaacgtgcacttctctggattgagcatgaggcgatatcgtcggaggttgtcgaacgtttcccgcagatcgtcaatcaatgagtcgcttgtcttggtcttgacaacaatgtcgtcgacgtatgcctcgacattgttgccgagttggtcgctaagtgcgccctggaccgtgcgctagaaagtattccctgcggttatcagtctgaatggcatcttaacatagcaaaacaccccgaacggcgtgatgaatgctgtcttctctccgtcctctttcgccatgctgattcggtggtagccagagtaagcgtcgaggaagctcaacagctcacagccggctgttgagtccaccagttgatctattcgaggaagagggaagtgatctttgggacacgccttgttgaggtcggtgaaatcgacgcacattctccatttctcgttggccttccgcaccatgactggattggctagccactctggatgaagtacctctctgatgaagccagctttgagaagtttgtcgagctcttctcgtatggcttgtttttggtctggtgcaaatcttcgcagtttttgctttactggcttggcatcgggtcgcaccatgagtttgtgctcaatcacctccctggggaccctcggcatgtcggacggttgccaagcgaacacgtcagcattgtcgcggaggaaggtgatgagcacgaattcctatttctcgcttagtgttgccccgatcttgacggtcttgtcagggttggcactagagagtggaacggtcttgatcgcgccgtccggtgtcggggtcttgtttgtcttgctcactttcttgggtggctcatttgtggcgggtgggctgggcatttgctcgaccatgtcgaggctccacttgtcgcattgtaccgccagctttgtgttcccttgaatagtgattgttcccttcggtcccggcatcttgagcacttgatacgcgtagtgggatgtggccatgaacttcgcaagtgcagttctcccgatgatggcattatacgctgtatcgaattcagcgacatcaaaggtgatctgctccattcggaagttgtttgcttggccgaaagtcacaggcaacgtaattttgcccaatggtttggacgaggattggggagtaattccatggaaggattgatcggtgggtgtcaactcgcttcgcgaaattcccatcgcgtccaaagcactggcgaagagaaggttgattgagctaccaccgtcgatgagaacccacgcaaccttgatgttccgaatagtgggttcgaccacgatcggatagcgtcctgggatgacggcagtcttgggatggtcttcttctgaaaattctatcttctgttcagaccacttcatcttgtgtgcagccccctgccatgtcgaacagacttcacgttccactttcttgtattctcgctttgaggagtacgctgtggaacctccgaaaatgtgtgaaacgtggaggttagagtctggatatgctgtgtccgattcctgaggagccacctccgcatccttctcgaccacgcgtactcgcttgcctttttcaaatgccatgtgcttctcgagcgactttttgaaaacaaggcaatcttccaaagaatgtctgtctatcttgtgtatggggcaccatgctttcttcgtgtcgctaccttgtgggtctgggcgcttgggagggttcgcgtattctgctgcgagaacttccgcttgagctttcattttcccacttttgcgatttttcttcttgcttgactcaggtgcgtccgtggctggtttcttctctcccccggtcttcggcttatcgttcttgcgtctcagtgcatcatctgcgtgggcgcatcgctcaacaatctcgaacaatctccgagtagttgtgatgcgtcttgtcaccaactcctgggtagtatagcgatctctgacaccagacttgaaggcgcaaattacagaagcatcggtgatttcggggattgtatttctgcactcgttgaagcgccgaacatattccctcaaggattcacccgagttctgtgtcaacgcatgtaggtcgtcttcgatcgcgtggcgcttgtaagttccttggaagttggcaatgaactgctggcacaggtctgcacacgaagagatcgagtagggcgggagatgcatcagccatgaacgtgcagagccttttaacgcagttggtaaataattcgccaatgcattgtcgtctgctctggcggcgtagagtactgtggagtagacttgaaggaactcttctgggtcggtgctcccatcgtacttctctattgctccgggtcggaatctctcaggccattggacatcacgcagggaacgactgaaagctctacacccagcgctgggggcggtgggttgtcggcgatcgtgtgtccttcatggatgtctgtctgatgatgaggatgaagaagaagacgacgatgacgatggatcgcttggttccggtgtaggattacgaggacgtcggctaggttctcgagaatcctttcgccgccctcggttgttgtcccggcgtcgatctccgtcgtcctcgtcattatggcggtgtccttgaccagtgtcaccctgcgtccgcctctcgcaatcatcgtgatcgtggcgatcgtggcgattaacacggtctcggtcttcgctcgagcggccctcccgtctttcattatcgcgatgtcgtgaagagacgcgatgccgggagcgatccccgttgtctcgtgtgcgtcgtgcctctcagcggccattgaggtggtcacggagatcgccggtgccgcgaggtggaggggtagctcgatggggtgactcccactattcgggattttcgccattggcaccgccagttggtggctattccgggtgtgctgcatcagcggcttcttcgaacgcgttgctgaggttggttactgattcccgtagctgttctgtccactgtgcgagatcatcgtttagaacgggatcgtaaggggtctccctcagtattgcgttgatggtcctgatgtgctaggccggtgtagccacttgattttgtgcttccgcattagcgtgtgctgacgtgctggtcccgtcgatagctaatacctcgcgcggcgtactcgctttgatgagccatagtcctcgagtagatgcaggactgatggttcgggtgaactgatgtcgattatgccaacgaatcgatctgaaaccagcgtcgttccttgttccttgtcttcatctctaagggatatgcctaactgctggaccttaggggatgacgtcatcgtggcgctgagaaagaccttgcagcttgagaggtcgtgattctttgtcttgtgaataggacaatagacatcacaggttggagaaatacgctgaattccacgctctttgcaggcgcgaatttcggcgcggacgttgagaaaaacccaacaggcgtgcaaagtgtgtttcctggttttgtggataggacaccaggaccttgtcgcttcggaagttattctcgtcggctcgtggctcttgtctgaacgacaaggtttggccgcattagaatccttctcgagctcggatgtcgtcaatgttctgttctccgcttcggcgggaggatccttcgacagggagtcgtcctgggttgtatccactgcgttctcatttccggtcattgatggaccagctgagatcggcatcgtggtataaaccgggaagacgatttcgccgacttgagtccacaccagcattgttgaagtaggaaatccctggtggaggttggtgttgacgccgttgtcaacgaaactggatgacatagtagtagaaccttgagcaccaagtccccctacctggcgcgccactgtcgacgagtgatacccgtagaccggatatagagggtattggggtacgttggtacaaggatctatgtaatacgacatcaagcaaacagagaacgaggattatactggttcaggccccttgataggtaatagccctaatccagttgatatgagattatatgatggaaaacacaggttacaaagggtacgatggaactcgatgaaaccgacgggatcgtaatcgagttggttcgactagatctcccggcgatttggctcctgcaggctccgacttcgtaggctgtgggggttgtgttggctccgagattcgatgccttaggtcctccagggggtcccttttatatcgcaggtcaggtggtttccaagtagaactcggagacatcgaaacctacacgatacattgacgacccagtcttgtccgagtaggattcttttcatctgtaaactccgtgaaggatttccttagttatgcggagaatgtccatatacgcgcagacatgccatatcgatatgtgacgtatatcgaaaggtaaagggtatacctaacccgtaaccctgacaacatacatgaaatattaaatatatgctaaaataataactaattgcacagattgcgactatttgcgagatgaatctttttatcctaattactacattatttgacaatgtggtgctacagtaaacatttgctaataacggatttattaggcttaataaattcgtctcacaccctatataatactcaatgtgacacgccaaaactttacacccctggatct

SEQ ID NO: 24851 - DNA, 2839 bp, Oryza sativa
ttgtcatcagaatcactgtcagatgcagatgcagattcggagtcagattcagacgatgctgatgatgaggtttcccttctgtgcctcctcttctgctgcttccttttgggtcgccgcttcttgtcctccgagtctgaggagctgtagcttgagctacttccagaagaatattcagagccggtaactgatgattcactgtcagagtcaaatacagaagcctcactactatctgaatcactccgtgaacggtattttctcttgcttttccgtttgcttttctcagacttctccttcttcaactttgctttcatcagcttcctttcctcttccttttccttctcaagatcaggattctggaactgataggaaacaggagcagccgtcttcttcagcttggggttcttgagctgctgtgtcctcgagggccgcgaaatgtagacccgttcgttcttgcactcgtatgtccagtgcccaggctgaaaacacttctggcactgggtatatgcgccaccagaagaagaagaagtttgcgcagcttttggtttcactcccagtatcacagccttctctgtactcatcagatacatctgtctcttggcctccttcctctcctgccagcgcgaaggtccctcttctttctgcccataagcattgacattgcgggcagcggctgcagcagctcgctcggcttgagttctgctcaatcccttggcagcagataaggcctgtgcttttattctctcagctgcagcctgagacttatcgtcatttccagacatcttgggctcacccaacaagaatcaaatcatacaaaatcagcaatattatgatcctgtaaggaaaccaaaatacatcaatagagtaatttgggtaatgaaaaataacgcaaacaataaataagctttctgctataccaaaatcaacacattgatgcaggaaaaaaaatctggcacataatatttttcgttgctataagaagaacatctacttatgaatttgtcatacgctcggtgtgtgcgtcggtggtcaatcattgctacgcccaaaaataaaaaaatggacaaacccttagagctaagagattctacagtaaaccgtggtaagaaagaaattgcgagctacaacccaaaagcaagcaaataaatccaacgaatacacctccccaggccgggcggatcttaacgtgggggcatggggattcactcgaacccccccccccccccaaaactttattccgtaacaaactgctgctattagtgctagggttagggcaaattaagagaaaagcttccagatctaggagaagagaagctagggtttaggcgaagacagatggtgcgggggtaggaaggtgcgtgtgggttggtgctcaccggcggcgaggatgcttgcggcggaaggaggcagcaggtccgcctcggctgctcgccgagttcgatggagatcggcgcaggcgaggcggcgggcgaactcacgaggaaaagagagagagagagagagagagaggagcgggtcagaatcgggagaggtgaacgggtcgggatgtgggggcgagcgatgatacgtgggccgttaatgggccgatcactatgtcggtcagtgatgggctgatctttatgtgggccggtgatgggcccatgaagtaaataatgatttgtactgatcctaacagggtaaatttacggtgatattagacaaccatgcaaagttttattgtgagatataaaacgaagaaaattagaaaaaagaaaaaacagaaacaatgtttttattttaagattctttaattttattatgcataaacggagttgaggttgtttatttacatcctacctacatgctctgtgtgattctttcagaacttctatataaaaaaatttccacaagttcctgatttttgaacatgcgtgcaaattagagtataataaaattattatttcttgatatcatatgatatagaagtaccccgcaaaaaaaaatgatatagaagtatatttatttgagatccattgccataaatggtcccaatacggaacccatttctgtttctcagaagcatgagcccctgacacaacctagcagaaaacacatacaaccatctcagttttgtcaagattttggaggtctattacctgcagcgagactgaattctacccgggaaactactttttttttattttatgaaacacgcgaaactactataaccataaaactgacagcttttcaaaggccatgttacagtttctccacactgaaaaaaacagtaaagttacaccaacttcaaattgcaacctgaactatgaatattgctgccaaatggagtaatatatacagcaaaggaaagtaggagcatgaatggaaaaggaaaaaaaatgtggcaaaggttccaaaaaaaaaaacatcctgactacacaacacacaacccattatgatcatgactgaatgtatctgatatctgtgaattctaactgtcgaatgcacaataacaccttgcacagccaaagtaattcccaaggtaatgaaatccagactgaaactcttatttgatggtatatatcatctctaaagccgctaaacctgtaaagccaaatagcttggcaactcctcaaagtgcttccctagcacccattggtcagcgagtcctgcggctgttggctggtttagatggagaagacggtttgttcttagcgaaatcgacaagatccttgaaaagagaatcttcaggtttggtctgccgtgatgcggtcggaactgatgaacctctctcattctcggtattcctctgattaagcgaaaggccttctgtttggctcaccagtccattgtacccggcaccgtt

SEQ ID NO: 24852 - DNA, 3513 bp, Oryza sativa
ccccactaagatagtcaacactgcttgcctccgtgaaaactggcctctttgatgatggtggcggaggaagaagtgggcttgggtaaggcctttcactttttggagcaaaaggtagattgccctgtgctgctgtgccatcccttgcagacctacagaacatatatttgtacatcagatgacaaaactaaacagaccgtgaatcttggtatcataacatgatccgcatcaccaaaacattttcttaagagcagtcagctgatgttgccacaaccatccaaagcttagaatagcaatagcatgtatgagaaataattagtaaagggtactaatagggaaaactaatatagcttgcctgcgggaaagaacagagaactcgtcttctggctcatcgtcttcatggtgcacattaagaagtggggaaaatgaaaccccagtaggcctaggaggggctgttcctcggtttacattagcagcagcaggagctgggcctgaaccgggaggcactccctttgcgatgtcatcatgacgctgaagaacacgctgcagttcatcatttaaaccgagagcttgaaatagaaggctctcatcactgcagaggatacaagacaatatgtcacatgacaatgtgaaaaggacatggaaccaaaatttcagagtaaaagaatagaacatacccagtattgctaacaaggtccatgactcgaccttgataagatcggcactgcccaacaaggtcaacaatgacctcctccctcacaccctacaacatgaagcgcaattagacagaaatttagagaaaaagagcataggtgggtggaatggtggattcaatagttaaatacagagacgcatagagacatcacactagtgcaagtttggtcataataaattaaaatattagggcacattatttttagccagataccagagcaagttctagaaaatacaaaagcttagaaatccctctttaattattcttatgccctcagtctcctatgctgctaaacatgattccctctgaacaaatggaccaagtaaaatagttcgcacattcctgtaagctgatgaggtaacatggatgaacaaagatataaatggatattggataatatactagacttcaaagcctagcaagaaactactttgtcatccattacacatagatctgatcaatgatgggacatgtaatagttacatcctcttctgtgcacaattcacagatacagctcagctcactacatgtgaaatatgctgtagtatgatcatatgaaataaaacacatgatttatgcataatttttttcatgggaaaaacaaaggtctagaagacatgacaatcatattaaagctcttaaaagtaaaagaaactacagaagagatacaaggattatacaacactgcactaaattttgatgcttaaaaaagtcacctcagggtgcctgtggtccaaagcatttaacatctcatccaacacatccacaattcctcgagcactctgaatctcacttagactgtaatgcacaaggagcaagaattaaaggtggattataactaaagaatttcttctgcaaagatggtgaaataaattgataaacacaattgaagtattcaggtattgtttagcatgattatgaaactaaactgtcacaaggcaataagtagaatctattttggcacactgacaccgccatattttgttgttagaaataccactataagtatgaaattcttggaaagttgcatggccctagttctatgaatgtcttgcctgtaaggctgtaacagggagacaaacaaaattactattaatgtaatgcatcataattactttctagtatgctttagagttcaggaatgaggacaaccaaggatagcggcaactgcaaccatcagtagcggaggttccaactttagatcagagatggcgtacttcaagaaagcaattaatcactgaccacttttttcccccaaaatacttgacactccatagttgctaacaggtatttttccaatatcacacctggtgggcccaaccggaggttcagcttttttttttttttttttgcccctcaaaactactaatgtgttctcagtgactaggaaaaaacaagaaagatctggagcctgatagcctatatgcaccgtgaaccttctttccgtactctccagttgtgctgagcggcaagtcctcagggttggagccttggaggcacacaaatcgtccagaagcaacttggacactgctttctgctgtctgatgcacaatttcagcagaatagagatactttaatccaggagcattttcgaaatttaactaggaaacattttatagccttgggaagtttgcttggctaatgggtgtcatctatagaggaacagagggagcagaacatattgtgagtacgattccactcctaaaacatgcctagccatttaatgtggttgtaggctgatcagtatttctgataggaacatgtgtttgaaacttttcccccccaagtgtgaatttacaaaccaggccatgcttgttccaaccaaagtaggttattctaaagagaatgggaaaaatagaacaaagcaaggcataaagaaacagcaaaagtaaatggcattaagaaactatggatgaatatgacagtactgcttgaagtgaacaagtaaataaggaacaaattttgcattagaacaaaagaacacctcaaggcaggtgcagaaggggcgctagattgaagagaagcttgtatcgctgcatcttcatagctttgacctggaggtggatatagatgtggttgcctcaatggttgagtttgaggaggtgtaaacagtggaaccgtgttctcctcacgaggtggaaaatcaacaccagcattctgcacacaagggcaggatatcttgttcatggtttggacagaaacagaagcaattgaatattaactcaaaagtaaaaacgttgaagatctaagtttacattgaaacaaagtgcagaacagattgaagttgagtggaacagtagtcaagtatgagctgtgatagcacaggataaataacagatgagaaaactggaatgaacacaagtagacagtaccctgagttcttggtaagcagcgtgatactggggatatctgccagatgcacctccaaaagccacttgccatgtgtcaatcaaactcaatattttctcccgaacatttaaatctggctgaaatcataaattggcaatcaaatacagaagcataagaatgtaggaactataggaataagtcttggctggttggtcttggtcttgtggtgccttttcctgcttttcagctttctaggacagcatctctactttcagtttggatgctctaggacagttaggacagcagtttgttgagatgctctaggacaatatgttgagatgctctaggacagtttgttgggatgctctaggacagtatgttgagatgctctaggacagtttgttgggatgctctaggacagcaccctcttagactagcatggctgcatggct

SEQ ID NO: 24853 - DNA, 1026 bp, Oryza sativa
  unsure (1)..(1026): unsure at all n locations
cacgtcaccactgccgcaaagccaaagagctcgatccagcgccgggtcagcaatcacgcgcgacacgaggccaatattagaattattttactacacagcttttatcgtatccgagagcagtaaaaacgccgcctaatttacccggatccggattttgnaagcgtgtgcgttgcgtggcgctggtgggggcgcggagcaaatcagggctccgggacatgtcatagagctgacgtggcgccctcccattggccgagggctgtacaggtacgtgtacgtagtcggggcgcgcggtgacgtggcgttggccgtcgttaattcccctgccttttttgaagtcacaggattggatttatccctcgggaccaccccactttcgcccccctaattccacttaattacacatcactcctcatcaggggcatattagtaatttattacctctagttttagcacatctcagcctcgtggagggatgatttgacgatgataagtacagggggttcatcgcaaatgttacctgtaaatatctcgtgactccggtgcgccgcgtccacgagggagtccgcggggtggggcccggtgggcagtttcagggtcgatgtggacttggtccacgtgatccggtaaacccccccctcgcgtactccgccctattaaaacccgtgtgagaagcgtgtcgtctcagggaaaaattccgaaagccacccacactctccgtctcctcctcatggcgatctcgaaggcttggatctcgctgctgctcgcgctcgccgtggtgctgtcggcgccggcggcgagggcggaggaggcggcggctgcggaggaggggggcgatgcggcggcggaggccgtgctgacgcttgacgcggacggcttcgatgaggccgtcgccaagcacccgttcatggtcgtcgagttctacgccccgtggtgagtgtgctctgctctgctctgctacggcccccctgttgatgagctgtgcgtgttgggttagatctcgcgaggtgggtttttgggggggggggg

SEQ ID NO: 24854 - DNA, 1632 bp, Oryza sativa
gggggactaagaggagggcgaatgcatcaccctcgggcccgacgtccctcgggggtaccaggccacgtatgcgattgtgtctgcctcaaacctctagtcatgatactcctgatcccatgtcaccgacaacatgcatatagaagttaatatgaatgtggatgcatattaatatgttaagtcattcataacgtgtgtttcatatgaatgtagccaatactagaatgatttacattatgaaatagagggagctaataattaattaataatgtactaaaggattgctctattttccgtgtgtaccgttccggtttcaataccagcgcctcgccgcctacagagcgtctgggggaagccccccgtttcacccctttctcctcctcctcccccaaccccaaatcatatcatatatcccagccggagttgtattgacaatcgacactttttttttccaattttccttaaaaacacacacatgcatgcactgtaacaattattaaaattcttaataaaagtgcactggcatatgtgtttttttaggaaaacattggcatatatgttgactacggaagaagttcagatttgaaccctaacgcttgaagtcatgcaccatctaatatgatatcacatcagagatgttcaccgcatcatattaactttctgtggacgtatctcataatcactggtgctagcctccaaacaaagaacagaacgcacagcggagtgcaaaggggcccaccgaagatgaccaagtagacaagattggacttcaccaggtcgacggtgatggggaccccaatcttcgcgagcaccgtgatccccatcctcctctgcagcacgtacgcgcagatcagcatccgcaccacctccctgttcctgaacagcagcgtgccggtggtgaagacgcagacgcccaccgccgtggcgcgggacaccggggccagcaccaggtacaccccgagcgcgaaggccaccagcaagctcctcgtcgactgccgcatccacgccagcgaccgctcgaagtacgcgcggcggagcttccagtccaccgccgccgtgctggagtacatcaggctaaacgtggcgagcatggagtaggcgaaggctatcgccaccgcgtacatgaacgcgtcgaaggggtactgccccgccagcgccggcgcgccgccgccgtcgccgccgtagccgcccggaggggagaaggccaccgcgaacgtgacggcggcgacgaggacggcgccgacgcccagcatctgcgtcgactccgtcatcttctttgactcggcgctctcgtctttcttggggacgtactcctcctcgaagtgatcgttgcgccggaagttgctgccgagtgcgttgctttctaccagagaccagaggatccaagttcgtgcgctctgcatgaacaaaattactacaatcagtacagatattgtatatatgttggagaaaaaataatctcaacatgaattaattgaaccacatcacctagaaaacattagcagctggatctttcttgagttaaatctgaatcgtcattcatgtctttagttacgttactttcatgcgacggcggcccgcggcgcacgggaggcgcgcgggcagcagcggcagtggccgggcgtgcgacagtgg

SEQ ID NO: 24855 - DNA, 8512 bp, Oryza sativa
agggccacgagcctcaggttgccgcggcggcggcgacgtggatggggtactcgccgtcgccgtccgggcggaagggtaaggaggggtcggcctcgaggagaagctgggtgggtgtccggcggccgtggctcgacggcgagcggagacagcggcggaggagtgaactactgtcggtctctgggttgttctccggtgaggctgctgcgaagtggagcgctgtgctgctggacgcgtcggcttcgccggcgagccccttgttccattccagtatcttttctgtcatttcttgaatttatattatgagtaaatttcactgaactaataattatatgatgagaaaacattatattcatatatacttcctccgtccaaaataagtacaaccataagttctcatgtccaactttgatcgttcatcttatttaaaatttatttatgattagtatttttgttattattagatcataaaacataaatagtaatttatgcgtgacttatttttttagttcttttaaaaaaatttaaataagacagacgattaaagttggatacgaaaactcataactacgtttattttaagaagcaattttacggtttttgagaaggtaccaagagataccattttttctattataaatttggtattttttggtacttagctattataaggtactatgaggtacagattttagactaaattttttttacctaatgctacctcttcaagagcagtagaattgtgacggaggagtatctttgattgatcggttatatctttgatttgttgaacttaattacctgcgctgcgtaggacagcagcgtgtagggcagtttggccggccggtcagaatacgagacctcgtcgccgccttgctggtgcagggcctccgcgatgcggtcatgccgcaaggacaccgcaaggtacaacggcgacatcccgccgcccggcgccggaacacgggcgagccgcgggtgcaccgacatcaggtggcggacgagctgctcgtcgcccagcctgacggcgtcgtggagtgctgtctcctgacgagcgttcctcttctccagcacctcggctacccttgagccgcccgtgccgccggcgagctcctcctcctcctgcctggccatgtcgaggaggcaccctaccatcgccgcgttgcccgccctggcggcgcggtgcagcggcgtgtcgccgccgccgccgctcgcgctggggcggtccaggaggcgcgcggcgtgacggtagatcgcgcgcgcgcagcgcaggaacccttcgccgtcgccggaggccgccaccacgtgcagcgcggagtccccctgcggcgtcgtcgccgccgcgtccaggaggtggggcaccggcgccgcctcaggcgcttgttgcccgggggccgcggcggcgccatgatgatgcacgacgacgacgtcgatggcgacttggtttggcgcggcggcggcggcggcgcccagaagtagagcctcgagccccgcgaagtcgccgcggcgtgcggctctgagcagcctgggatccatcgatcgacgtcacgcgctgaagtatgtaccactccggaaattgaagacaggtttacttaggagtagctgactatactctggatcagatcgtcgatgagaaaagatttgcaggtcaatcccaatggtcgagagcatccatcttacccagatacgaaaaaactgtgtttaaccgtaattaattataggttttcacctcagtttacttcttttttctattctatggcacgtaccacacacttagaccccacgaatacgtgtcctagcacatactttaagagaccgaaaccagctgtatatcatgtatcgatcacactaaattgccattaaaaacccacccatagtgtgtaatattatggatattaagatttgaaattatgcacccatgatttcactactatattacttgtgtttctttataagtgtatttatttttatgggtaagaagatgacgatggtggcgggcaacttcataatgggtaagatgaagaagaggactacaggacattgcattcagccggtactgtctaaacccgttggtacatgcaattatcttgagttacatatgtatattgtcagatatattttcttatggggaatgtcaaaccgagacactacgcattaattagccgagcctctccgcccccgtctacgacgcactcaatgttaggaatttttttccgagtaaaatgttcagaggtatccatgcatggagtgtttaaactactccgtttagagatttttttaaaaaaaaactttttgaattttttattttaaaataaacccttcccaaacttatttttagaatctaaactttttatcacgccagccggactgacatggcaaaacaacactgacacgccactctggctagcgtggcagcgttatttggtcacgccggtctagctggcgtagcaggataaagatgtcacatttgcaatgtgtggtgtgtcaatattgttttgtcacgtcagacgggttggtatgcaaaaggttcatattctgaaaataagttttggttgggatttttttaaaaagataaaaaaaacacaagtacaaaaaataaaagaaaattccaatttaggacatgcctacaatttagaccccactttaataccctttatgaaccaagtgagagggtcctttgcagtattgcttactgacatgtggccctcacatatcctcaggcccacatgtcaacgagcagtaatgtgtagtactagaagatttgaattgttatgaacccttgcagacgctattcctgtccgttttgtagtttgtcactagctgaatgcctgaattgatctattttgttgacttcttttaaaaaaaatcacaactatttagatgatatgtaaataacaagggaatgttcctcaagactttataatcagttgggccaaagggcagcgaaaaggaagtgagcagtaaccttccaccatttatcaggaatttcagaattgcaaattcgaggggtattgatttaaatcttgatgactctgatttttcagctgaggttttgaacggatgggacagtaggttgatatctttaatggcacgaagatccataagccaaacgtttggaaattcaaatcttactacttaaaaaaaattgataacttttcattagtcttacataattttcgtctatttcgaggaaagggtagaggagattgaggggaacccatttttccatccaatttggaaaaagagagcaaagggtaggtgtagggatgaaaacggatcggaaacggacggaaactagttttatcatatttgttttcatattttttttcagaatcggaatcggaatcgaaaactcgaatacggaaatgaaatcgaatattatcgaatacagatacggagcgaatacgagacagaacgaatacggtggcgaatatttactggtatataaaaagcccctcaaattgagtttctgatcaaggaagagatatcattcaacatctccaacatttatatcatcaattttgtagacggtctcacaaccgtatgcgaaaatcgattttcatggttgttcctctaagagatccatatgcaaatatgattatcattttcaattctcaagaacttttacttgatgtataacttacttgccattgtataaattggagatgttatttattttactttacatcttcgaaacttgcaatatttgttttatgctttaaatgctttcaaatacaaatgttataaactacaaagtggtagatcccgttgagctctacaactttgatatagaacacatctccatcagatgttgtttgaattgtagatctgagattttgtaaaaattaatatgatatattataatgaatatttagacccttaaatgatctcaaataataaaatagtcaataagaaagttgtagatctcatcgagatctacaatgttgatataaagtttgtcttcatctgattccgtatgaaaaagttatgtatatatacgtgttttttctaaaattttatcaatgtctgaggatatccgaaaaaaattccggatagtttctgaccgttttccgattccgacggatagtacccttactgtattcgttttcgtttccgagaaaataatccaaattcgtttccgaatccgaaaatttctggatagttccgaccgaaattattcgaatccaaaaaatggtccagacggacggaatctatccgaacagtttcatccctcggtaggtgggattggaaggagaggcagcgcgggcttcgcatgggcacgggggttcggtctggaggtgtaggaagaagactgtggcacatgggccctgggcgacagagagaggagagaccgaggaacgctatctagactttttttttcaccaaacgctatctagacttgctctgctgctgctgggccgaaggggaaaggaagaaagcaaacaggccgataaaaggaggagacagattagacttcaccggagaggaggtaaagcctgctagagagagagagagacggaaagcagactttactcgaattggtccaagacgagacgattttaactactttttcatttaaattaatcactgaaatgaactttgaattttcaaaaacactttcaatgttctaataatttcaagaaaaatcatgaaaatagttggatactcaacgtatttaaaaaaatatttatctagatcatttaatgattaataattgcttaaataattattgaaaatgttctttgtattgttaaaattaataattgaaaaatttcaaagagtataattaatcatggagaatttattaatgattaaacacaaccatgttttaattaggaaattatatttctcatattaaacttcacttgtaaattaatgaaacttaatataaattttgaaataatttattaaataatttacaaaatcccttaaactcaaatcaggatgtgacaaacacaaatctttaaaaagagcaccacaataagcggaatatgagttgcatccaagacataacacatgtgaaatcatgaaaaaacatatatcatcttcagtgtcaccaatcagttgcgctctgcttactctaccttcgaaatggaagacggctcacgtttctctgctccagacgaccgaatctgccagcgagattttcctttttttcttcccgttacaacgtacggacactttttctagttaaaattaaagggttgtacagaaagaattactcatcgaaggacctcgcttcctgcatgagacacttgtcctcacgaatcccatagcaacgacttctctcgtgtctctttatcaaatctcccatcttcctactgttatgggctcatggcgacggcaagggcatgaacacccgcgttcaggtctgaattcgtagcatctccggccataaggcgagggtgcggaggcgtgcctagaagctgcttcgagctccttccatattttgattagctattggtagatacttcctttttcctaaaatttaagggattctatatttttttctaagttaaactaaggatccaattctttaattttgttgagaagagtatgaacatctaacataatcaaggaagtaaatcatgaaaatatatatttcaaatggatgtaatgatgctcatttgatactgtaaatattattattattattttccttttattagaaacacggtataaaagtagatgctaacaatacacgtacgctcgtatctatgaacacgcacacgcgcatcctacttctataagcacctccaaaaaactggactgacatatattttgaggttgacaaaatcaccatgggcacctcgttggtgatgagtacgtcgcctaccactaaaaaaataattagtcgtaaatatgagcatccgtgttaactctagaacttaaattcggacgaactggttccgctataagaaacttggctagttgcttagttgtctgaccaaacttgagacaacaacttaggacataaatagaattagaatttttatactttactactccctccgttccattataagtgcagccataagttttcgtgcccaacatttgactatccgtcttatttgataattttatgaaaaaaatttaaaagttaagtcatgcataaagtcctatttatattttatcatctaataacaataaaaatactaattataaaaatatttcaaataagatgaatggtcaaagttggaattaaaacttacaactgtgcttattatgggacggagggagtagaaccaagtgtgtattcactataacaaccacatcccgtgaatcccgtggcaaggtcaacatcgctacatggccgcatagtttgttttcttgccgcacggtttggatgcacggctgcataagaaaggtcagagctgagcaaattaagcttaggacgccagtgacttgtgattaccggtaagcgtgctctgaccgtttccatttcttttcctttcactttgtttttcttttcttatcttacggagcttatttaatggttgtggcgtgaaagaaagtttttactgttagtaattaatgagaattatagaagcagtccaaagaggagacttttatttttgtctcaccccagagcatattaagtcatgccgatctgaactatcatatttttttagacttttattattaactaactgtgacttgctttttaaaccctgaatacttctacctagctaccacattttcagccgaggtatatacgatgatgtgtcctatacatcttaaattattaacaaaactgacatgactgaccaactctattgtgataaaattgaccaactctattgtgataaaattcagatttccaaatgtattagtcatttgattatagagcagattattaccacaaattgtgtatttgatcatagggataaattaaacattatgagaaacaaacttaataaatagttaaaaataagttatctaagcagttaatactgcagaagaatgcttttagagagcaaataatctgtttttaataatccgacgaataatctgaaaaaaaaatagggatgcctttagagatgtgattatggtgaatgtgcttttggaaagaatgatgaactaactgtcctcaaataatcatgtcagctggattaattggagtacttttagtgtactccattgtacaatcaaaatataaatcatcacacatgacatcccacctcagttttgtccagtaccgaaacctaaaatgcgttgcaacaaattaaagtataaagtacatgcaatgccaatgcatatgtcgtataggagtgcatgaaacagatccaattgtgaatgcaactgctgcactttctttcttccctctgatctatagatcaaatttcgttcacatacacatatagatcaaatttaattttgcaagtgaaagtacacatggcataataaagtatgttgagaaacgctcaggggtcttccggctagctccacaagacgtgttgggctagacgatttgggttcgaagtctcaccccttgtaattatttgatattagatcattccctaatattcgtatcataataatgtactacctctgtttcaggttataagactttctagtattgcccacattcatatatatgttaatgaatctagacatatgtacaatcctagaaagttttataatatgaaacggagaaagtacgttgtctaaatcttattttaagtttttgttaattacttgaaccacgtaagaaaacaaggacacatgccctcaagagcttaaaacacttcccctaagagagtaaaaattataccatttcttccctgcaaggcaccaaagggccggccccatgcatccatccatccttacaagtcaatctataagttattagtagttgccagtttgccactacatccaaatcaaagacctggcatagctaaaagccccaaaggatggttggttggttggttggttggtgagttgtctccaatctccaaactccaagaacaagaatgccaaatcaaaagagcacaagtgctaattaagcaaggtaaggtaaagctaggtgtatgcatggaatagtatgcatacctagttatcctcttgcttcactcctccccttctttcctttgaaaaaattaatcttgcctactcctccaagaaacccaactttgcttccatgcaaatgaacaaattgcactagatcattattatattgttgtatttgcacaacataaaagtgatgcccaattcaccatttcttgtttgatccttggttcttgagatttgatttaattcttgtgttgcatgcgtgacgacgatgagatgcctaaggcctggtggtgctcgccggcgatgccagctgctccaccgcgccccgccgccttttgcgcctcgctggtggacggcctcgcgcagctggagagcacgctgttcgtgaggaggacgacggcgatggcggcggcggcggcggtggggcggtgtcgatgaggtggtgcgccgacgccacactttcctgtaggctaaacatctcttgttccaccccttcccaagctcg

SEQ ID NO: 24856 - DNA, 2397 bp, Oryza sativa
  unsure (1)..(2397): unsure at all n locations
gcatgcgtgacgacgatgagatgcctaaggcctggtggtgctcgccggcgatgccagctgctcgacggcgacaccgccgccttttgcgcctcgctggtggacggcctcgcgcagctggagagcacgctgcttcgtgaggaggacgacggcgatggcggcggcggcggcggtggggcggtgtcgatgaggtggtgcgccgacgccatgaggctggtgaagcggatgcagcgggagcttctggtcatgttcaagaaggccgacgtgccggtgggcagcgccgtctcctacggcggcggcggcggaggcggcgacggcggcgggtgctggttcgagcactacatgcaggagacggcggcgctgctcgacttctgcaacgcgttcaagtccgccgtgtcgcggctgcaccgctactgcatggtcgtcgacttcgccgcgcaggtcggctgcgccggcgccggcgccgccgcggagaacggcggcggcgccggcggctggtggctggaggaggagccgggcggcgacgacgcgggcgccatccgccacaggctgtccgacgtgagggcggcggtgagcgaggcggagcggctagggaggaagatcatgtctagctccagcggcggcggcggcgccggggacgacgacgccggcggcatggtggtcgtcatgctcgtcgccaagatcaccatggccgtcgtgtcgatgttcgtgctccaggccctcacctcacccatcgtccccctcgccgccgacgtcgacgacggccactgcacccttggccgcgccgccgccgtcccggtccccgagctccagccatggcgagaatccctctccgtgatcaccgaccggttcccgaggcggccgggcgtcgccgagcacgagagggtggccatggtggtgaagtccatgatgatcaacaccaagatggaaggagaagaagagaccaaaaatggcaaacaagaacaagaagatgaccatgttgagcttctaagaacaagatcaggtgagctcagggaaggtgtggagatgtttgattgtgttttggatgaagtgtttgatgaggtgatcaagggcaggaatgagatgcttggcatcttcagagataaggccctcacactgggctgaatttttagatgttagctaatctctgaaaagttaattgaccttgagcaatctggaaaccagcagggtatgtatgtaacctggggtggatgctaatttgactgatcaatttgagttgttttgttgagggtttagagcttcttgcaatgtgtgagtatgtgtttatgaaggtgtttaattatatttggtttccttttatactttaatttctcctttggtttgtaacttgtttcagtgtgacatactgatcaataaagcatctgaagtttagatttgttttatatctgctaaaagagatgaaacaccagatgcaatttcacatctacattgcagttgatgcaggagtaaactatgttcagttaagaggtgaattgaagttcagagcacaaaacacaatcagatggtcacttcttcattgttgaaggaatgctcaattgcagcaagctgtantacatggaacaaaaaacaaacagatgatcacttattcattctcagttctgatctaaccaaagccccagggaaaccctgaaaattccacaaattcaaacaaaaaaaaattgcttagtttgctatcacagagaaattacagaaggttttgtttcctgttgtagtattacatttcaacaagaccattgaggattacatcggaatcatgtcttcacttggtagttcttttaacaaccatatgataatacacagtgctaaactagttctgggagttcatgccccacttgtcccagatcaccccaaaagaatgaacaaaactttaccgagagcagaagaatttacgaaaatcaaacggccatagttccctaatccgcctttgtcaagtgcaaaatagaaaggcggcaggaactggtctgcaggatcatagagtaaaggagtagaatcgcttgcgacctttaggcttaaattcctcagcaggggcataaatcttgacactgaatagtcctgtgccatcctgtgctatatcaaaggtaaaatcctaaaatatccttgcaccacccattccgaaagaatctctgtcatcttgttagttgtggactgctgcgtctctcttctgatcgatgatggaataactttgctattgaccgcctctcacaatcctgaacgagaatagcatgtaaattagatttagtatggttgcggtcaaactagctagctagatggtcaactgtacccaccttaaacatattaaggcgaaatggcttctccgggttcattcttctaagcttcaaatatgtatatgcaaagctgagctggtcacgaggtgtgaat

SEQ ID NO: 24857 - DNA, 2493 bp, Oryza sativa
gttggaaagaacgaatcagaaaaaaacataaacagtactactgaatcatatgcctccacgtgagctcaacctatctgagaccagcaaagcatcaacacagatacagctgaattgaaggaatcaggattgattgctactagtagcgaggcagtcaggaatgtgcatactgatagggacagggcagaatgtgaaaacagatttccacctggtggcaccggtttatgactggaaactactggtattttctggcagttagtgttggccaatatttttgataaaaaaaatagtaaccagctggtaaactgcttggatttcccaaggtgatttatcttgggggaggggagttactagctcagttcagctgaggattaagaatgatattggcccataaacatgacagtgtggattcaatgtggaaaaaaaaaagtacaaccaccatatataagaacattcatttttaccttgatgatgggaaaagacgatgtgccagaaatttcggtattttgccgactctccgcatgtcattataaggcatattcttaatcaatatgatcttccatataccgatgaaacctgaactatccattttttggccttcagattccaaagttcgtaatgtgatttcatccaaaaacatagcaaagcatactgtcttctttgatagacttgtaatctgcgtagacagatatcatatgaagttatttcttaaatattaccagatttccatcaacttctgaagcatttaaaaagattcagggagcattggaacaacagaatggaaaggtcagcaattgtttaacctaagtatggagattgaggttatatattcatgtatatccaaactaacattgcagaaggttcagttgcatttcacaggcctattatataaggtttatgtttcattgcctactaacagagccaataagtacctatggtaaaaatgaagctactgagattataaggttctaagacaaatcatgcaaagaacgctaattttgcgattgccaaaatatacaagagaaccaaaataaatacattgacaagagttacattggttgtaactcatgcaggattaggggtatcataattttttcaggagtttgttggtacagaaaaagaacatactgttttcccaaaaggagtcttcagacgatcagaatttccaaagatgcaggaagatactgcaatgtggcatttgctcatgtactttctgttttcctctgagatatcaaaaccagtgcttgtaccattgggacccttaacaaaagcacaatttaattgttggtcatgagctaagtatgattcctctctttcttgtaaactctggtggccagcaaatcttggctcccaatactctgatccaagaggtttgtcttcaacttccacatattccaaattaaaactagcaaatttctcatttttagcaggctctacgagttgagcagtggagttcagaaacctcatttcacaagttgaacctgatttatgtttatccaacagattagaaaaccatccataataacaaaggctagataccaagagtattttatgtgataccaaattatcaaacgtagaaatcaatagatcatattgataaacattgtaaatcaagcactacataaatacacatgatgctgctgtgctactaacatctcaatcttcattttaaaggatactaatgtgtggaactaacagattagttggcactctaaaatgtccaagactaactgatttatgtctatcgaacatgaatagcacatagttagtaccttcttacaaccagattccataattggtgtttctgatatcatagaagcaagctagaattacctctaaacactacagaaggctattgaaacagaaataaaatgcagaaagcttagttattctcagtagggatcaatatgtccactaagctaaacaagaaatcaggtttctgaattcaaatcgcctgactctagcacttaaatttggggaagaacaaactcaccagtcttcttgcgctttgatttcttttttgacgcgtgtttcttatcaccagtcgccgaaaccttcttttggttcacattagcagcatcaataacatcgacaccatcactaatacccgcacctgtttccgtgcgtctctctaaggcgatgctttccttattgccggtgctatcatgagctatattttccttactctcggtgctctcatgactactgtcgcaagcttcctcccgccatcagatgaatgcgactgagcatcatcaagatcgtcctgtgcatcaatgccatcgtcatactcatcatccggatcaacctccctgatcccagtacccgcagctcccatcgcagccgcctcatactgctcgagctctttcctgcccccttcattgtacaaggtccctcctttcccaccttcagctacctcagcagcctccttatcggcggcaccgccggtatccatggtcaaccctttctcctcaacagcaggatcagaggtcacaacct

SEQ ID NO: 24858 - DNA, 1072 bp, Oryza sativa
ctcgcaaaggagaacggggacattgctcgccatcgttgggccactgatcatcatctggccgacacgacgtcccacggcttcgctgctcagacctgtgaatcgagaaccaaagttcgataagtcaggaggaacgcgcacacaagcaagtcagggtaaatgcaagaaagataccccgaggagaaacctgggtcgtgtcctccggtccagaatagtcaaaggctagatgggctcgagcctggagcgactggatccgtctaccaacgaagtcagcagcgacttcataccccgacaaacctcgtactcggagatcgtcgataacatcgatgaaggactgaagggaaggggtcaaggtgggctttgcggtccaagacgaaatcttgtctggttgttcctcaggaacaacaaagacaggatccgaattttctatctgaagatagaaccacctcgtccgccatttgctatgagaggaagggcactggaaggggatataacgcgacttcaggccatcccggagtcggaatccgacgcatccagataccctgttggactacatccaacgcaactcgtagtagaagcgaaagagatcaagaaaaggctctaccccaatgtaggcctcacaaagatgcaaaaaaatactaaggaaggcaatagaattggggttcaaatggagcaaagaaagaccgtagaagttcaaaaccaagagaagaaattcagaaggcggagggagaaaaccgcagagaatgtagtcctcgatcgcaaccatgcgacctaggacaagctggggttcagtacctccttcttctctctccatggtcccacgaccgggaggggcgccatcctcctgtagcttattcagcgacgcgctggtggaggaggacttgccgagatccatcgctgactggagatcgccggagaaaggactgagattgatgagctagggttttgcgggagcggaaaagacgagaagcgcttggaggttggagggtttcttcacaacaggcagacttcaaaatggatccccaaaactctcttaaataaacgcacttccgacggtgcaaatttcaaggaaagg

SEQ ID NO: 24859 - DNA, 1760 bp, Oryza sativa
ccgcgtcggggctgtcgacagtctttggcccaatggccaatcttgccacagttgcggcaggcgtattcttgtgccggcttgtggttgccaacggcgtaaccctgtgcacctcctccagcgccaccctcagcgcgtcttcagcccacccactgacgcctccgcgcgccttgcgcggcttgcaggcgcctgtcgagggaagggactcccccttgctgccgttactctggctggactcccactgctgccgagtgagatagagcttcccgccaatggtgataggccccgagagaggctgtggctcagcgccgtcgacgacctttaggcgacctaacgcctcctcgatcgacatcgtggagaggtccagcaaagactcaatcgagcgagcgatctgcttgtacttctctgggacgcagcgaaagagcttctcgacagctctctcctcgtcgtaggtgtcgtcgccgtactgcaccatcttctgcaaaagagtgtggagacggagggcaaagtcatcaacatcctcacctggcttgaaggccaggttctcccactccttgcggagtgcctgcagtgttgacttgtgggcgcgatcgctgccgatgcgtgccgcagcgatggcgtcccaggcctccttggcagtccgcttctgggaaagcgagaactgcatctcgggcgggactgcagcgatgagggcatccagtgcccgccgatcctcgtcgtagtcgacgtcgccgtaccggactgcctcccacatgtgccgcacctggagcctcaccctcatcaccgcggcccactcgatgtagttggttttggtgagggtaggccacccaccgccgggaccaaagtccctgaccaccgtctggacgccgtggtggccatggtgccggtcaggggagggagagccacgctgcctgcgagggccgcgcgcgggctccgggctgccgccggcacgcccgcgcccgtctgggttcccgtcggcgggcgcgcggtcccttgggccgccgccgccgccgtggaggtgggctgctgcccaccgctctgcccgctcccgtgccctacctcttgcaagctcctcaagctccctgtcggcggtgatgtcgccggcgatggagccgttgatgctgctgcgcaaggtctcaacctctacctccgccgcacgtgccgcatcttccgccgcctctgcttctgcctccgccctggctgctgccaactctgctgccgccagtctggccgccctcgctgctgctgcagcggtctgagccgttgctcgcctgcgctcttctgctgcggcgagctcggcgtcctgctgacgccgagtgctcgagacgaccgaacgccgagaccgaacgtcggacatggcgcacctccggggggctgctgcgtggagagggggaagggaaaggggaaggaggagcagccggtgttgctgctgctggtggtggctgagagctcaaccgagcttgggaaggggtggaacaagagatgtttagcctacaggaaagtgtggctctgataccagatgttagaacttcaatggctactctcattgagaaaaggatggcactcggagtggggcaattttctggttttcttcattcacaaactcaaaagccatatcctcccaaagaggattggatacatatttatagctgcttgtagcagccatgcagccatgctagtctaagagggtgctgtcctagagcatcccaacaaactgtcctagagcatctcaacatactgtcctagagcatcccaacaaactg

SEQ ID NO: 24860 - DNA, 988 bp, Oryza sativa
ttaacttttactcctacataagaaaaaatgtatatgttagcaatgacatatatataagaaccaatttactatgcttgaaattacaatggtgttgtttcacttttcctggctgcagcagcagtgactgtcggctgtaaccattgaaaatggctgctaacggcaacaactctaagctactaaaacaaccatcactattgatcactaccaatatccatacctctcgccataacataatccgacttcattaaatttttcttatttcacctatataagataaacacaaatatatatatattcctacaccccatgtctaaagtctgatcttagatcattgcatcaatcttgatctcaccaacctccatgagagagaagagatcaaagccctcaatagtctttggtatcctaaccccattcatcatcacgtgcaattaaccaacccatccgcgccaaattacagaaaagcccctccatttctcaccttctcgcccaccctcccgtccatgtccatggtggtcgagcaccaccggcgcggccaccgcgagctcctcctccccctctaatggcgcagtacaggcagtcgggcggcttcttcgactaccgcggcggccaccaccacgcgctcccggacttagggcggccatgcaaccggtgacgcattgcacatccctaagtttgctggggggcgcatccgctctatagcccgtatcttctcagggttggcctcaatgcctcgggcagagaccaagaaccctagaagcttgcccgcaggtacaccgaacacacacttatcggggttagttttatgcgggcggagcggagactctcaaaagtttccgctagatctgagagtacatttcctggttgcgcgtctttacaaccaagtcatcgacataagcctcaacattacgtcctaattggttacccaaagaaattcgagtagtacgttaaaagtaggacctgcattctttaacccgaagggggctgcagg

SEQ ID NO: 24861 - DNA, 1689 bp, Oryza sativa
tgaatcaaaatttaaccaatgcttgttctaaatgtgtctaattggataaaccctattcgcaggtgtggacactgcaagaagctcgctccagaggtatgcttctgtacagttggatcacttccttaacagcacattttcacattttggattaaatggtttgatcccatgtattaattttctttgcttgatctgtttcagtatgagaaagctgcacaagagctaagcaagcacgatccaccgattgttcttgccaaggttgatgccaacgacgagaagaacaagcctcttgctaccaagtatgagatccagggtttcccgacactcaagatattcaggaaccagggcaagaacattcaggaatacaagggcccgagggaggctgagggcattgttgaatacttgaagaagcaggttggtcctgcttccaaggagatcaagtcaccagaagacgcaaccaaccttattgatgacaagaaaatctacattgtaagacctcgattcaatatgacacattctccaacttatattttctgttccgactgttcatgctttaaaattgactgctgacttgaatgagcaattgaaataggttggaatcttctcagaattaagtggcactgagtatacaaacttcatagaggttgctgagaagctgagatctgattatgactttggccacaccttgcatgccaaccaccttccacgcggtgatgctgcagttgagagaccattggttaggctattcaagccctttgatgagcttgttgttgacagcaaggtatataactcctcaaatatcaaacttcattgttttaactattcatttggccactatgtttcctacaacttgtcacagcctttattggctggcattattttggttaattgtcaataatgtgttgtttgcatatctcttcaggattttgatgttactgctttggagaagttcattgatgctagcagcacccctaaagttgttacttttgacaagaaccctgacaaccatccttaccttctgaaatttttccaaagctcagctgccaaggtaagcgcttggcattccttgctctctgaaaagctccattcttttaataacagctggcagtagttgattgatactgtatattaatagtcaatttaaatgtttatttctcgtgtttcaaatagactttgcttagactgtaatatctgatacccttctccattcatatatttgcaagttctcactattaaacgcagtgattcaaatattgttctttaatactccgtatatcattatgccagtaatttgcagttgttgatgactgacactaaacgttaccaaattatatgcaggctatgctatttttgaacttctccactggaccgtttgagtctttcaagtcagtttattatggtgctgctgaggagttcaaggacaaggaaattaagttcctcattggtgacattgaggccagtcaaggtgccttccaggtttgttacctcactttcttataatttttttcaaacaattattaatgtacttgatgctaactttaaatctgtcactgtacagtactttgggctgagggaggatcaggtaccactcatcatcatccaggatggtgagtccaagaaatttttgaaggcacacgttgagcctgaccaaattgtttcttggttgaaggaatactttgtaagtagtctttt

SEQ ID NO: 24862 - DNA, 794 bp, Oryza sativa
taacgggaacaaaggctataagaactttccaaagaaacaacaaaaaactacaccatgacttagcttcatctctaacatcctgcatgacggaattgaaattagctgaaacctctccaaagacacatccacctatgtttccaaatcaaccaagccaccaacacaactaatgagttaaaacccttgcgatgttgcttagccactttctgcaaagcttaaagccaccacatggtgaaaacagtgtcatcgggaccttatctaaggtgctgcaagccaaccaaggacaaaactgagaaccatacacttcttgtgaacacacataaagtgagcaagtgctgcacattctcctcctcttgattacacaatggatattgccaagatggtcaacactgcgatgggccaatcggtcagcagtccaacaacgatttagcgaggctaaccacacaaaagaattgcaaagaggccaaagctcaagttttccaaacttccttccacggctcaaattacatgcccctgatgagtttttttttttgtgtgtgtgctctcattgctgatatcatcatggcaaaaagtgatgtcatacctaaactgcacctcaacaacaaatgacaccaactcatcaccaaaatcagtggcctccatgagattatagctcaactaaccaatcacaaactatcatcaattattgagttattctgctctccaaaccaacaaccgtacaacctaagattccaaattcctaataaatttggaagaaaaagactgaatatgcttttccaaaaaaatacaaaacatat

SEQ ID NO: 24863 - DNA, 4249 bp, Oryza sativa
cctgataacaaatcagacaaccaaatcgacaacgaaacgtggacaatggcgttcgatggtgcactcaacagccaaggagcaggggcaggattcatcttgacatctccttccggagaccaattcaagcacgcaatccacctcaacttcagagcgaccaataacacagccgaatatgaaggactactcgccgggataagagctgcagccgcacttggggtcaagcgactgatcgtgaaaggggactccgagctagtcgcgaaccaggtgcacaaagattataaatgctctaaccccgagttatccaagtatctcgcagaagtcaggaagctggagaaaaggttcgatgggatcgaggtccgacacgtatactgcaaggacaacatcgagccagatgacctagcatgatgtgcgtccagacgagaaccactcgagcctggcacttttctggacatcctgacaaagccatcagtgaaagaggttagcggcgaagtcagcccagccgcccccaacattagctcggaggccacagaggcagaacacgccgtcgccgatatcgagaccacagacgactggcgcaccccactgatcaaattcatcaacagcgaagagttgcccgaggacgacgcagaggccgagaaaataacccgtaaagcaaaaatctgctgcatgattggcaacgatctatacaagaaagcgccaaacggggtacttctcaaatgcgtctcgtccgacgacggcagacacctcctccttgatatacatgaaggcatctgtgggtcacacgccgctggtcggacattggtcgggaaagcatttcggcaagggtttttctggccaaccgccatcaaagatgcatgcgacatggtccagcggtgtgaagcctgtcaattccacagtaaacacacaaagctacccgcgcaagcgctctagactatccctcttacttggccgttctcgtgctgggggctagatatactcgggccattcccacgaggacagggcggctacaggttcctattcgtggcgatcgacaaattcactaaatggatcgaagcagtacccacgggggaaatcaaggccgacaacgccatcaaattcatcaaggggatattttgcagatacggactaccgcaccgcatcataactgacaacggctcccagttcatcagcgccgatttccatgattactgcatcggactgggagtctagatatgcttcgcctcggtctctcaccctcaaagcaacggacaagtcgagagggcaaacgacatagtactacaagggatcaagacccgcgtctacgacagattcatgtcacatgacaaaaaatgggtcgaagaactcccatcagtactatgggccgtacgcaccacaccgacaacgtctaacaaggaacacccttcttcctcatgtacggctccgaggccatgctccccagcgagctacgacatcagagtacacgagtacagaagtattccgacgaggatcaggaggaatagcgaaacgtcgatgtgaatctactcgaggaacatcgcgaacgagttgccgtccgagtagccagttaccaacaggctctccgccgctaccacgaggagcgcatccgagcacgcatactttcaatcggcgactatgtcctccgacgggttcaatgccaagtagggcgaaacaagctctcacccaaatgggaaggaccttacacgatcacacaagttttgcggccaggcgcattaaaaattgcagacggtgatggtcgcgagttggcaaactcttggaatattgaccaactacgtaaattctatgtatgagtcaatgtcatccacacctgtaagacaccttacagtatcaatggagcctatttttaggcgcatattacaatcaaagtgttcctacccgatgatcccttacccagatgtgttgacagaaaacacgaggcctgggagatctgcttaactccagtgtaggtccaaagctcgccttctggtgtactagcgtgccagttgatttgatcccgtaatcaacaagaaataaaggcaaagaaaccgtggttaaatctataaatgatagccgatcggctaggtgccgatgacataacatttatctttgagccgatgtcatatgtgaatcgatcggcagttgtaaatagacaataaagaactaaatctattcgatcggctgtagatatttccaatatatagttcttatatcgatatatacttaaatcgagtgattgggatagatcggtcgccatgccgagacagtataaatcacttagatcgaaatatatattaataacagggctatatatgtttatagcatagccgatcagatagatctagcatgtatcggctaatactccaatactactctatatcaggatattaaaacagacataatatattaaacaaaggactaatatacttagatacagcaatatcttgacataaaggacagatttaatatgtcaatgaagcatatagagcaaatatagttagatcagataagatcggctgaaactccgatgctaccctaattggcaaccagaaggcatgttagagattgatattctaagcacgacttaatagatcaaactcgactgatgcaacattaagtatgaaaagaagaacaatatctagacaatcaagtcgctggaagtttcatagagtggtggataccttatataatctaagtcaacatcgatatctaacctaatcggctaccctctacagacagatgttagccgattgtagattagatagcggtattgccggagattatgtaagatatatgataactcgatgaattacataaacgagatcagagtgtcataaagatggaagcactaatcccgagaatacaagccgtcataacaagttttacctctcgttgaagatcgaaaccgatgcagctcaacctgaaagcaagaactcatcgaaacaaaactaaagcaaaagggtggcgatgcgccgaaattgtattgaacgtgtgtgtgtgttaaaagttacatagggctcgggtctatttatacccgagaatcacaagatatgtccataacagacacgactactatcttatcaaactctaggataccacaagtctttgcggcagacttttgcccaatcgtatctctaaggagattacataaaacaccctaattaatagatacaattgacttctcaggactctatccatgtgcggcaatcaccttgaagcacctcaatccaacccgatatcatacatcaagctgcattgtcggaatcggctgtatcggcttacctagtccgactcagacctagccgatgccaatcgcatccgatttggactccagccgattcctgctttgtttccgaactcaatctctgcctccgactttgcttcgatctaatcttctttcctgatgccgatgttaccaaatttggttgttaacaagatgacacctagcgttgaaacctatccccatgtccctttacgtcatcttgagaaggcctccgatgaacctaagggatcttctactggggacgcccagagccgataaggccttgtcagatcctgtagagacgaaagaccatgtaagacctggtcgtgtaagagttctcgccgtgcgtattaaccaagccgcgtaatcggaaattcactttccaacttcacggctgggggctaggatcagtgcttattcaaccaaggcaggtcaaaggtccaagaggcttatcctccgagaaaaatcctccgatgacaaggctgggggctagagagagtgtacgactcaaacgactaactaaagtcgtgaactgagaacacacccttacacacgatatccagagtaagaaggatttgttaagatagatttcttttctatttcacaaaataccccttacaattttacacaagttcaaagctatattacacttttccctaagatatccatcacagggtacaaagactaccaagaaggccaactccagtccatagactagaagaccttctccgccaacggcgccatcgactttgccaggtggtctatctccgccgtagttctccgagaacgagcaaaaccttcatggagaaactcgaggtcctgtcgcggacgatgatctcgtaggcaagccaacacgtgccctccggcatatcggctcgatcgacgacattcctgcttcaaggcttcgtcaatgcgtttgccgacgccttcgagctgagtacaggccccattcagccacgagatgtatccggccgccgactcctcaggatctccacg

SEQ ID NO: 24864 - DNA, 1859 bp, Oryza sativa
tttggctatgcatacggagctagacgtggtgttggcgatatcctgcagatctggtgaaggtacaaagactaccaagaagcccaactccagtccatagactagaagaccttctccgccaacggcgccatcgactttgccaggtggtctatctccgccgtagttctccgagaacgagcaaaaccttcatggagaaactcgaggtcctgtcgcggacgatgatctcgtaggcaagccaacacgtgccctccggcatatcggctcgatcgacgacattcctgcttcaaggcttcgtcaatgcgtttgccgacgccttcgagctgagtacaggccccattcagccacgagatgtatccggccgccgactcctcaggatctccacggggtactcggagctctctacaaaccttggccatggacgtgcagcaactcttcaagtacaagttgaaccatacctcacaacctcagagcgtttccacagcttgctctttctttacttccagcatagttctctcgagctccgctacttcaaatttcatcttccaatattggatacgacgatcttggccagcaagcgcactctcgagatctgttcaatatggaaacgactaagtcaagctgcactcctctttcgagaacacggttgatcaagtcggaggagcaaaaagggatgaagagaccactaacctaaggaagtcatcgccatccccattctcgcgggtaaaatctgatctacatcgtccggcgacgcgtgtggctcaaacgcaagagccggaatgatcgctggcgactcaggctgcccaccctgctggacatcctcgacttcaacatctctacagggaacaaaaaagtactcaagatcaaaatgctaaagcaactaaggtgatgactgcacgcacaaaggcggttggagccaattggagttttatacagcatgtcgaaggagtacaagagagtcaaaatcctactcttcaaaaagggggagaacagactcccccagatcaccgacttcttccatcacatccttatgcgcgtcgctagccgccccctattccaagatctcccgcagatcgagttcagggtgcgccagcctcacacacgcaaggacgtggcatgccccggtgtagttcccgttggacgtctcctctccgatcctggccgcatgcttggagggaatctcctccatcgccgccgccagctccgcaagagaagacgtcagcgagaactcattgggattcgcggggatggtagacttgataccgcattccccggcgagctggtgcagaccagtataggtgacccgcaacgagccacggatttccgataagttgttctcgagctccgacatacggtgctcgagcccctgccgttgtcgctcattcccggccaccagtttcctcatcttcttgaggtcctcacgagcctccgccaagtcgtgtgccagccggtcggcgcgctcgttcgccgacgacgacgccgccgccgctctcacctccatgatctcgcggccaatgccgcgagcaccagcctcgaggaggcgccacatctcaacctggagctcctcccaggtgaggacggcagccggcgaaccatgaccagccacgagatcgctggctgggccgcttggtgtcgcctcgtggctcccgggcacgaccacgacatccgtcgaggctacagcaggagacgcgctggaagtccctccagacccgtcctgcgccgccttcgcccgcgccgccctacaagaaggctgtggttcagacaaagttcgacgaaatcacgaaacctcaaattcattcactcacttctcgccgagtgtcacaagccgctgccgtcgtggaggcaggggagacgcgtccaaggct

SEQ ID NO: 24865 - DNA, 1394 bp, Oryza sativa
ccgcaacgcggcaaagccacggtctccacaacgcggccacggcgttctcccgcatgccgcacgccctcaagttgtcagagagctattaggccatttacaatgcaaagacgtggagttcagcttccacatgctagctcggagattcctctccacctaggcacttttcactccctcactaggaacggggagccaaagtaagcattagaataactaacagccacgattcatcaccgttattagatcagcataaaccaaacaaaacaagcagatgtgatgcgaccgaggcagctttattcaacttgtccagaaccacttctctaccgactatcacttttgcatgggtaaaattaactaggtaccacgggttgattgtacagtatttctcaatgggacagacatgccgaaacatcaactatttcccccactctcactactctccatctcaccgtctttcagaaccttggcaaaatctggcgttggagctgtcaaacatgttagccgtcaggtcccgtctcctccatgtctacagccacaagcatccatgccctctcctactcactgcacatcaataacagtttaagaatagtaatattgtggtgaaaaggatgctcactgctcaggcgatcagtgtacaaaccttgtttagagctcatccttgagaggctcggctggggccgactctgccttctccttcgcctgaccagcggtttccttgttcttcttaatgaagtcgacgatctcgtcggctgtcctgccgctttcatagggaaccatctttccactgggggtgacgaagtacagggtggggtaaccttgcacatcgaactcgcttggcacatcgttcgcagttgcatcctgcatacaaggtagcaaaatagtagttagatgaactgtacttgtgataggaaagaatggatgaataatgcactcaaaactaatggcaccacccagatagaaaggaaattaccatcttagcgatgacaacatccttgtcgcttttaagcgtcgtagctgcctcatccaagattggagccagcttcttgcagtgtccgcaccatggtgcatagaattcaacaaggactgaaacagaaaacagcaaataaatgagagctgcaaatcaaatagaggctttgccagcactgataattgaagaagctacaaaaaaatagcaaacttgcttttgaccagggaggaatcagtcgctcacaatactaatataagaactaaaaatcatctcactgaaaagattacgggggacaacagtatgtaccgtttttgccagacttgaagacaaaatcatggacgttatcagcgaccacaaccttaacaggctcgtcgttgacctcaggaataggttcagacttcctgaatggagacaatttaccatcctaaaa

SEQ ID NO: 24866 - DNA, 558 bp, Oryza sativa
ctgctcctcctgcgctgcctcgcggagggacaggttgaccgccagctgttgcgccgcggcctcggccccctcgagagctcgctcccgttcggtgagcgcgtcctcgcggaggcggagcgtgaactcttcttcggcgcaggcagcctcgtgcgccgccagcgttgcttcccggatggtgacggcgccctcgcggtccgccagatccctctccacgacgcaggcgcgctcttccagcgccatggcgcgcgcctcaagggcctcttcgcgccgccgggacgccgcttcggtctccgccgcccgctgttctcgggcagcggcagcgtcaagcaccccctgggcggcgtcgagcttcttccctagctccgcctcccagctcccgtattgaaggcggagggtgtcctgcgcctcgttcatcacggtggtggcaatgagggcagccccccgctcctcctccacttccttggcgatctccgccagcaccttcttacgagtttcaagctccgagacgtgccggcggtgagccttacggcccacctccaccatggcctccaccgagcg

SEQ ID NO: 24867 - DNA, 1504 bp, Oryza sativa
tgctcggaggagtggctgttggtgctggggcgcgtggggttgcggctgtggtggtgtcgcaagctcgtccaactcgaaccgcggcccgagggtgtgttggtgtcggagtcgatggaggctcggggactggggtagacacgcttggtgaagaagagctgcctactcccccagctctctcgaagtggacatactcgacggtgaagtcgtcgtacgtcagagtcgaaccatcgtccaccgtcttgtcccatacccaccctcgcccttagtcgaacactacgtcgtgcgctgtgcgcacacgctgtgtctccgggtcgaggatgcgataggccttcgagccctccgcgtagccgatgacacccctggggtgctcctgtcatcgagcttgctgatggggccaagctccttgacgaacgcgaggcagccgaagacccgcaggtgggagacccctggcttgcgcccatgccaagcctcgtacggtgtcctgccatcgagggccttggtaggcgagcggttgaggatgtagacggccgtcaccaccgcctctccccagaagatggccggcatccccctctgcttgaggagagcccgagccatccccacaaccgtttggttgcgccgctcgacgacgccgatctgctgcgggctgtacggcacggtgtactggcgctgaatgccttcatcagcgcagtacgacgcgaattcagccgccgtgaattcgccgccgttgtcggtgcgcagtacgcgtagcttgcggccgcactccgcctctgcagcagcctgcgcgcgccggatggtgtccgcagcctctcccttgctgccgaggaccatcacccacatgtagcgggagaggtcgtcgacgagcagcaggaagtaacgtcgtcctcctggtgtggccggtgtcactgggccacacaagtccccgtgcatgagctcgagccgctccttggctcggaaactcgtctgctggggaaaggggagccgcctctgcttcgttaggacgcagacgtcgcagagctgctccacgtggtcaaggcacggcaggcctcgcaccatctccttggcgctgagccgcttcagggcctcaaagtgaaggtgcccgaaacgctcgtgccactgccacgcctcgccgtctcgacgagcggcgaggcaaactggttgtgcgacctgcgcgctgaggatgtagagtcgattagtgcctctggttaccttggcaagaaggcgacggcggcgatcccaaatcctcatgactccgtgctcgaccaacacgcttgagccgttctcatccagctgtcccacgctgatgatagagtttctcaacgcggggatgtagtagactccggtgagcagcctgtgctcaccggacttggtggtgaggtgacggagccgacgcccttgatctccacgccggaggcatccccaaacttgacggagcctcggacgctggagtcaagctcggtgaagaactcccgccggccagtcatatgatgggtggcgccggtgtcga

SEQ ID NO: 24868 - DNA, 3401 bp, Oryza sativa
cggtaacccgattggaggaaagaaaatcgggcgcaactaagctactatatggctgccatattagtatactactttgctttttcaccactttatccatatatgtatacatgtggctatcttcaaaatttttttcctcctaaattacttatcggattttcgatccgatcgtactattatatttgttacaattaattttttttataataagagatcacatgattattttgctaaaatataatcatatgtttataaccgttaatactaaatgtttcatacgtaatgcgacatgtttcaacatatatttttaatgtattacacatgaaaaataaatatttcaatgtcttttttttcaccttgtatagcatgacgtttcagatgtggctggtaaagtatcggacataactacccctactctctcttctaccatatacttgctctctcttcattccattcatgcatataggcttgtagcaatctttgaaatatttttcaactaaattacttatccaatatataatccaaacataatataatattcattataattaaatctttataacaagatatcgcatgattatattttaataaaaaatatgtttcaaaccaataaaacacattgtttcatacgtaatagcgacctatttcaacatgtgttcttactatgcttcacaaattcttaaatgtttcaccatgtactactcaacatttcagtcatcggtcaattgaaacgttagaccgtctgattttttttttttaggaaatcagacgctcgatttgtagagggcttgaattttaggtgactggaaatttgtattttcaagagcttaaaatctagcaatacatttgaaaaggacacgactacatagtgcacattattggaagtaactacacttctaaaggagttaagaaaataaataaataatttaaatatactcaatattagactcattttatcacatattttgagcaaaatggatcttaaaagtaatataaggtctaaaaatatataggtcatcaaagattctataaaaaaacattatactagtgtaatgacatgttagcctcagtagcatgcacgtgaatcgacatgataactagcagatagtatgttgtcctcttttcctgtcaagtggtctcatttctttgactcttcgtcaatataatatttacgtgtccgtgtctcagtcaacatcaattgattgatcaatataacaactttcaatgcttagatagttacctctattgcagagctaagttactctacgattttactaaattacttttgaaattaagtaaattactttaaatgtttgaatatattaaatattaaatttgttttatcgtatattttgagtagagcacgatggtacaaacaaaaatgaaaataatatatgatttaaaatatataagtcatcattagaaaaagaatagactcgtgtaaccaatatttagtttcgatggttggtggtgtatagcgatacctgacgccacgaaggttcctcgctttgatgccattgcaatggaagcaagcctatctctccgacaacatgaagacgcggatggatggctggcggagcgtcgtgccataagacaaaatcaagaatgctctccatttagatttcccacttaaagaaatatccaaacgtaacttgtgcaatgtacgggttagagactagtagtaaattaactgctcctgtaattaattttaacatcatatcatctcatagagagcacggtagcagtagtaccttaatactacatccgtcccaaaataagtgcagccatggatattcgtgtctaacgtttgaccgttcgtcttatttaaaaaatttatgaaaaaattaaaaatatttagtcacatataaagtactattcatattttatcatctaatagcaataaaaatactaatcataaaaaattttgaaataagacgaacgatcaaacattgaatgtgaatagtataaaactgcacttattttgggacggagggagtaatagtttttctcacgcttttctccataaattgaagaaatgacagaaaagataatgcaatggaacgccgggctctccggcgaagccgacgcgtccggcagcacagcgctccacttcgccgcctcggcggacggaccaaagatcgacatcgagaacagctcactcctccggtggctcctcttgccgtgcccgttccaatgccgccggacaccaaccgaacttctcctggagaccgacccgtccttggcctgccagccggacggcgacggcgactaccccatccacgtcgccgcgtccgccggcaacctgaggctcgtcgccctcttgctcgacaagtgccccgagtgcgccggcctccgcgacgcccgcgggaggaccttcctccacgtcgccgtcgaccggaggaggcaggaggtcgtgggattcgcctccgacgtcgatggacggggtttccggcggcggcgatcctcaacgcgcgggacgacgacggcaacaccgcgctgcacctggcggtcgtggccggggtgctgagagtgttctggtgcttgtttcggaatcgcagggtttgcttggatcttgccaacaacgacggcctcacaccggctgacctggccaggagtaccattccagcgggtctttactccaacagaacggtacatcacttttacctcactagggcatgtacaaaaatagtgtccgatatggtcttttaagtaagacatattatttaaagaatatactgttacaatagttgagacaacaagaactcttaatcattaacgtaccaaaatatttttttactacccttcttttcttttctccaccctcatacaacaaaattttctttaataaaagttaagagttgactcttacctgttgtcatgtatagcaaccatgctttttttttctctcctctctctcttccacgttatcaaatttacttacatggcaataaagagagaccgctattatacacgtttgtacgtgcccttagatcaggccctttttaataatgtttttcttttaaaaataaattcacaacaattaaactattttatatcaaatcatgtaaatctgcattttgaaaaaaaaatagtacgaatatacttgtagtattgtatttttgttagaaacatggaacgaacataggcacccatagcacgcgcacacactatttttgtgagcatcttcaggactgagtcggtatatcttgagattgatgaagtcctctctattgatggaaacgccacctaccactaaaaaaataaaagcggtaaatacgagcccctttatcaaatctagaatttaaactagttcttagaaaaccacaccgtcaactaacttaactattaatattatagcacaataaaatataattaactttgatggataaacgaagggctgcagg

SEQ ID NO: 24869 - DNA, 719 bp, Oryza sativa
caatctgatctatgtgaggcagggggtaggaatccttaggacatgccttgttaaggtcggtgtagtcgatgcacatccgaagcttgccgtcgccttgggaacgaccaccgggttcgccagccactccggatggatgacctcacggatgaatccggcttccagaagtcgcgccacctcctcgcggatgaaggcttgacgttccagggcctgccgccgcactttctgccggaccggccttgcgcccggccgcacggtgagacggtgctcaatcacctccctggggaccccgggcatatccgccggtctccatgcgaagacgtcagcgtttgcccgcaggaaggagacgagcgcgtcttcctatttgccgtccagaagaccaccgatccgtgtggtcttggacgggccgtcgcccagggcaacctccttgaccgggacctcgtcgcctgtgatcatccgttgcctcggggtggcgggggcggaagcgccaagcctctcgtcgccaccctcgggcttggatgcagcggcgaggtggtccgcgcgctgctccagacaagcgagcgcgactttgaggtcgccatggacagagatggggccaccggggcccggcatcttcatctgtaggtaggcgtagtgaccgccgccatgaacttcaccaacgcgggcctccccaggaccgcgttgtagggcagactgaggtccgccacatcgaagttcacccg

SEQ ID NO: 24870 - DNA, 5634 bp, Oryza sativa
aacttatgcccaaatatttgtttataatttcaaataaatattttaagaattattggtggtagaaattttaaaagtttcaccatcaattaatcatacactttaagtaggagggagtaatattttttcattgcttagttttctttgccgagttggctgaaaataatcgactagtttttgctatatataaaggagaggagagcaacttgcgagccttttttttctcttctgaatagcagaatgattttacaatcactattcaacgtacgtacgttatagacaaacaaattaactgttataaagttaaaggaaatatgttttaaatacattcatatataatttaatttaaaaaaaaactagataaaggtccgtgcgttgcaaagaatattaaaagagataaaataaaaaataattagaagtttttagcatagttagttcattaagcatatcatatgatgccatatccaaagaaaaacatttacgtgtaaggaccatatgatttcgcatgttattttgtggcgttagagacggcatcatttaaaatttaaagtagtatagaaaatcgccccatgaatttatggagtatatataggagcttgaaagtgtgtcggaagtcggatctatcaattcttccttccaaattagaacagacccgtacgtataaaacaacattgttgttagttggcaccccccgttagaacacaaaacaccaaataagttcgttcgtcaatttacatgcctgaatttcagaggttgttgacacgagcgaacgtaagtaacacgcacaaaagactttaattagcgcatgacttcgaacacgcacgtgcggtctcgatcacaactcgcacgggcccacgtgcatgcacacatatagggtgtatttagttggggaaaaagaaatttttgggtgtcacatcgaacgttaatttcagaactaattttagaatgaaaaaactaatttcagaactcgcttggaaaccgcgagacgaatcttttgagactaattaagccgtcattagcacatgtgggttactgtagcacttatggctaatcatggactaattaggcttgaaagattcatcttgcgatttcctccataactatgcaattagtttttctttttatctatatttaatgctttatacatgtgtccaaatattcaatgtgatgtttttggaaaaaaaatttggaactaaacgggcccatagtctcgcgcgcgcgcacacacgaacacacttagtacacgaagtagtagcttgtatgcttacgccgactaagctgctgatgtcataattaggtttgcaaatggcaatgacgtcaggatgacatgtcacatgtcgcttgtgggcatatgcatgcgagtgtgggcggaatataatgcttgtccaactagagcccttccagaaggctacaatttcaggactaattctataaaaaatgatgaaagaaattactaatatatttagggtttgtttagattgatgccattttaaactataccattttaatagagttgttaaatatatgcatccatttagtttcttgccaaactttggtaaatacataagaaatcttatcaaacttttgacaatgccaaaatttgataaggtttattttggctacaatctgaacagcctcttggtgtgaaatttatgtgaaatttcgctgtgctgttaagggtgtagtagtggttgttaagttagtagaggagctttctacctggataagtactgctccctccgtttcgaaatgtttgacgccgttgactttttagcacatgtttgaccattcgtcttattaaaaaaatttaagttattattaattcttttcctatcattttattcagtgttaaatatatttttatgtaggcatatcattttacatgtttcacgaaagtttttgaataagacgaacggttaaatatatgctaaaaagtcaacggtgtcaaacatttcgaaacggagggagtatgtcgggtcctaatcgtgtgggatatgtatgatagaaggccgttgaaaaatgatcgataaaaaattaagaactaatttataggtaaaacttttgtatttactcatgatttaaaatccaatagtagtagcttttaaattttaaattttggttgtgcaggctgataaaatatcaagaaaacgacgagggacgtttttttgcacatgatgggtgtagacaaaaaattgtgaagcggagataataactacagaaaattcgagattttagcattattattgatttattgtgtggctcaaatgggagattagaccggagaaacaatgcatgccatggtcaagattgagcagagtccatggtctatatgcatttgttttttgaactgtggtctatgcatatatacatccaaagactactaaacttgtgttacacggttttgaacttggacaagtatatacaagcatgctaatagccagctagtgcttctagtgtccaagacacagagtttcgtcaccgtggagtttaattaggtctaaatttaggtcttcatggaacattccgttaaaggtgccttctttagaccaccttggttaaactaattttacaaattattacaatggctaaactgattaatctaatgttatatattttatctctttgagaaaactaaaattggaccgcattgcaagctaactagacgttttttttttgcaagctttctctattaattcaaaatatgtaggtcagtggcggatcgagaaaatcgatttattgatgtcataatatgtctattggtgttatagtatgctaattatatttagatcatgatgttatattatatggataagcagtttcgctataggttttaccgaaatttgtcggtgtcgcctgacactagatccgtccctaatgtaggtctcaaagcattctccgcttttcgtttttttccctaaaaagaacttattttgtactgtacgtggtttctttgcacttaattttaattcttttgttcatgttctattttccaataatcgcacccctaaatgtccatttttctctttgatttgatgatgactaaaatgtcttcacgtacgacttctactctcgtctttgatccatagctagtacacaaaggggacaagaagaagttgaataatccctttttgataagatgggtgaaaagttaagctgacgttgttgggttaggcgtgacagataaatgccaaacagagccgctcatttcgtaaagatatactacttgacttgaaatcacaagtacacaccaaggacaaagctagatggttagtgagatcagcagtcgagagaaaagacaacttcataagtgatattggaagataagtagtttgaaatctgaacctctgaacatggcatgaaacttcagaacagtttcgtgttgtcttcaagcttgcaaagactattcaaagttttcttaaatgagaaaaatatattctggccttctggggttcatgagatcgaacggtaggcacggcacaggtgtgtatcatcatgcgaagatgatttgattatttgattgttaatcacgcttaccaagtgttcctgccattcagattctgttggaaaaagcagaactacttctcacaactttctgttctgaacatcagaacatggacaactcatgctagagaacatttgatggagttgcaggggctggagctttcagttgaacttgtctctataaaatggcagttgaatggggctgaaatattgcaactgaaacagatgattttgctgtgaaggtaaaggagtttaggaaactgaatttcatcttgtcagtgacagtttaaggagttcagtttgctccaacatcttacctttggagcctcaaccgatagtggctgcaaatatgtggagatttaggccgcgttctaaactgggtttcagctgtactaattcatcgtttaaagtgagcaccctttccaaactgataaacaatatgttttgtggtaaaactttatatagataagtttctctaaaaaatcaaatgaatccatttttaaagtttacaatagataatacttcctccgtttcaggttataagactttctaaacatctatataaatgtggacaatgctagaaagtcttataatctgaaacggagggagtacttaattaatgctaatggcttatattattttttctgcggctaactagctatcctaaccgctatatagagcgcacccttacttggctagacatcgcatccaaaatctttggcagaacgagaaaagatttggttctctgtagtatctcatgttcacttgccaaacaaggatagtgcagagcagtgatttttaacttctgttcttctaactttctctgaagaaccttgcttggaagctgaatgtgtaagtaggatgggaccaaatcttcagcagttaataagtttcagttaagcaattgattactagttgtgaaatcttgaggacactcttgccaataggtagaatgttagcttggaattggatggagcaacgcttcactgatgaaacctggttctcctcatgcaattctcagcattcagtagtaatcatcaatcaagctgctaaacagaatagccatggcagttactacctcagtcctaaaatatataaaaatctataatcaaatgagacattttctagtatcagattcgtattactaaaaaaaatattccatccgatactaagttcttatatattttggaacggagagagtaagtcggaatgcatcaaacggatcccaatgaaattgatccgaatctacgagagcgcaagcgaatattactacagaatatcaggggttacatgcaaaaagttcttcttcccattcccctgaaactgaaaaagatttggcacgaatcgaaccctccaatccattgcttgcccttttttgtgtcctccagcttctagaaacttctagaacccaagtaagtccaagccgccgccgccgccgcctacagttgcttgcaagccgcattggcccaggtaacacgcccgcgatgtgctggtcattctggtgttgataggaattcacagttttgatctctctgctccattctgtagcctccaggtttggcgctcaccacctgttcgacgaaatgcggcaagagggagcagatgtgcgcggcagccacaagatcaagaagacgactgctgatgtggaaggcgggggtgaatggatcaacgccctcccggaagaggtcctgcagcacgtgatgtcgttcctgccggcgaagcaggccgtccggacatgcgtcctcgcccggcgctggcgccacctgtggaaatccatgcctgctctgcgttccatccatggtatctgaacaagcacgatgtcaggaacctgaacaggtttatgaattgtttgattcgctaccgggaccgcagaatgccactagatatgtgcgagatcaaaatcggtgcttttggggagggctgtggtgaaccacaggttgactcacttatcagatatgcctctgttgcgcaaagctcggataatgaaggtcgaattgcatgagcacaacgataactttttctcatagccaagttgcctgttatctcccagcgcttgacgtaggttagagattagtaatgtgccattattatgtggttttgttgattctttgagcttcccagcatggaggccctatg

SEQ ID NO: 24871 - DNA, 4948 bp, Oryza sativa
  unsure (1)..(4948): unsure at all n locations
accaaataaccggcaaaaacatcttcattttttataatagtaaagatttagttcatgttttgagaaaacgaaggtagtacattttattaatctacattcaggaacgaatgaatctaaaccccgaatcatggctgattcgcaggacgaaagaccatggtgcatggcttatggttcacccctgcctatattgccaaacgtgattatgatgggtgatggcattaaagctactgtctctattttaaaatatatgggattttactcatgtagttatacacgaataaaatcgtttaaattttaggactttcaccaggttgctgcctgtttgacacgtacggctacccagagcctggaaaaacccggtcgtccgggcagtgagttagtttcgacgtaatgggcctagagtgaaagcaaaatggacgatccacacaggcctagggccattagcaaatacaacgccaattattcgtggatggatgaaaattgaggcccatcaaaacacgtgggatggcctggaatggaataagttcactttaggtctcttaatttgttgccggtctgattttcgtcctcggtcgaaaaaaccggatataatgtatcgcccaacttataaaaccagtgcaaacgagatccctcagcagtattgaccccgattctggctaacgtggtgcttacgtggaccttttaactatgtcttcgtcctacgtagcattgacgtagcaatctgatatggaaaaaataaaattgaaaaattaaaaattacaacaaaatatgtggggccatatgtcagtcaaacaagaagataaacatagtgggacccacatgtcaatgggtcccactacctccacctcacccccctctctctatctccctccccctcgctcctaatgggnnggtcaacagcgagtcggcgacctgcatatgcatagcggcnnagcgtcggaggtgccctagcgaggcagcgaggagnggagctgcagtgtccagcatgtggagaagaggatgtaggcgagggagcccggtgagctcgagctcgccatcccggctcaagcatcactaggcgttgaaggagtcggaggaggaggccgagccatgtcgagggccaccactagcagcagtgacggaggaggagaaggcgtgggtggtgggaagacaacgatgacaatggggtcgaggccgatggtgcctatgggcgagccctggtagatcggggggggtggattttctcgacgctggggagaggttggcggttggggggggggcgtcggcagcggtagaggggggagatggcggcatcgatgccgagagagacgtacaacagagctccttgccggggacggaagtggagaggcatcggcctggtttgtagaacgagaagggtgtgtggcggatgggcaagtgggtggcaaggagacaacgtagcaggcgagctagttaagcatcaggcataacgaaccgatggcgggcagtgaccttggcgaggtgaggaaaccatgactgttatgagggcggcgctgcggtggtcggccaactcggcgtcaccgatggggttggggagcgaggagggccacagaggctaacagagcaccgttgtcccaagctctcccgcccgatggcccaagcgacgaacaacttataggtgctcgccccccgcccgctgttggtccgcccactgcccctctgttccagctgccgcccctgcttcgcccaccacccatctgctccactcgccacccctctgatccggccgctgccgctcgcccttctccttgcagtgcatgggagtgaggggggataaagtgaagaggaaggagtgaggatgacgtatgggaccatatggacccccatcttttttttattattttgtgtgtaactgacatgtgggtcccactatttttattattttccgagatcgaattgccacgtaaacatcacgtcaatgtcgcatgggacgacgacctagtcaaaggagccatgtaggcgccacgccatctaaaaaccgggcacaatactactgagagacctcgtctgtatggttttgtaagttgggggatgcattccggttttctggactgaggatgaaaatcagacttgaggacaaattgagggacctaaagtgaacttattccatggaattaagcctgggaacggatgaaccgacaaccatgtcaccaaaattatcgatttgctacaattccacaaaagaaattaaggttttactatttcacttgcgatagatttttgaactcttatcttttgatttttcgtccgtaggatcttgtatcaagattcgtgctcctataaatccaacttgcaattacacttagttacatagcactacttaattacaatacaccaaaattagattttataactactagcatagcatattgtccatgcattgaaacaggatctaattgatgaaaataatcgttaacctattattatcattattttccgtactattaaattctacatatttgtaaataacatatgtgcatatggcctcacaatatcactttttcttcataaaaaaatagagatggtggtgggtggggtggtggatatgtgggtcattcggccacacatatccttttttcactcaaaagaagtagggagttgttggtggaaccccacgtgtcattttttcattctaaaaggtagagagttggtggcatgggtggtggcacattcaccgctaactaccaccactgctattttttttaaaggagtatagatttttttcttagattgaggaatttttattaggtctctttttttattttatttaaaacggaatgtatctgttggttgaaaattccataagatttaaagctccgaatctaagaccctcttttgtttaggctaggcttattggcctagacttttaagtcagcttattggcttatatgatttataagacaatggatttaatgtcctaagtttagtggttgagtcatacatctacctcacataagccaaaaatacctcacataagccaaaaaagcttctccaacctagcttttggcttaatagtgttaaagtggcttgtggcttcaaacaagccaaacggaaaagctgcttgtttgtttaggtttagacttttcgacttataagttggcttataagtctaaacaaagaggacctaatattaataggcagtccaaaagattattacaataatagttgaacgttttgttataaaaaaactgaaaatttgtttatctggtaggtccgggttgcaccttagacccgcaaagttaaaattgtagtgccgctgcagttttgctaaaagagttgtattattttttttaaaagaaatagtcttcataattattgtagctctttgtctttttaggagaattgtcatggaagggattttaagccattattccattcattcactttttatagcaccggtgcatctcatttaactttttgaacactgtcagatttttgcacagttgctagtagtacgtgaggctgtttgttgatagccacccttgtggttagacgagtttgatcatattaaacgtgtgtttggttgacaactataagtgtgggtaagattacttcactgcaaactgaggatccatgcctaagagcatctcctacagtctcttcaaatctaactctccaaatatcaatttggccaactctctatctaatttagccagtcaaactcttatttactccaacagcctctctattcatcctctctattatgagcctatgatagggggacccacgtgtcagtctttacaaccctttcttcttcctcatctatccccctttccccaaacccactctgctcagctcgcagcaggtgctgccgccgccgccgccaccgctcggggcgagctcgcgtggatgcggggtggccaatcggctcgggcggcgaacacgatgacaggagtgagatggcggcgtcctctactacatgccgcaccggctgaatccgccggggcatggcgatgacgacggcaggcgacgatgacctcggctggcgacggatctggcgacggcgccgacaacggctggcgacggcatcgacgacggctggtgatggtgcggcgtccggcaatgacgacctcggagatgacggttgacgatggcgccgacgacggctagcgaggctcaacgacgacctcgcggatctggcaacggcacgatgacggcggtgttcggcaacagcggatctggcgacgacgcgacgacggctggcgacggcgacagcgccgacgacggctggcgacggcggcgtccggcaacgacgacctcgacagcaccagcgatggcatctcgacgacgacggttggcggagagagaaagaggagagggatgttgttggcgtggggcccacgattggctaggctattttggctggccaaatttggctagtggaaggaggactttggccagcccaatagccagtctgttggagggtgaaattgagccaaaatttccaaaatttaacttaaagagagggataaggagaccgttggagatgctctaactggtcttaaaaagtatggcatggttttactttgtggctaaattgtagctttgattttgatggcaaaatctttggtgagcttggacaaaaaggtttggcaaatctaggcagatgaaccttgcagattgtgacaatctcatgtgtccaatgagaatgatgatgtccatgctctgctcccggaaagaagaggcaaaatccaaggagaaagaaaagaaaagagagaaatctactgattcgccgcagcagcacatggatatggataagctctgctgcgcactgcccaaataggaccatcatgtctgggactttatatccttaccctctgttcgttcgtcttagagcagttacaatataagccagctataaatatattttaaagagataaaataatagcagactataagctaactataaacatattttaaaaaaataaag

SEQ ID NO: 24872 - DNA, 607 bp, Oryza sativa
tcaagagccaggccctcgccgattttgtggcagagtggaccgcggctcccgagcccgtctcgatccccgaggccagcgcggacccctcgcagctgcctcacaccgaccactgggtgatgcagttcgacggctccctgtctcttcagggcgccggtgcgggtcacgttgacctctccgagcggagacgtcctcagatacttggtccgcctcgactttcgagcgaccaataatatggcagaatacgagggactccttgccggactaagagtggcagctggactggggatccgccgcctcctggtgttaggcgactcccagctggtcgttaaccaagtctgtaaggagtaccagtgctctgacccgcagatggacgcctacgtgcgccaagtacggcgtatggagcgccattttgacgggattgagcttcggcatgtgcccagacgggataacatgattgccgacgaactctcacggctcgcgtcctcgcgagcccagaccccaccatgcgcctttgaagaaaggcttgcccagccgtcggcgcgacccgaccccttagggagacggatgcgcctgaccggcccctgaggcctgtcggagtccaggcctc

SEQ ID NO: 24873 - DNA, 949 bp, Oryza sativa
gctggtgggtgtctacgtcgacgactggtgatcaccggcaccaaggatgcggaggtcgcggcgttcaaggaggagatgaaggccaccttccagatgagtgatctgggcctctctccttctacctggggatccaggtgtaccaggacgactccggaatcacgcttcggcagaccgcctacgccaagcgcgtcgttgagctggctgggctcaccgattgcaacccagctctcactccgatggaggagagactgaagctgagccgcgacagcacggcggaggaagtggatgctacacagtaccggcgtcttgtggggagccttcgctacctcacccacacacggccggacttggccttctccgtcggctacgtcagtcggttcatgcagcgaccgacgacggagcaccagcaggctgtgaagaggatcatccgctacgttgcggggactctcgaccacggtctctactacccgaggtgtcctggcaaggcacacttcgtcgggtacagcgacagcgaccacgccggcgacattgacaccagcaagagcacgagcgggattctcttcttcctcggcgagtgcctcgttagctggcagtcaatcaagcagcaggtggtggccctgtccagctgcgaggccgagtacatggtggcatccgccgcttcgacccaggcgctctggcttgctcgactgcttagtgatctcctcggcagagatactggagcggtggagctcagggtggatagccagtccgctctggccctggcaaagaaccccgtttttcacgaacggagcaagcacatccgggtgaggtaccatttcatccgaagctacttggaggaagggagcatcaaggcgagctacatcaacaccaaggaccagcttgcggatttgctcaccaaaccccttgggaggatcaagttccttgagctttgctcccggatcgggatggc

SEQ ID NO: 24874 - DNA, 504 bp, Oryza sativa
ccgtttttatcaggcaaacattaacttgcatttattcgtttgatattctcgaatgtgtaaaataatttctttccataatctagtgattgttgcgatatgatcttccattataaaaccaccatattcccctttctttgaactcatatcaatctaaccatttcccatcaatccataggtgcagtcttgctagaaagtggtgaatcgtgaaggccatggctcgcaacaaggtgaagttgcagcggatcatcaatgatgcgaagtggcgggcggcattcaagaagcggctcaagggctagaagaagaaggcaagcgagttgtcgacactatgtagtgtggatacatgcctcatggtgtatggtgagggcgaggtgcaagcaacagaggtttggctgtcggtgcaggaggcgacgagggttcttgagcgcttcaaggccatgccacagctagacagatacaagaagacgatggatctggatggcttcatcaaggagcgcaccgacaagc

SEQ ID NO: 24875 - DNA, 660 bp, Oryza sativa
aatttcgtttgggatttttgattctcgcagttcttgagctcgccgggaacgcggcgcgggacaacaagaagacgcggatcgtgccgaggcacatccagctcgccgtgcgcaacgacgaggagctgtcgcgcctgctcggcgccgtcaccatcgccaacggcggcgtcatgcccaacatccacaacctgctcctccccaagaaggccggctccagcgccaaggccgccgccgccgacgacgagtagagacgaacacagattcctcactatgacgaacactacatgcttccttccgccgatggattagacaataggcatcctgcttaatttagtttttaattgtgcttgtttcgtagacaagggattagttgctctgtaattggtgttaatttatatgaaatagtgtcatctttctcgatgacttttgtcaaaagaaattctctccgggtgttcagattttccaggttgatttgaatgcgttgtctataaatcgtggtaaatgtttcttgatttttttaactcttgggactttttttttttgaaacaacaactcttgggaaattgggttgttgtcaaacgtcgcgtctggtttttctagagttcgtgcgttctcagcgtggtattcaaattgagacttgatttggttctcaaaattgttgga

SEQ ID NO: 24876 - DNA, 790 bp, Oryza sativa
ccacatcgacctaccggtcacctttggtggatcagcaaactttcgcacggagcgggtgaacttcgatgtggcggacctcagtctgccctacaacgcggtcctggggaggcccgcgttggtgaagtttatggcggcggtccactacgcctacctccagatgaagatgccgggcccttgtggccccatctctgtccgtggcgaccttaaagtcgcgctcgcttgcatggagcagcgcgcggaccacctcgctgctgcgaccaagcccgagggtggtgacgagaggcttggcacctccgcccccaccgccccgaggcagcggattgccacatgcgacgaggtcccggtcaaggaggttgccttgggcgacggcccatccaagaccacacggatcggtggtcttctggatggcaaataggaagacgcgctcgtctccttcctgcgggcaaacgctgacgtcttcgcatggagaccagcggacatgcccggggtccccagggagttgattgagcaccgtctcgccgtgcggccgggcgcaaggccggtccggcagaaagtgcggcggcaggccccggaacgtcaagccttcatccgcgaggaggtggcgagacttctggaggccggattcatccgtgaagtcatccatcccgagtggctggcgaacccggtggtcgttcccaaggcgaacggcaagcttcggatgtgcatcgactacaccgaccttaacaaggcatgtcctaaggatccttacccctgccctcgcatagatcagatcgtcgattccactgcgggg

SEQ ID NO: 24877 - DNA, 7259 bp, Oryza sativa
cctgattctttttcatctatttccatacaactcttgctatgtttctccttttgtatgacacctgcatagaaagaataatctaagattgcaaaagaacttttgtatttctaaaccagcaagttctaaaacatagagtgtatttcccattctttttcataagtccatttacagtaaacatatatttgtattacagtgaaattatactgtaattccagtaaacaaaaactgtaactacttaaaaatccaactacaatcaatttgataattgattatagacactgaagtgaacaaatgaatcagtttgtataattctttcaaaataattttaatattacactaagtatgtatttcaattacagggtaatgctactataattcaagttaaaatttactgtaacttttttacctgtattttttccttctatttccttagaacttttgcattctttgtccttttgtatgacacttgtaaagaaataatcaagcaagtctttaaatgtttttcaaacctgtatgagtctgttccataagtagtattacagtaaataagtatttcaattacagtgtaatgctactgtaattccagttaaaatttactgtaactcttgttacctgtgttttttctttctttttccttagaacttttacattctttttccttttctatgacacctgcaaagaaataatgaagcaagtctttaaatgttctatatacctgtatgaaatgtgatttctaattgttctgtgtacattgccctggatgcttttctaaatggcaaagtcagcgaaatataaaattacttgttaatatgacagttattaactgaatcactgtcttttattaaaaaatcacacatcaagaaacactaaactactgtcctttatgttttcttaatcatatttcagttgtgccaaatatgaaattattcataaatcaggctatgatttatgatctttttaaaattcatatagtttacatcatctgttttcctgattgtgactatgcttaactatgatgacttgttctaattctagttttacttttcacatttaaaagtacattgtatattgtagttttttggccagatgatgatcaataaaatttgaattgaaaaacaaatcaaaattttgcacgtcatcaggcaagaaaatcaatcatcctaagtgaaaagaatgatttaatttcttgtttgatgatgtgcagaattttgaggtgtttcttataatatctgatggcactttttcttttctatttctttgtactgttgatttgatttgagcagtttgcaaaatattttgtatttttgatatatatttgtgttaaaaggatgttaaatcaaagtttagatttgaacctgattccactttttgcatgtccatagaattgttcttttccttttccttgtttcctttgaatcctgtaaataatgaaatgagtttgtactgaataatgtattagaactgaaagtaaaatataatgaagtcaaaagaatgcataccttttgaagttttcatagatatgaattcatttggcttctgcacatgaccaactttgaagtagtgatatcctgttctttgcttgatgaatctaaaatcattttttaaattggaaatgaagatgcattagttcatgaaatcagcaataaaactcatatacaattgtgttaagagacatatatattgtgctgattgtgatatctcctgtacaattgtgataatactaatgtacaattgtgttagactgtcctgtaattagaatgaaaaacaaattgattttaaatcttcaaaattgattttgaaagtagaattttcagatatgatttgttttggcttttacatatgtactacttttgaagtattgataccttgttttttgctcaaaaatctgaaatcatcttgaaattgagattgaaactgcattagatcttgatttcgtatgaattttacattgtttctttgtagttacatgtatgttcaattgaaattgtagtgttcactctatatatttgtaatagaagttcactgtaactagtttcattatattctattttgagacattgaacaaatcaacaatgatctattatctgaaatcttcatttgttgtctgatgatgggagaaacattaaactgagatagtcttgagtgtaaaacatatcttgaatgtgttcctgaatttgtgcatgattgtgtgagctaaacttttctgaactaatcttttactacagtgagttaatactagaattacagtgattcttgtatgtaattttattacttttttactgtaacatgtaagaaatttgtgagttcctataaattggcttttttgtttgtgctgtatgagatcttgagctttatgaaatattgagttgtatgagacaactggttgacattgagaattgaatttgtcattagtttaatatggtgattatgctgataaaattgaatatatcacaattcaggatatgctatatggcctagttgttatatttctgtataactgtataactgtgatatcttcagagtaaaattcagtaaggttggaagtctaatcaatctgtcatgtttttttataaagttagtttggtattcatcaatagtacacaataatacaatcatccagaatgcagggttgtagtactgaatgcaatttaggcttacttttaacaatacatagttcatatttacagagcaaacatataaattgacagtgctgagttgaatttatccagcaaagtggaatgttaagtactgattcatttaccttgtttcatttgacatattcagcaatttcttgtattcttttgaattgtatatttgacctaaactctctctttattcttgttcaggatttagaatttctaatagaggttaagaactggagccttgaactaacctttgaactggagccttcttgtttctcttaatcttgccttcctcttgtttttcctctgcgttctccagatgttgtgtttcctttgtatggatctcaactttctgttcagaagttgtctttgatttcttctttcctctagaactactctttgattctgacattatactctccccttcttccatctgcgatttggatcctctttttctctcttttttctcttctcctagctccatgtttgattcgtgctagatctgtttgtgaactagtagcgctgttgaaaagtaggggattgaaaagtgtggtcccatacatggttgattcacgtgacatatttttcatctacttggcttccaagtttggtccctactacttttttgcttctaattttgtatcttgggcctgctttttactaacgggctattatggatctggatatggacttgggccttcaaataattggcatgggcgaaaaaatcatgggctttggttatttgtgtgtgattcaaattttgtatcttgggccttctttttactaatgggcttttatggatctggatatggatttgggcttttatagatctggatctgaatttgggctttcaaaaaaatggcgttcaaataatcaaataatatatctgtttttaagtgtaatatttatttgtatcactttttctgagttgttggatgtgcatcctatggtagataaaatctacatgattggaccttcagaaatcattcgattcctatatagacagccccaattaaaaaacggttcggtttctgatacaaatgaaaatttattcgcaggccactttgcatgcttatcttctgaaatctttcttctcttactattggatggtaatttctttcgcactctttcgatgtcattacaaagtaataattacttcaaatctaattgcgtgccactaacatcactagataattcgttacaaagtattagtaatgaaatctgatcttgcctttaccttttctacagagaaagagagtctctgtattcttgaatgctactctactactgtctttcttgctgcatacatgcatgcatttgacaaaaaaaggattttttttaaaaaaaaagaaacatcagtagtacgtacaaagaatcaagcaaaagaactttagtactggtattaactgtataaacggatcaaaatctaagattctagatagctgcctagtaattaactagcagcagctgatgctaacaccagatatactagaaaaatctctctgataacagaagaagcgccgagttaatcggttaataagcaacagctactccaatacagttgatgcatcgcactggaagaagaagaagcagcaggtactcatgtaaatgtaataacgtttgcattcagtacgcaccgagggaagacaagatgaagcttcccaggtacatgctctgcccttctgcagtgagttaagaagcaggggtaggataagaagaagcgaccaccccaacagacagagttactctacacaggtaagaacagatctattccgatgacgacgggcggggacacggcggccggcaaatgactggcagacagaacctgtcgaaggcatcaaaacagatccacctccgaggtccgtctgggctgtggctgtccataatcttcagctgaagctcttctccaatcaaactcttcacgaacctatactcaaaacagacaactgcgtgccaggccgccttacgggcaattattgcagactcgggacagcctctgtacactcttttggctcgctgttttgcatccgcccgataagagaagtagtggggtgggttaaccgccagtgcaccaatgatcggccctctctgacgaataagcctggctgtctctatggcggtcaggggtttgacatactccgtcagtctgagcatctgggtcttgtaaggtccaggatacttattcaaccctaccacggggaggaagtaatcatcatccatagtcggcagacctcccatgccaacaacaacctccaatacatgctcaaccttaccaccttcttcggggttccatgcttctttctttatgcattccatcctcagagtagttggaggtacctcaactctccatcggaatgagcctgagccatggagcctatcgtaaatcatccgatgctgagcttcagtgcatacagtgcaagcagacaatgaacacccacctgcaaccacacatcaatatcattcatctctgtatctgctgtcatgcaagttaatttaagcatccatatatactatcagtatgattgattgggagcttctcacctctgccttgaacagcaggtgatccgacaattttctccagctccatgtatctggtaacacgagcccagcaagtgtggtaccagtcttccatgccagccatcttacagcttggttgcaccagcgccatggtgttaagtatgagatgcaagcaaactcggtgtcaaccttcctaatgcctcctccaccaaaagcatagtctgcggcccttcagccctctcattatctgcgcccatcataccattgtctccgccgattgggaaactggttccacttatctgagaaaagaacacaatgttaattaaattctccataagattagcacaatccatttcaaaaaatattaccacgatgttgcaattatgcccatgttagaaccgaaattaaaaatgttttgtttactgccagaacattttctggagaaacacaaacgtgcccctggtgcatgaaaactgttaccagagctactctatgtcagatttgcaaatattgaaactattggtttatcaattatggctaagaaacaggattatgtaaaattacatcagacatggtttcatttaagctaagtaaaagaagaaagttccacacattcaagaacatgagtggcaaatgtcatgagatcagtgcatctgtgaacatatataagaaagaaaaaactttgaaatttgatctgtataaataaccacaggctaaaatgatgaatcaaatagaaggcatcttcataattacatggagaagcctaaaccatgtaaacatgtcattttcttgtgtgccaaataatctgaataaacgtgttggttccagcactcatagactagcattattgataaaatgtcaatgggatttgcagcactaaaaacttgaacctacaggctagagactccttatggtttttttttttttgaagggaacctatggaaataaatgatactaagaatttcttcccgcataatgaaagaattgcaacggagagcagaacaaatacaatttgctcaatctgcatcctctgtttcaagaaaacatcaacagttgatccccaaacaacggagatgctcgcacgaaccatatatacaatgcatcatgtcctatgggctgcagcaaagaggatggcatatagcaattcaatacaatttgcaaagaacgcaaacaatcttgaacatcatctagcacggtgctatctaggacatagtaagagaatgacaatggcgatcagatgatgttaccattttcaagaaccacaccgaaataaatttggagaggaaaattcatagcgtgtacagaaaatttaagtaaacagagagagagaacgatattttaagcaggtgcgatgatgactttttgatcagctattgttgcaccttgttacaatgaaataaaactgaaatctcagctttcctctagcagaacaaaaaactattaagggaacataaaatccctaccgctaacaggaaatgaaaatttctaaatatattattctatgcacttgttcttttggtaatgtataagctagaagttcatggtgaataatggtaaaaaagggaattacttcacactaggtcttttttgggggaataacaaaacaagaagtacacttgatagcgtggtcatggtggagttcttcaagggtacagttgttaccctgatcaccctggaagaaccaagtaaacggagctgctgcactgtgaaggaagcaaatggggaggagcgagaattggatagcaacctaagaactgcccccctacgaatgtaacatacagaattaaaatgcaactaagaattcgagacattggtaacatcagaagcgaagaattttttgcaatctgcgttcaagaggacatcaagaattgcctcaaagaacctaagtcatgcaaatcaattaagaattagctagggaagggagtgctcaccagaagatttggttctgaaactggaacggaacgcagggagtcttcggggggatgacttgcaccacgcaggacgtactcgtgggagcggccaaggcatccagcagactcgtcccccgatcccaagacgacggtgaacaagccgaaggcggtgtaggtcgcgcagggtgac

SEQ ID NO: 24878 - DNA, 1840 bp, Oryza sativa
ggcgctcccgctccggtgagggggagagaggcgcggggctcttggttcttggcgcttccgctccgctgagagggggagagcggaggagggcggttgcgacagttacctcccggcgcgcaaggcggctgcaatttgaagtagctctcccgttagctgacaggtggggccgcacttcctcagtcgctgacagtgggcccacatgctccatgacgtccttcgtgcagctgcaggctgcagcctgcaccacaccagacgccacgagctcaccgacgtccacggcggccagcagagcactccagcagcgtcgtccagtggcgccggtatgtgcgtgcagcatcgtaccggcgcggcggcgcccccgtccccgtggtatcgcatcagaacagaaagcaaagcgaacgactccctcccagtcatttcaacgaacatcatatgtgcgcatcgcaggtagaagagaagaccaccatttgtctcaaacaaacaccgccgccagaagagcttgctcctcctctccttcctccaacaccaatcctcaatcttcaagaagaccaaccccgccgttgtcctgcttccctaacctcatctccctgattccctgattccctgatcctatagctctggacgccggccaaacaccttgtggccgatctggacccccaactccccttctccctgctctgcatcccccaagaacctccgacatcagcgcaacataggtaaggtaaggcttcttcccgacgatgacgacgacgaggccgtgcttcctccgcgcggtgtgcctctgcttctcgcaagggaagggagagactagaagcatgggttgatgggaggagagatgaaggaaagtgagaccgacatgtggctcacattcctgatgattacatctttgcacagttaaacccctcccgtacttttcacttatctctattcccaaaccaccccctctctcactcggtcactccctccaatcctagaaggggggcaattttcacccgccaatgagcggggatggggacccgcaaatttccacaaacaggggtggggattgtcagctaccctcgggtgacccagcggggccctgggatattagatatgccttaaaaatatagtccattccaacaatacaagcccagttaatccaataagtcactcatataaaaactaaaccctaattcaccaatcccccatcccctactcccactcccctcaccatcctccacaactgtcgttgcccggtcgtctcctcgtccccttcgcctccgctcgtcgccgttgtttccactccgcctctactcgtcaccactccacctccacctccactcgatatcgcctgtcactacactgcctccgctcgtcgttgccatttccgcttcgcctccgcccgtcggcacaccgccacacggccgcgtctccacttgccgcctccttcaagcatcctcgcctacgagtgcagtgggcccccggaggggccgaagatggggatcgatttcaacccgccctccactccgaggttggggccgggtggacccgcagaggagcggaaagggggtcgttccagcccaacccaggcctaccctgccctgttgccatcgctacccaaccctccaaaaaaacataatggaaccgctaaccttttgtcgacggaaaatgcatccccaaaacttgtagattgtagatttagatcactggatgtgcttcataattcgtgctccatgtgcgtcttctccaactccgatgacctcctcttcttctccggcgctggtgacaacccaaacttcagcagagggccgacgaattagggtcccggggtggggtggggatgggaggttgggaggggaaa

SEQ ID NO: 24879 - DNA, 3746 bp, Oryza sativa
attgaggggagaggggagagggaagaagaaattagggttaggttttcactggatgaatcttaaagcgatctaacagttcataatttccaagattttaaggggtattttctatcaaatgacatatagacagtcccaaaaaataattagaaatgtcaaaatagtataaaccacacccaattatcacgcttgttttgaaatttcaccttataacctatttagaaaattatcacgtacccctaaatttttacccaatatctccctctcccccccattttactaactcttttacatacccttgaatattttgtttagatcccttccctaacctttccgttaattgattgttaaattcataccattttgtgccctttactatgaacaagctggagtcggactcatcccatagccacgttcgttgagcccaccctgactgaatatgacttgctatgaatccatgcggaaagaaatagagaaaatcccttgtatacccatgaaaaaacttacctaatctcttctataccctccaattttactcgatctcctgtgtacccccaaattttcactttggtcccctccatacccctcccgttaggtttccgtttgatctgtagcgtgacctgtgtgttacattgtcagtattttcaaaaaataccaaaatgcccctgccagccaaccctaggtaaacagatccaatctccttctcttctccccccatcctctgcacgccgccagtctccaatcgcgcggtggccgccgtcctcccgtcgcgcggtggggcgccgctggctcccaccccccccggtcgtgcgcgccgctggccgctgtcatcccgtcgcgaggtggggcgtcgccagccgccaccctcccgtcgcgcgcgccgccggccgccgccctcccgtcgcgcggtggggcgctgcgggccaccgccctcctgccaccctcccgtcgcacggtggggcgccgccggccgccgccctcccatcgcgcggtggggcgccgccggctcacgccctcccgtcgcgcgcgccgccggccgctgcccttctgtcgcgaggtagggcgccgctggtccccgccctcccgtcgcgcggtggcgcgccgccggccaccgccttccagtcgcgcagctgccgcccatagccctctgtcgcaggcaccgccggccaccgtcctcctgtcgtgcggccaaagtccgataccctctcgtcgctgcgccgccctactggtaggagtagcagcaattttcatttcttcttcttgcagttttcatttttgtttgctgttgtgatgccttacaaagtgtttgacatatttgatctgtcatttgcaacatttgtgtatggagtggaaagttggtttggttcctgcactattgggtatggaaatgaaattgtggtatgtgcatcatatgagctgttctgtatggatgataaaaatgaaattgatatgaagtgctctgtatggatgatgaaaataaaattgtatgaaatttatatgaagtgctctgtatggatgatgaaaataaaattgatatgaagtgctatgtatggttactactattttgattgatgatctatgatgatcttgatgctcttattgatccagattattttgtttcacagattttctcctttgtccacattcctgttgagtgtaccaattttttttacacagcaaactgatgtcactttgattttccaaccctattattttttttcaaaacaaatcgttcgatggattgcattttttttccaataccacaataaaagttttaaactcattattagtctcataaaatacacatgttgtgcggtcaacatattccaattcttttccaatctacctgcagttgctcctccatctaaagggcattatagacatttgcaaccacacataactataaaatgaagaaaacctaacgggagggcatggaagggatcaaagcgagaatttaggggtacagaggggttcgagtaaaattgaaaggtatagaagagattgggcaaatttttatgggtacacaagggattaactcaaataaatagaccgaatcagttagttgcatgtgtaaactatgatgggagcaatttcaacatagtagtattaggtgggtggtttttttttacataaaatacgttatgggatagaatttgaaaacaacactgataattagggtgttttatgtaatttcgccttttaagttaggcaatttttttgctttaacccacaaggaataagtccaatttaacttcatcaaatatcagtccgatttctgattcatatttctcaaatgaaaaaccggatatatcgattgactcctataaatatttaaatccatgcgaaacaataacttttgacatgaaatatatacgaattcatgcatgcacgatgaatgaatcaatatatatttacgacaataacttaagtttctgaatcgacagattaagctcatccttgtgctgctgctttccgcagtagaattcggctgggtgcagaacgcgtccgggcgggcagaaggcacaatcgttgccattggcggcggcggcggtgagatcggcatcggccggcagctgctggagcacggtgcatgtgtcgacgaagaagctgtcaaggacatagggggtgaagcggagctccgcgaaaaccaggcaacgctgcttctgccagtggctgttcctcgcgcgagtgcgagccacgaagttgatgtggaggtagatttcgcctctgaatcgggcgcagcaggcgttgatgggaggcggcagggggatgagcttgctgtcctccacgggatcgaactccaactcatcctctgctctgctgcagaagaaggcgtggtaaaaggggaggacgtccatgatgtactccacgcgccgctctttctccgtcactggcatcgtccttcttgtaccccgacgaccaactgctctcaaaactgaactcctcaccttacaacaggcttccccggccatctccaataagattgcgcatgacaaacctgaccccattgatcgatcgatccaagagttttggttttcttgtttttgagctagccaccgtgattgattgatctatagatcgattggtgcctggtgtgtgtatttgtaataagcaaattaattaacacaaatcgatcatgattcggatctgaataagattaacttcttatcctacctggattggattggatacacagaattctagttagaaccggacattcgtaatcctaatccaatttactaattaccactttatacgtacaattattgatcattcttctttaacaaaaaaagggacggatcgtttttgtgggtggggggtccgtatttatttatttatgtgggccggcatcctccctgggctggcccatttaccaacacaaccgccttcctcgacatatacacgcttctgcaggggcttctctgcaattttgcaaccgcgtcgtctcgtctcgtcgaggagaggatagagaatcgaatccatcgccgcctagggtttccttccttgtcaatcgcgcggccgcggcgatgaccacggcggcgcggccgacctgggctccggccaagggcggcaacgagcaaggcggcacccgcatcttcgggccctcgcagaagtactcctcccgcgacctcgccgcccacaccacctcaaggccaggtactctttcccccttttcaatccatccacatcaattcgattcgatttttagctatgtgcgtgcttcgtgtcgtggagatttggatcggata

SEQ ID NO: 24880 - DNA, 687 bp, Oryza sativa
caaagcacactgcggatttcagatcagatggtgtacgtatgtgttcttttaagggaattcaaaagggttgaattcgaaaagtttggaattggttttgtggttttggtttggctccatctattattatttctcaggctgcctttcctctccaaactgctttcagaagctctgcatgagtgctgtaccgtggaaaagaaagatggaaatttgacataaaaaaatgatagacaagattagattagtgcaagtaattacatagaggaatttttttatactagctcctatatgtatatgtaatgtaccatgagcagattcacaataagaatcttgcacatgtcggtatttctagtctgttgggggtggggatatccctgtctgactagtactaccttaataaattgcttttttttttttgctgttggaatggattacttggaagctgtttaaagttttgagactgttttgggatggcaatacaaactccgggctgcgcaccaattttgccaaatgctcgattactccgatccgctgttcggatgaggacctggagctggtccactcttgcttcccctgctcgatttctgattttccttgcacctacctcggcattccgctgtccgtttgcaagttgccgaaggcggctcttcagccactggtgaacagggtcgtgcatcgtctactaccttg

SEQ ID NO: 24881 - DNA, 3544 bp, Oryza sativa
agcgtaccaggccttcttttttggccagcactcctttgcctgtgctgatcttctctggcacgcgaagggccctgctaaatgaaagttcttcctctggtttgcatttcagcggcgctgctggacggccgacctcctcctaaagcgcggcttggatagtcattcggcctgccctttctgcggtcaagagcttgagactgcgaaccacatcctcctcgattgcgtgttcgctcggcaagtttggctccgtgtgctgtcgcctcttggttggactgccctctctcctccccggggtagctgtctccaagattggtggccttcttctagggtttgcttgccggggcatctccgggccagtttcgattctatggtcctcctagtctcttggcaactgtggaaagagcggaactccagagttttcgactctgcattgtcatcggtctcggaggtccttgagtccatcctctctgagggccacctttggtctttagctggtatcgctaattttggggttctcctgggaaggtagtggctctgccccctcccagctatttggagttgtgtgtggccgtgacagtagtatttcgtctcttctttattttatctttttttctcccctttcttggcataagtcggtctgactgattgcgtcgtgtaacaaacattctattcttctaatatattgacgtgcaatccttttgcgcgttcgagaaaaatgaggtgtttataggttgtaattcttgtgcatatacaaatagcagtatttctgaagatttactgtatgcatatacaacaggtagctattgaatatgtacaccacagatagaggaattatagagtcgttcgcagatcagaattcagatattggagaaaggaactactactactaggtagcactgatgatgggcaggctgaattgatgttgtcagggataaatgggcccaagttgatgtagaagagaaaggcaaggcccacttggttacgagggcctttgggctgaggcagagggatgtatggactagtcgttcgtcgtcttctccgttgaattattaattaaggggagtatataattcacgtttataaaaagcggaagaagaaggaaagaaaaagagaaaaaccagccaagatgacaatcctatcatacgatgacgatgtatccagctttgtggtacgcgcagcacgtagccctcacctcgccctgcagtctagtagtatattcccattcccattcccattgagttagataggtagagtataggataatgcgagagagctagcatatgcctaccatccatgatatatccatccaaaaacacaaatttggattggattgccccctcttaattaatctacatgtggcatgcagcaagcggttttaacccagatttaattactagtagcatgctgtttgtcaacaatataatcatttcttaatttacattacctttggtttcgcatcaaacactacatggcaatccaaatgaacgatcaacatagctgcttcgtctttgtagccctgtgataattaaggaggccagcgatcgatcgatcgagccaaattcctagctagcttggttttaattcattctaccctatcctatcgataattaatactcctattcgtctgtctatatatggcagctgctgcgacgaggtgctcgccggcggcggcgccaccgcgccccgtccgaattccaagagtgcgcgtccgctgctgcgaggacacgctcggcgtcccgcgcagccgccggcccaccagacccgagctcgcgcagtcgcagcgcttcccggagctcgtcacgccctacggcgccgccagctaccttccccaccagcagcgctaccctcctcccccacgcccgcgccgcatcgtcctcgtccgccacggcgagagcgagggcaacgtcgacgaggccgcctacacgcgcgtcccggacccgcgcatcggcctcacgccgcagggctggcgcgacgccgaggactgcggccgccgcctccgccacctcctcagcaccggcggcggcgacgactggaaggtctacttctacgtgtccccctaccggcgaacgctggagacgctgcgcggactggggcgcgcgttcgaggcccggcgcatcgccggcgtccgggaggagccgcggctgcgggagcaggacttcggcaacttccaggacagggacaagatgcgggtggagaaggagatccggcggcggtacgccgcttcttctaccgcttccccaacggcgagtcggcggcggacgtgtacgaccgcatcaccggcttccgcgagacgctgcgcgccgacatcgacatcgggaggttccagccgcccggggagcgcaacccggacatgaacgtcgtgctcgtctcccatggcctcaccctccgcgtcttcctcatgcgctggtacaagtggacggtgtcgcagttcgagggcctcgccaacctctccaatggcggcgcgctcgtcatgcagaccggcgccggcgggaggtacagcctgctggtgcaccactccgtggacgagctccgggagttcggcctcaccgacgacatgatcgaggaccagaagtggcagatgacggcgaggcccggcgagctcaactacaacttcatcaccaacggcccttccttcttcacccacttcacccatcatcaccacgacaaacacaaagccgccattgacgacggcactggaggatcacaaccgcaccttcttgatcaccctacctttaattgtttggttaattaattactactccttccgtttcacaatgtaagtcattatagcattttccacatttatattgattcattaacatcaatatgaatgtgggaaatgctagaatgacttacattgtaaaacgaagtaagtactcctgtacataccactgctacttaattagagtgattttatggttctcaagaacgtaacaggagatgccatatttttcggtgtaaactttgatacctctcactatgctttgattgactatacacatatttctgtactctgcttagcttctctgtgtctgaatgcaagcttcatctaatcatccatgcactgaaatgatgagctactcagctcagttaagttagatgaaagaaaacaattaatttagctgttccatatatacgatgtgaatgccatgcaggttttgtgtgtagttggtagcaccaatatcagcttaattagcaattcagaacaattgcagtgacaatgcaaggaacaggggcactctgctttttcctgatggagaaaaataaaactgggcttttcaggccagcctatgaatcacactgttgggcttggatagatgaagccgtgaaggcctaagggcaaccgcaatagttatctataggctctctactagagatccatgtcagcatattttcctacctgaaagagaataaatgaagagagagagagcaaaactatctactaaccgggagatagtgtataaagaaaaacgaggcaatggattagagagctatagatacccatgtagacataccattgaagtggtttactattaatctagtctat

SEQ ID NO: 24882 - DNA, 1739 bp, Oryza sativa
aaagtcaacggtgtcaaacattttaaaacggatggagtattatactaccatggatcctctaattaacttgctaccctctgattttgagtggctgaccatatgtcagcgacccatgtcagaggagtttattttcaatgttatatatatgtcactctacaaacatataaaattaaatttaatcttcacattccacacaaaaaaatatgcttatgattagtgttagatatattcatgaacaaatttgtttattttgtttctagctcatttgtgtggattgaatttgtgagtttcttttttttttttgcacgacgatggatacttactttatcaatgttacaatttttaggtctttttacaactgtttgattgatatttaagaagttgtaaaatccatttatgcacatatatatttacaagttcatgcattctatcttatgttaattattaataatttgagtaatttgtgtgttgttttctttttttttttaacttacaaaatgtttgcgaaagcctgtgtagcgcccgttccgccgtggcgcctagcgggaaaactatctcttaaaaaccctttttgcgaaatctgtttctttgcttgttgtctagtgtccgtgccttctcatatctcaaatccccgatctatcgtcgagttcaatcccgaatccaaatccttcccaaatcaatcccttcgcaaaagtctattttgcctccctcgggttcgatgggccgaatccctcttggcccatcttccccctccctccccggctctctctctctctccctctctctctctctccgctctgcccgcgcaccgcgcgcgcgtgcgaggcgccgagccgagccctccgactcggcccccgcgtgccgtgcgcgtgcacgcgcccgcgcgctcgttccccgtgccgcgcctggcccgtccgcgccgcctggccccactgccctcgctcgttgccgccgctcgccatgtgctcgccgccgtcgccgcccgagctcggaagcgcctctcgtcgccggcctccctcgatgcgtttcctcctaatccgacgctagggacagattcccgtagccgcgtagatgctctcgccgccgggaatcggcccctcgtgaccttgtcgccgtttcccccttcttccgccgccggttgccgccgccgcaatccgccgccgtcgagcatcccccggcaaatccgagccgttggctcgactcccctcgtcccgcgcaacttcccggtgtgctcgctttcgcctagatcgccgtgtttcgctccgccgctcgccaccgccgtccgccgtccgttccggccggcgtcttcttcaacctcccgtcggcccgcgtggctgccacgtaggcgccacgtcggcgccagctcggccaagactgggtcgagccgaccccggtcagccgctccctccggccccgctcgcgggcgcagtccaccgcaagccgtgaggctgcgcgtgggcccgccgcatccgcgtccaccatgaaccgcgcgcatgcgccgcgccccgctccacaccctagcgccgcgccgcgtgcttcctccgcacggtgagccgagctgctgacaagcgggtcccacccaggaccacgcgaggtgagcccggtccaccggctccctctctcctcccctcccgcgcgcgctctgggccgccttttgggccggccggcccatttagctcggccgagccgcccctttctctcgggccgcgccctagccgcccgagggaagtttaattccc

SEQ ID NO: 24883 - DNA, 7049 bp, Oryza sativa
atattgagcttaattatgttgcttgaaaaatattatgcattgataggatcgcacttaatctgtttgtcccgtctgcaaggcagattggcggacctacctagtttgttgcatttgatccttcctttgttaattgttataccatgttcccttgtaaccacccagttgcgcctcggaaatcgtgcactctgcacgagtatcgacggtcgccttcaaacttaaaatctgaaaaacaacttgggtaaaacttgggttttacaaaagacttggaaaacccgacacctgggtcggtgcttgcgaactaaataaatttccaaaaccgcggaccggggaacgtaccgggtgtacggtttcccgctcttgcacttaaggaccgtttccttagaatttcatccgaacataagacaagtacgaccacatgggtggaatgggacacccctggctgagtaactagcttatcaggggagccttgatgccgagagacatgtggattcgccggggtggtgtcggggaggacccctgggcttcctggcacagtatggtctgggacctaacctgttgttggtctgggacccctctcgtcggcatatggtaaacctgtgtcggctttgaaaatgccttgtcatgaaagcttggaggtctcccgacgtggctgatccccacaggctgggtgatccgggttagtaatgtcgtgtgggtaaaatgtaccccctctgcagaggttaacaaactgttcgaacagccgtgcccacggtcatgggcggatgtgaggtgattcctagcgtagttttgtttgactactccttgtgaaattgctgttgtgaaaaggggatcgatgtttggaaaatctgcagctgatgggatcagctaggcccgggtggccgtttgaaagttgttggcccgggtggccgtttgaaagttgttggccgggtgccaatcttgatcaattctaaagactgatacattgcacatactccgaccagacgagacgcactgtctcatccgtgtcgtttgagaagcactcacttagttgttttcagaaaagagttcaaataaaatcaattgcaaaaacaacagcctttccttgaagcctgcattaaacacttatttcccatggcttgctgagtactcccgtactcacccttgctctatataaataatcccccccagttgctgaagaagatgaagcggatcccgctgacaaggagttcttccaggagcaagccggctacgatgagttttagggtttcggcctagttcccaagtcgcgactgtgttgtttggtccaagtcttggcttccgctttcctttttgtaatgcagttgtgagctcgggatctgtccgcagcccaacatgactgtacctctactctataataaagagacctctgttgctgtgatattctgtcttcctgtgataccagcactgtttcctgggactggtatcgattaacaggttaatttggagcgtcacgggctagttccggtcgggactagttcggggcgtgacagcctgtcatagtacttttattgatgtttcccttaaaaaaagatggccttaaaaggtgacatataaatataaatatatatgaccgaaaaaggagcttgggaaagcatgaaggacacacgtatataatccacatatttagtgatggtgtgtacatgtatatatcactagctctcccactgttgccaatgtgacatgcatgtactgattgcatccatgaatatatcaaagcttggcgtgagtaagtactcaccgctttccacaaaactagctacttaaccatgttgagcttgctcaattcacagacgaaaactaattaacaaagttttctagctaaatagttgccagaaacaaattagtcaacgaactgcatgaaaaagtatgctcttttctttttaacttatctaggtttttacttcaactttaatacaattaattaattgggcagttctctcctgtaggtttgttttttttaaaaaaaaaactgtaattatatgtgaaaggacagagatcgatcgagtggtagttaataagcaattgtcccaaaactattttgtatatacttgcatagaaaaggtaaaagtagccaggacagtgaaggaggatcggaacaagtgaaaatttcggtaaaaaaaggaacgagtgaaaattaacataagtagtaaaagactaaggacagctagctagcactgttaattactagtagaagtactgaagtgagaaaagaaaaggaaataaaaaactgaaagatgcatgcgtgtgtgcgattagactagctattaccttgatctcaaaaaaggaaaaaaatgaaaaaaaaaagaaagaaagaaagagaagaagctgttaattaattacctcttcaaccatggacaagatcctggccttcctcctctcgagatccaggaggtccatggagctcagagacaggttgccccacgaacctgaaccctccacgtcgtcccactttccaatcttgggattgggattgggaggtctctgctgcttggcgccatccatggcctcaacgtcgaggctgcagaactcggcgagcagcgccttcacagggcccaggtacttggaccccctcagctgaacattaatggctgcgccgccgccagctgctgatgggcaaccaacgacgacggcggcgagcctgctgcgccggcagcgttgttgtagagggagagggaaacctgctgctgcgaccacggcgatggcaattgcaaaccccctcctcctcctcgtaggtggtggtggtggtggtcggcggcggcggcgacgtcgtggagggagaggaggccggcggcgtggtcgaaggaggagatgatggcgccgctggcgtttgggggcgacgacatgtccaagaggtggtggtgctcatgatgatgatgatgggccgccatcatcgatgctcgcgcgcgtgtgtgcaaatttgttgtgtgcttgtcgtcgtcgtcgtcttcgtcttcgtcttcgtcggtgcctcacactgatctctctctcttcttctcttctctctctctataaggctacaaataattaaaccatggtactactactgtatatagctctagtctagtatagtatatatgtgaaagtgatgaaatgtgtgctagctagtttgattgtcactcagaaaagtcagctacaacacctgcttaattgttgctaactgatatagctacaacctgcagatgtcaagatttcatgcaactaattaattatatgcatgtgcaagtgcaagctagctagctagttagacacatgcaacaacaagaaatattaagctagctagatagtactggatatacctatacatgttgggtgcatgggtggctaggaattaattaattaatatatatagattggcaatatatatacataattaattcaattcttggtgtagtaactttttttttgtctctgcccctccatggagttggactgattctatatatatctgcttgcttaaaaatatatgaggctatatataaactaatgtgactaactatatacatacatgtacggtgtatagtgtattgaatatggatggatggaagattattgatatgcatcaacatcatatatcgatcttcatgcgtgcatgctcccaccaacaaattaaattcaatctatctttctagctagctctagctagctagttaggttgcatatactggtagtactaggtttgattgatctcctccttcctacctctgcaatgaagaaattaaacccagtttttctttattttctttttcgatcagcagattgcaggtttagttgtgctagcttattgctccttttgtgagagagagatggagagtaaatattcagaaaagtatgggctgacagaaagaaaatatatggagcagtagaggttgaagtggtcctcttctctttctctctctcacacaaacaaatctccatcattgatttggattttggagtaattaaggggagaaagtgaaggcagcaagaatatttaagagattagttgtgctagctgccactcataaactttaagagacacgtgaaatatataaggttaattaattaagtccccttctcttttttcgggtatcatccatggaatatataaattgtgtggaatgctatattgaaacaaatcagaaagcacatataaagagaaaattttatgatccttgagaaaatacactgaggaaattaaacgaggaattaagtaatgcaattttccaagtttaattaaattcgaccaacagctaacaaatagagctaatgcttgatctatctagctattaattgtacacatatcgatcttccactgaatttattcgctttctacatccatcgtctctgagtggacctgttttctctcccagctgctacttgcctccggtggtccaaagcttggaatatgacacaaattcctcttttatgcttgcatgatcggtttctctggttaattattggttctcattccaatcaaatggatatatatgcatgtacgggccacaaatttacgaagaactatctacacaaattaaggaaataatgtcaaatttttgtgtataggttatacctcgatttcgaggctacaggaaacagtacgtcctgcaaatgttgatataggatagatatcatcaacacgaaattaaaccaagtacattagctaaacttctcctggccagatcgatccatatatataccgattgattgattttcacatgtagcgctagcgcagtacgtactactttatctttatcaattgtcaagtacataactctttactttagttatctattactccctccatcccaaaatgtttgacgccgttgacttttttaaacatatttgaccgttcatcttatttaaaaaaattaagtattattaattctttttctatcatttgattcattgttaaatatacctttatgtatacatatagtcttacatatttcacaagagtttttgaataagacgaatggtcaaacatgtttaaaaaaaccaacggcatcaaatatttagggaaggagggaggatgtttcaattcgtgcaagcattgaagcgtatatatactagtagttatgtttgctttcttgttatacagatattatagtttcaacatgaatcccgattccctatctagtttggccctttaatttgtatccagagagattaatattacaatttcactcccgtactactcctatgtatggtaacgttctaaattaattttgtcctaatatgaaacaagatattgaagtactctcttcgtccaatgaaaaaacctggacggagggagtacatatgctatttaaaaatatccaactgcaccgatgaaaatatatataaagatgatttcatcaggtgcaccattaattatttgcttctgtgggaagctagattaacttatacagtgtgcaaccaaaatttgtccatccactgtatatgttaaattatatatttgtcagcatcattataagtaaatattattgtggagaggagcacaagttagttggagctaggcacatcaaagaccccatgcatggttgtacgatgattgctactgatgaaaagacctgcctgcagctggccactacagtacagtactactactagtagcacataatttagcatgtggcgaatttggggcgtgcacacacatacgttacatactgacatacacacatgtagtaaagattagagatgtctcccaatcgtgttacattatagtactatacatacatatataggagtagtacttcctccatctattttttgatagttatatttttaaatctgaaaaaattatttttaataggcatatttcaatccaacaacctatcatcttaatgactttctcggttataatgcatgactctctattcttctacacaagattggctacatgggcatcgagaaatgtaaatattaatgaatcgcttatttatgagaaatgactggtaacatgtttaaatgtatgataagtagaattacttattcttggtctgtatgccaagatgaaatatgactatataaaaagtagacagaagggagtagtatatatcatgttcttcagattatcagattactttactagtagcactgctgtatctccaattctccatggttgagagagatgcatatggatcgtccgtgttggttgtattaacaagctatctgcgagccaactcacttggttaattaggatgtggaatctgtccacccagctagattcatccaaaataataataaaaagagatgatcttataattttccaagatgaggttgtagtttctttttaaagtctaagtctaaatctcgagaagtatagtaataggttttagtaattaaggtattgttcggttaatcatcccactcttaagaaattcgagagggatctaaagatgaataatttcatacctactattgagctgtggaatttaaacatcctcaatgccctccaattcatcccttatgggaatagctgaacaatgcctaaaagtggttatgatcatctttggggaagtttttttttttttttttttttacagaatcttgaactttctcgaacagtttactagattgctatctaaattataataagaatccatagttatataatttagaaaataactaaaaaccaatagaacatgtagtatcaactgtttctcataattttaagctccccaaacatgttaccatgtatgtatatatagtaggtatggatagatacaaatgtgcatgtgcctaatattaatttattattaatttgatgccaacatgcaactcctttcaattagatcataaccttgttttttcagttacttgcgctaataattaaccacacatgttgttaattgacggtatttcagctacagtaacaacaactgttaccatattttgtgacgatcacattcttttttaaccatgtcatatcaggcacagcacactacagtaggcacgattaattgcattagtcgttgtcgcagctagcgcaccgatcaattgagtggatgaagagggtttgatcaagagaggctttcattcgcccacgtttg

SEQ ID NO: 24884 - DNA, 9312 bp, Oryza sativa
  unsure (1)..(9312): unsure at all n locations
acacacacacacacatatatatatatatatatatatatatatatatatatggtgcaggccctagggaatgtaatgttcaagtgttctgcgtctaattaaattaatttgagattcttgggagatttgcaaattgcaagctagctaggtctgctagcctttaatttcttatcctctactttaattttggtccctgtttcatgcatgtattgccgatatctcaatctctcctagctaaccggccacctagttctgcccatgtttctttcttcttcctcgcaccaacgctcacactgccacctaataaccattttttaatctttaaatgcctctttatttctccctccgtattttactgaacaatattgttcactttttatcaacatttgaccatttattttattaaaaaaatttatgtaattattatttattttatgtcttgatttatcattaaatattctttaagtatgacataaatatttttatatttgtataaaaaaatttaataagacgaatggtcaaacgttgttcgaaaactcagacctaattgagcaaaaattgtgagctaatattattacagctggaatggaatggggcgcagatatgagatatcaactctaacaaacttgatttaactgattgaagtagaagtgttacagctccgtaaagaagtagagatggatccaccaggatcgagcttgatcatgagactgggccttcaaaaccgagaccagatccacccatgcaccactagaggtgggcaaaaataatcaaggaccaaactaaccgagaccaaaaaatctatcaacgcacaagtccaggttacccatttttcagttaattcggtcatatgccttagttacccatattgaccaacaatagcccagtcagcctaatagccatacatagtgaatacccactagagaaaactatatatatatactttctgcttctgctcgtacttggcatttagccgtcgcctcatgctgccagatggtccatgcggcggcctgtcctactgttctacgccgttgcccgaagccggcccgcatttcctccgaccctctttgcccatgcatatgcatatgtagcctcgtcgtgcagtgaccgatctagaaataaatagtaggggatctgaacaaattacaaccctcttttcatctatatatagcaaaaagttttagtaagggcaaccatagtcctcgcgctaatagtggagacttgagactccgccgctcccatgttagatccatccctgttgtcgagcacacgtacttttccaccccaaccagctcacaggcgcatcgtccacctcttccaacctgcgcgtgcatcatcctactccaccatcaacctgtgcaagcatcctccaaaattttgctgagatttgatttgtgtgttttctcctctatatctatctgcaatttcgatcacggtcgagactgagaccaaaataacccaaaacgaatagcttggttctcaaattgtttactacacaattcgctcggtctctactttcagatgaccaaaatttgctccaagaaattttcagggagatcaaaatgctcacccttacctatatccttccggccggtttcaactccgagtctccaacccaaaaattcttgacccttgagcccatagggctgcttcatgtccatgcattaattaaggaaaaggaaaacggttgttagaaaagatataaggcatgtttgatataactcctactccaagagtgaagcggagttgagaagtggtgggaatgccgctccgcttttaaattgcaatttttaggatcggagcagtaactctattctatagaggagcaattttgtgtgtaaccccagttttacaggacaaaaatgttgagcatgactgtatgagccgtatcaaatgagtcaatagcatgcatggacttaaagtttaacgaagggttcaaaagtttagtgctttaggatgagaaagtgtttaggtacccatagaaatttcaaatattttgttaattttagtttgaagacgacggcgcgcgatatatataggaaaatgttgatgcgtacatgtatacatatgtggtggacggatgggaaagtttacctgcatgacggaccacgtacgtatgggtacgatcgatcgatcaccaaccaacctgcagattacttgttcacttcattcttagacgacctcgccaatagcctatagatattcttaatttgtcctagcaaactgcaaacgaaaaaagtcaatcttaattcaccgaatgatttttcattctcacagcattcgttttgtggtccattgatttcgggtggcaagattcgtgcaaaacagtgtggactcctctgctattctttttataggagcgctagaaatctgccgaatgatttttttatttccacatcatttgttttctggactgtcgattttcggcgtcaaaattcgtgcaaaacagtacgtgcttctctgccattttttttacataattgttactcctggaaaacttttgcaagcattttgttcccaaaacttccatattaattagtgaccatcaaatcacttcgagatttgtgcgtaaagaaaaaaatgctagaaaatttttttcacacatgtcatacataagatcctgatgctaaccaaccaaaccatagttaaataaaagttttatattaattatatcatagttacagtatagttatagtgtagttacaatatagttacacttaaattatattatagttatatctaaaagtttttcgctccaaaaaaaccctcccattacatactttaatttttcgttcggggtttatatatcctgacgcatggatatattatgcagctgtagttgcttcattgcttggaatcagtataccggccgcattaggagattttagtgcatggatagactagtggttcggcccattattgttgaagcccaggtttgattgacctgcaggctgggcttgctattgtagcccaagcaccatcctattctattctaggaataagttcatctaaggtcccttaacttgtcaacgaatccgattttcgtccttcaccacaaaaccagatacaacgggtccctcaactatcaaaaccagtgcagatgaggtccctcggtggttttgacggtggttttggctgacgtggcacctatgtggcaaatttgacttagtcttcatctgatgtggcattgacgtggcgcatacgtggcaatttgatctggaaaaataataaactttgtgggacccacatgtcagtctcacacataaatcaataaaagaatggtggggctcacgtgggccccaatgtcagccacaagtccctctcggctttcctttctcctcctcttcgctctccctcgtcctcgcggcggcggcaggagcatgccggcggacggagcggcggagaggcgggcggagcggcggcaggccgcgggcggcgaggttgccggaggaggaagaggcagaggaggaggtcgtcagcgagcgcgacagctacactccgttggccgctccgcccgcgatgcccagttgaaaggcgctgccctcctcgctcggtctccgcgcgccgcctccctcctcgccttgccgccacacgccgcctccctcctcgcccgaccgccaccgctgacatcctcgatggtcacatttgggtcggagctgcccctcccctcgcccggccgcctcaaaaaacccaagcttttgccgccgccccgactggctgaccatcccaagaaagaaggcacctcctcgtcgcctctgctgcctccacactgcccgcggcgtgagggccctagacctccgggagggctccggcgaggtcccggcggaccgcgagttggaaatgcaattaacagattcaaatattcaattcgcttcttgattgagcaagttataggtgcaaggattttacttatatgtataatgaagctattaatattccctcttgtgatgctatatttgcgatatgcttggctctgtctggatattggttgccgcgagctttacttatatgtctgctgctgctagccgtagttgacgaggagacgcagagcggcgagatgtcctcgagggcatcacgctaggcaacgccctggagaaggagaagagcaagctacgtggcggcgatgacccgtcgcgctggtccgacgagaagagcggcagcggcagggagtggtcaagcctgggatggcacggcgatcctcggcacgagcaagcggtactgcgcatatgcgaggaaggctcgtttggcgacggacggccgtggcagtccgagggttggcggggagaggaggggcggcaagccggcggcgggttcggcctggtcaacggcgaatcggcgatggcggggcggctgggtccaacgatgagctccgtgagggaggaggcgagctccttgtgctccgacggaggaggggctcccactccgtcccctcgtactcgggttccggcgacgagaacggtggtggtggtgacgagaacgccgcgagcttccatggcaggttcttgtcgcgtccggtgcgggggaggaggtggcgtggccgccgtgttccgtctcgccgccggcgccatccatcggtgggcaccggtcgatgccatccacgagagagagaagggtgaaggccgaaggggaagatgaaaggtgatgaggatagagatgacatgtggggcccacgtgggtcccaccattttttaattattttgtgtgtgaagctgacatgtgggtcccatgggttttattatttttttcatatcggattgccacgtaagcgccacgtcaatgccacatcagatgaagaccgagtcaaattagccgcgtatgcgccacgtcagccaaaacagcagtctaaaccgccgagggacctcgtttgcaccggttttgatagttgagggatctattgtatctggttttccggttgaaggatgaaaaccggattcgttgacaagttaagggacctcagatgaatttattcctctattctaagaggataaaagtccattcggccctagaagttggccttaaccaacccccctcccctaaaaaaaaaacttttaaaaccgtgtactagaccttcaaaatttcaatacgagggcatctgacctctttataacgttttcaatcttttttttttggttcttctggggataagattcaaagaaaattaagctcaggaggattattgggatgcctgcaggccggcatgaaattaataatatatctgacttaatatgtaggagtaatatgcgtggcgagcatgtcctgcaagcattagtcacacacattttttaaaaaaataaaaatgaaaacaaattaatcgtgcgctcatcaacatttggcgcgatcgatcattaacgtggcaggcaccaactaacaagagctagctagatcgatgtacccatgcatatatactccagtagctagctacaatcaaatcatacgtacgctagctgcacatccctcgccgccgatcgacgacaatagcatggccagcagctggaataatccggccatcttcctcgccgccgcgctggcggtggcgacggcggcgcaggtcgtcacggccggtttcaccacagacttgtactggcagcaacagccggcgcctggtgccgtcaccccctacaagacatcggactggcacgacggctccgccaccttctacggcgacccctccggcatgggcgacgacttcggtacgtagtatcgtcttcatttcatttgcttttctctccggccatgaacgccgacgagctatataacgaatgcatgtactactactgctatataggtggcgcgtgcgggtacgtgtcgaacgacatcgtgtcgctctactcgacgaagacggcggcgctgagcacgccgctgttcgccgacggcaacgggtgcgggcagtgctacgagctgcggtgcgtcaagtcgccgtggtgcaacccggggtcgccgtcggtggtcatcacggggaccaacctgtgcccgcccaactggtacctccccaacgacgacggcggctggtgcaacccccggggcaccacttcgacatggcgccgccctccttcctcaagctcgcgcagagggtcgccgggatcgtgccggtgcagtaccgccgcgtgccgtgccagaggaccggcggcgtcaggttctgcctccaggggaaccactactggttgctgctctacgtcatgaacgtcagcggcgccggggaagnntttgggtctccgtcaagacctccggtggcggcggcgcctggatccaggcggcgcacaactggggcatcacgtaccaggtgttcgccgcgctggacaactccgacggcctcaccgtcaagctcaccacctacagcacgccgcagcagaccatcatcgtctccgacgccatctccccctggtggatcaccggactctgctaccagggatccaacaacttctactaatcatcaatcgatcgatcatcagatcgagttcaaagttgcagtggttcatctcttcattttgtttcttcttcttggcttgctctgctatgcgatgcgatgctagctattgtcaaagttcatggactctctgtttctttcttttgttcatagaacgggatgcatttctagttcaatgtttatgctaatccatcttctgttgagagaattctttttccctttttcaaaactttcaaaaatggtggattgattatgatgtatacttgatctccgcataagttcagtaaatatatatatccctgaaaacaaagtttggtttcctctctgtgtatagctgtctggactctggaattcgtgccaccaactagatttgatcgagaatatcacacatatatcaacttcttttcaaagatctaccaccacatacataattgatatgattattcaatttgattggtttatgtatatccgatccgaactgcacagcatgtctgttggtcaaacacaagcctgaatacaatgctgcatgtataggcgccactaccttctcctcatagcaagattatataatatcgacaaataaatttagcaacttgctacaaacaaattgtgtataactcgctcagtcaacaagttgatcctcatcaacacattcacttctcttctgtgaactgtttccacaaccacttctgtaaaatctgaatattttcaccgtcttccaatgaccagctcagtgtcaacatcaatatcctggacatgctggttctgattcatctcgcgcgctggagccccgattggagcatgttgcaccttgccctccacaaacaagaacgaacaagaagaaaagattcatcatcatgcaaaagctgacatgtatagatggatattaacaccggtcactgtaagttgcattggatagatagcgccttttgccccacatgtcagtgacattattggcagattaatccggcagctagtaggtgcagtaaataggcgtgtggttgatgatgagttttttaatgatacctgatcgaggagcagtgcgttctcctccgacagaatcttctcctgcatgttcagtttcgtcagttaatcacacatggatatatagataatcttttgagatttgtatttgtatcaacatcttttgtaaagcagtacactccaggaagagacggcttgttgaggcgaacaagtgtttccatctaatcatactgatgtattactaacaagttatgcaaaaatcctctttcagaacaataattcttgtcagccatgctttgatatatattatattcagatacataagtgcatacctgttgttgtagctgtgaaatcttatccatcagcttcttttgctgcaatgttgacggacaacaagaaagatatttatgtaaatctgatcaaaatgcatatatcatagagatattcacaacagcaacaacatagatagcacattgcgaccatttgcttgccttttgtaaacggatgctgcttaggctcttctccatctgcatctccaggccatgcagttcttgcaacgagcatgattccaggttttcgccctgcatcttcctacgtgaaaaatcattttcatctagtcatgtgaatttccccaccctaataattaggaacatatagtaattgccagtctgcatgatttcatatatattctgataaggaataatcattgctattatagttaccttgtgtatgcctcaactgtgtcaatctccattgctaaggtttcggattgagatttcatattctgtatgcagtagttgtgaagaaaaaaaaattaatgcaagttgcacacattatcgtcatcgatcctaacagtatatgatcatggttgatagatatgaggaattcagaatgtatccacaaggacctttacagtaagttcacggggcttcttgtttgcaggcgcctcttgggtgtggctaatgtagcggtcgattgtcccctccaggctgaaaaaagaattccagagttgtgaaaaatagtttattacatggaaatacagataatatatatgtgttcataatcaagtaactgaacgtactactactggatatcagaccaaagtaatgttttcactaaaaatagcagcggtacttatatacgttaatttgtgcctaataagataccggtatcagaaacgaataaaaacaatacaaatttcagcaagaatagataccactacatatgtacatgaaactgactattctcaacaaacttaaattgtaaatggatgtccattaattctaggaagcattatagatgatgaattaaggatccaccattgacatttaatttatctgataacaaattaattgaaactagtatactaaaaaacatcaattaatataagacatgaaataaattgatacttcctcctgtcagaaatatttgacaacggtctaacacccaacaccacaggcgacggctgggaaccaggacgaaaccctaatcttcacttcactttatcttctcttcagggccggggaactatatatatatttatatagagcaagggtgagtactttcgtactcagcaagtcacgggaacttaggtgtttaatgcaagcttggaagagaggcaaggttgttttgcaaatcttttatttgaagacattttgaaatcactaagtgatttatttctttctaagtttgggccgaaaagagacttgcgtctcgattcgacattaagagatgtttttttttcaacagctcatttagtaatgtaccgacctcccgggtcagatcattacttctcggctcccagagccattccatttgattaatcggctcccagagcctttttcattttctcggactcccagagtccagctgcccagcagcacaacaatccgcttccactcgggaag

SEQ ID NO: 24885 - DNA, 21726 bp, Oryza sativa
aaatggcccgaggaaaaaccggcccacaaaaatccgagggaggcaaaatagactttttcggaggagattgatttggagagaaatggagagatttagggtttggattcaattcaaatttgatattcaaactcgagggtttaggaatgaatcaagggagactcaaggaaatgattcgagatggggatttgatattttcggaaatggggataggtatttggcggggattcaagggatgtgattgaatttcggagacttgagtcggatttggaatcttgaggtggacgattttgatggcgatgagagggaacaacgggatttgaattgaggtccttggcacaacctagactcgcacacaaagaacgaaaattttcgcaattacgattttgccgaaatagtttttaacgactcacgaaaagcggagcgttacagatccaccccccttacaagaatctcgaccccgagattcgaaggtggaccacacacacgaaaccaaaaaggatcttcagacttcttcacagcttcagactctgctagtctttcttcaacttattgttgcgtgcttgccgcaaaacggtctggtactctgactcacttagaattcttcatcttactgtggctctgctcttgcctgtggaacctgttcttctcctgctccttcaacttgctcgagattcacaacttttccgtttgtttctacttgcacatggttcagacgaccttgtccgacgggcggtgaggtcaacgaggcagaaccactgtttggtgactttgaactttttggtccagatacgttgggaaggcttgttgttggttggactcgttttgacttgactttctgagggcagcaccatgaatagtgtcccatctcatggcagatgaaacattcgactcctgccttataaccacgtctttttgaaggtgtagggcatggtacggagttgcttccttcatggctattactgttgatcattgtggcttgctgaccaggttctgacatagtcgaacgagacgtagaaccggaactagttgaatgctgagatgctttctgatagtattgtgctggcgagtttgtttttcgacacaaatcttcttttgcttgaatctctagggacattactttgcgtctcttgtattcttgcatctctttcttttcttggatgtcttggcacatgtcgcaggatgcttttgctcttttgtcatcagggaaggttgaacgtactgcattaacatttggcgaatttgggcttccttggggatagaagggcatccttgaggttctcatattagcttgtagtggtgcatccatatagggtttttgggggcagtgtctcatgtaatggccaattttgtggcaaatgaagcatatgaatccgggaacgtgtctgatcttctttgatttgagggtgggggacttgggtaagttttggcaagattgcattgtctgacattgtgggacatcttgcatgtcaacttctgatggcaaggtctttcttttgtgacaactccttctttaatcatgctattttctcgcgatacggatttattgattgagttctgaaggttggggcaattattagctcgaagtggggttttcatccctgtaatcatcacatttaagaattctttgttcttctctttatgggtatcagtgccttctactgattgtgttccttgtatttctgcggcctcattcttactcttgtctggattcaccttgggctgtggtagtagcagttgttgttgtatagaagccaaattttgagctatttcttgtagcatctgagtctggttggctagaatctgataaatatccattgaggagtgttgatttctgggggcaacttccttgtttggtccaggaacagtattatcagtcttggcaacttggttggggacttgttcagctagttgatttggattttctgacaaagctgggtcttccttagaaccaaggtagttgcggacacaagtctgacaggttggttgaggtgccatctgcttcagagggactgagatctgaccaacgcagaaagtagataagaagaaaaggaggaaaacaaaaacactacatcaaaacggttttcgaaatcacagaagacataggtggtgtgttccagccggtaacccaactggtctaacacctgaacacggactaccaaacaaaactcacacacgcactagttcaccacaactcctaccgagcgtgtgacggtactaaggttagcctaccaacaagggcttaactaagactcctaaaggcttgagcacacctttcttcaactgggcgtgaagacaggtttactctaggataaaagtcaaaacgaacgactagcttctacttttggacacaaaagatttttcgcaaaactagagctaaaggggacaacgacaccttagctttcacaaatatttttgtactcaaataatgccatcctattaaggggtttcgatcctagggccaacctatgctctgataccatctctgtcacaccccaatctgataccgccgtacaacggcacctgacaggagcgtgtcgtagggaaaacggcgcgaaccgcttcctacgaaaccgcgatctcggtaccagtcccaggacatagtgctggtacccacggtgacaaatatgaatcatagcaatccttaaaataaatagaggacttatttaccttaacttaggttgcagctcagacagcccgagaatacaaccgacgacacggacgaggcgaacaccaacaacagcagcagcagcggaaccaacggtctaacacccaacaccacaggcgacggctgggaaccaggacgaaaccctaatcttcacttcactttatcttctcttcagggccggggaactatatatattgagtactttcgtactcagcaagtcacgggaacttaggtgtttaatgcaagcttggaagagaggcaaggttgttttgcaaatcttttatttgaagacattttgaaatcactaagtgatttatttctttctaagtttgggccgaaaagagacttgcgtctcgattcgacattaagagatgtttttttttcaacagctcatttagtaatgtaccgacctcccgggtcagatcattacttctcggctcccagagccattccatttgattaatcggctcccagagcctttttcattttcttggactcccagagtccagctgcccagcagcacaacaatccgcttccacttgggaagcctagtctatgatgcccgcagacatcccgaatcacacagattcgtttctgaccacttaggtcgtccatctgccacataggctgattctggttacgattcccacaccacaacaacttttcacaaagcacaggcaaacaaatctacgcaacgggaaccacctcacatccgcccatgaccgtgggcacggctgctcgaacagttagttaacctctgcagaggggtacactttacccacaagatacgaacttattccgaacacccgtcggtatcggaggttcgcaacaaagcctttccccagccgacccagggttacctcatgccacatagaaggatcaaatcctcacataaacataggccattttaggcgtgcacaaatcaaactccaaccaccttgatcggtaagtgagcaagcttctcgtccttgccttaccaggaacccggtttgtccgaccccgccccggcgttcccaactattggcatgcgaggtttccctgaaccgtctagttacttagccagggtgtcccattccaccttgtggttgcactttggttatgttcggtgagtttcccacaggaatcggtccttatatgcgaatacgggacagtgccacataggcacaacccccgcatcgcgagttttcacaattcattttattttcaaacacaccgacaccacatgtcgggttttgaaggcttcacaaacccatttcccaagttttcgacaaacaacggtgtatgtgggatatttggtatacgcgctcagagagcacgaataccgaggtaccacaagggtggagcgtcaaggaatcagggtagtatgacctacggaaattagtgcgactactgggtaggtccgtcgatttggcatgcaacccgaggccaagcaagttaagtgtgtgattctaaaaatgcaagttgcaaacaaaataataatgatttttcaattataggagcaattgatcaaagggtgacttgccttgctcaaggtcttcacgaagcttcacgaatcttcgagaaaacccgcgatcgacgaaaatccgataaccgcaactatacgcaaacaatcgaaaacctaaacaaaagaccaaaagaaagatcctatttagactaattattagtgccattgaaaagatctcaattttacggaattactggaagtggaacggagtcaatcggatgagcggttgagaagacatgaattttggaagtttaattggagtttctggaataggagaaatggtttatggaattttatagaaataatattctcaagaatattattgacagtcactgacgcgcgggaccaaaggaaatgatttgtggaattttggaataaggaattgatttatgggacaaaggaaaaaggatttattaaatccctggaaaaagaaaaggatggagggatgtcaatcagacttgtctcgggtggcattggcgcggcccgagggacttgcgcagctcgggcgagcctaatgggccggcacggccgcgaggagggcggcccaaggggcgcgcggggagagagggtggcccgtcggggtgggcgcggtccaccgcgcgggacccacatggcagtggttgggttcacggtggggagggtgcacgcggaggtgggcgctagggtttcggatgcacgcggttcaggcgcggcgcgccgggtggacggatggcggcgggcccacgtgcagccgcacggcttgccgtggaccgcgcgcacgggagggaagacggagggaggaggctgactgggcgcgacttgacccaatcaagcgggcccgggactgaggtggcgtccacgtggaagtcacgtcggatggggaggcagaggaggccgggcaggttgatccgacggctcacggcgtgcggcgggatccggcgaacggcggcgagccggaaggggcagctagcactggcggcaggaggaggagaaggggaactcattccacggctcggatcaggaagaggacgcgcgacgacggccggcggcggcggccaatctcgccggcatgccgacgtggccgcgcgcgaggagagcgaagggtgcgcgggcttgggtttagccgaaccggtatggtgttgcgacgcgcacgcggtgacgcgggacccgatggtcaccggcggcgcacgcacggcggcgttatgcagcggcggaagcggcgacacggcgcggagacaaaggagaaggccgacggccttggggcagccagggggaggtcaaagggatccccgggggcgtggcggcgagaggaatcgacgcgagagaagccgacgatggcggattgcggcggcggcaatcaccggagagcaaaaaaggggaaaacacgacgagacgacgagggttcgattcaaagggatgggagcatctccggggttcaaggaatccattcccggcgtcggattggacggagcggcaccgaggttggctggcgacgagagacggcctccgggacagagcatggcggccggcgagctagcgcgcggtgcaagggcgacgagcggcggttcggcggcgagacctggggcagtgtccatgcgtgttcggggggctagccgagctaccacgcgagctagggagggagaggacgagcaagaagggagaacggagggtggcattaccaagccgagacgggcgcagtgacgagcggccgacggctcgggagcgagctctccggcctcgggccgaggaaggggaggaaggagggtgcccggagtcccgcgtcacgcgtcctcgcacgcaccggtctcccggtgctctgcggcggacggcgacggcgagagcagaggaagggcgacaatggcgcagtggagtaggagtgtgaagtgggagggattgagatggaatggggagctcggcttcgggttttataggcgcggggtgaggcgatgtcggtttggggggagaaccgaccttggcggtcaagcgctcggcttgcggcagcggcggtttcgtgggcgatgcgaaagcggcgacggcgtggatgctctgggcggcgaaggcggtggatcggacggccgatttcgaaccacgggagcgcagggctggcgcggtcaaggtgggagcggtgagctggcatggtcgcggtggtggcgtgggcgcgacagggcgcaaaggtggcgtcagcggcgccctgtgtacgctcccgcaccaggacaagggagagagcgagacggccttgcccgcaagggaaaagcgaaaggaggaggaggaaagggagccttgctccttccgtttttgggcggcgaggctggagaggcgcgtgggattggcgtcgccacgttggcggcttgtggcatgcggaggcggggccatggtgacgcagcggatgacagcgaaaagggaggagggctggtttggcggcgagcgcggaccaaggcggtcgacgcggcaggggcgacggtggcgcggccacagcggtcggccatgagcggcgccgcgcgcgggagcatcggcgtggcgcggtcaaggtggggcacaggcgcggcaggacgttgtcggcgtcctctgcctccgcgcacaagaagacaagggcgagaggagagaggccgggtttagaagggaaaagtgagggaggacggtggaaagggaagcctctcccttccgttttgggcggcgggcaggcgaggcgcgcgcgggaagggcggccggcgaattcaaacggcggcggcgggaatcggcgccgaggtgaggagaaagcagagagggcgagagagggagagggcggcgctctctcttggctcgggcacgacgcgcgtgctcagcacgtgggaagggaagggggaggagcggctgagaggagatgggccgaggagaaaacggcccacaaaaatctgagggaggcaaaatagactttttcggaggagattgatttggagagaaatggagagatttagggtttggattcgaattcaaatttgatattcaaactcgagggtttaggaatgaatcaagggagactcaaggaaatgattcgagatggggatttgatattttcggaaatggggataggtatttggcggggattcaagggatgtgattgaatttcggagacttgagtcggatttggaatcttgaggtggacgattttgatggcgatgagagggaacaacgggatttgaattgaggtccttggcacaacctagactcgcacacaaagaacgaaaattttcgcaattacgattttgccgaaatagtttttaacgactcacgaaaagcggagcgttacatcttaatgcctgaaatgccctttgactaattgactaaaacctagcccaaatttcacgaatcctcaccgccggcgaccaggtgccgccctccccgtcatccggccaccacgactccaccgccggcgtcctggctccgccccccaccatgcctccatcgccggcatcttggcgccgtcgcccgcagcgccgccgcccttcccttcgtccgcccaccaggcctccaccgcggacatcctgaccccgtcgcccgccgcaccgccgtcctccccgtcgttcaccaccacgccaccaccgcggatgtcctggcgccgtcgcttgctgtgccgccgtcctccccatcgtccgcccaccacgcctccaccgccggcgtcctggcgccgttgcccgccgcgccgccgccctccccgtcctccgctcacaatgcctccatcatcggtgtcctggcgtcatcgcccacagcgctgccaccctctccgtcatccacagcgccgccgccctacccgtcgcccgcagcgctggcgccctccccgtcctctgcccaccacgccttcaccgtcggcgtactggcgccgtcgcctgcagcgccgccgcccttcccatgctctgccaaccacacctccaccgccggcgtcctggcttcgttgcctgcagcaccgccgcctcgtccaaccgcccaccgcccctccactgccggtgtcctagcgcttccgtccccatcaccatcgtccccggcgccgctgcaaccgccgtccccagcgttgctgcaaccggtcgcccaccgccggcaaggagctggccctccttgatgacaacaaggaggtagccatgcctgtagaatgggctaggggcaaataggtctttttagagctctaacagaggttaactagacggtgatggcacattttagaggttaaacaaaacacggtggtacattatagaactttacaatatcagtggtagattgtagaagggtgacaaactcagtggtactgagtggattctctctatatactatctaaaacactctatatatgaccaaaagttcccccatacacccctgcaaggaatgagtcatgcatgtttaattagcacctatatttgacttacctccttgtttcacacgaaaaagggttgacatgaaagtatgatgctttgggccatgcaagaaggctgacatgccaacaatttgatgatcttataatgacaaatagttcatgttaattatgtagtctcttcatcgatcgtgcttattagtcatagccaaattttgaattttaaaacttaattatagagttaattttaaagttatttcatcttaatctgtttttcagcaatgggttttaaaccactaataataacacagatatagaatttatattcataaaattagttttggcgtatttgttcattatattttttttcatagcttgtgatctgccgcagctcaaacaatttgcaatggatttaatttgccctcattttttttatatgaatgctttgtgtaatcgctatacctctaatttgacatcaacaagtagtaatgtaatttggttaaggctatggttttgtgaaacattatatggcataaaacgtgtggtattacattattattggtgttagcatgcattatattttgtttgcacagttataattataaaacagaaaattagttaattgatctctcttgtcacaaaaaacagaattacgtgtacatgtgtctgtatatttatggccgatggatatatagaaaatgagaaaaaaaaataatgcctatgcatatgtaaatgtggtggtggtttggtgtattaattgaaaaagcaatgtgtgatagaaatgaatgacatatcaattcaatatatagtactactaggaaatagtagctactccatatatagtagttgtagattgcatatataattctgagattttataagctatatactccctccgtcctaaaaaaagacaaaccctggtttccgtgaccaacgtttgaccgttcgtcttatttgaaaaaattatgaaaaaaattaaaaagacaagtcgcgcataaaatattaatcatgttttatcatctaacaacaatgaaaatacgaattataaaaaaaatttcatataagacgaagttgggcacgtaaacctatagtttaccattttttaggacggaggaagtatgacgcaatttacagtgtggaggtgagaaaataaaatggatcgatctatcaaatccatctgatatcaaattaaagctagtagtacgctgctacaccagctagtagagaagcagaaacagtatatttcatgtagtagctcgtgacaccttctttaaatccggcacgtacggatcgaactagctaggggaataataagggtgaaaaacagattagaaagatgaaaaatatcatgaggtaatttagtaataaattagggaattaataagctagtacagtagtagggaagaaggaggagggcgggatggtggcgtacgagggagcggaggcgaagtggaagaagcggccgcgcggggagaagacgagcagcgccacctccgcgtcgcacagcaccgacagctccgacgccttcttcagaagccccttccgccgcttcgagaacgtcacctgccgcctcgtcgtgtcctcgatccgccgcatctctcgccgcccgccgcgccgcctctgctgccctcccgccgccgccataagcagtacgtgcgtgcagggtatgcgagagatctactccggctcgccggccgggaacagatcgatctatgtcgctgctggctgcagaggagaggagacgtacggatcggatagggaagtagaagaagaaagcggcggcgattgaaagaatgaatgatttggggggccttgaattgggttacctgattttcctcgcaaaggaaagcatcccaaacctggaaacacttggcatatatggtattcgccttaaatggcccttcttcctcccctcctccactgcaccaatgcccgcttcacacttcataccacatatatttttatattttctttatttatttactttctgaagaatatgctttgcatcagtcactgacatgctgggcgctcgctatagccaaatacatatatactccctccgtcctataaaaaaaccaatctattactaccgaactagttgggtggcccgcgcaattgcgcggctagcatccatataaaattatctattttttccatatgattttatttaaaattatcattcccgtgtttcaaattttattgcaccttatttctttatcacccctttattgtttgcttgatctatcactacgactattcattgtctttagaaatttcaaaaattagaccttgtagcttttacagatcattgtctagttgactttcgttctcataatttttagaagtcccatcaaacatcgccaatgtactcctctatggcccgtttactatctcatctctttactatccttgggattttaaaaatcgaacataattattgtttgtgttctttttactttctgaaagtcccgccaaactattagcggcttcgccactatactcctctacggcctgcccgctgcctcccatcctttttgtcattgagattttgaaaatcgaacataattatcattggggtttatttattttattttctataagttccgccaaccgccataaccgtgctgcttaacggtgtgcccgtcgtccctcctcttaatcgttattgggattatatttttcaatagtctttatttttattacgaattttatttatttataaaatgtattccagatgaactcctattttttctttttctaattttaggatttagtttattttaaatttagaattttagttaatctcatatagtgctctgattttatttaaaaatatcattctcgtgtttctaattttatatttttcagtcacccctttatttgatttctcgatctaccacattttctttagaactttaaaaattagaccttgtagttcttagagttcattgtcttgttgagtttcgtttttataatttttagaagtcttgtcaaacgttgtcaatgtactcctcttcggtccgtccacagcctcatctatttattgtctttgacattttaaaaatcgttcataattattatttgtgttcttttttattttctaaaagtcctgccaaattgtcaacggtttcgtgcaaaacttatggttgaaggagtttgactgcccagctggtttgccttcctgcacatgattttgtacaggacgtgttaattgtgcatatatactatttctaatttagctatgcgtataggacgtgattgtctcgtgtcagtaaattaagtttggtaatctgattttgatttcagaggctattgagcacatgtcaaatgttattttcgcgctttttcatgaaaacatagtcaagcttttacacctatttcgattaaatctcaactcttataatctagatctattatgatctaatggtgtagactttttatttctctctgattttcgtgaaaatttctagacctgtagggcaaacgtgatgtctcattttaaaattatcttaataatgtactttttaatgatactcatataaaaatgtagggaggatgtcttcagaaatttaaattgacgtgtacatcttagttcttatttgtttgaatatctaaaaggtgcttggtagtatttaagtttagaaacttgaaagcaaaagagaactcatataacttataatttttaaaattagcatgtgctaatcattaagagcttgttgtaattaaggagtataattatcaggcatcgatgattactaattatatgtttgaagaaaaccaagaacgtgtccggttgataggccagaagctcaaaagaacctttctactttgtccggctgggaatccgactctgaataggagtccaaacatgatttatataatttctaaagcctgaataggacttatatatatacgatcaatctcaaccgttataatctagatctactacgatctaacagtttaaatatttttctttttctccgattaacgtgggattttctagcctctacatcaaacgtggtgccttattttcaagctgtcttaattatataatagatagtatagcacatcttaatattatgcatctggacatacatctgtccagattcatagtactaggcagggttcctctcaccgttttcggtgtggttgccggacccgcggtaaccgtgcggttacagcgaaaaccgtgtggtaaccgcgagacataccgtggtttataaggttaccgtgcatggtaaccgcgataattacgtggtagccgcgcggttttgtaaaccctggtactaggatgtatcacatgctatcctagatttggtttttatgggatagatagagtatgtgtttatttgcacttatatatacatttgtagcttatcacgcattatctattcttgggatatgttagaatgatttcaagtcagtctctagacatgctcgtacatactacaagggataccgtcacagtaatccataagaatcagttttactttcaaaaagagcatgccaaccaaaataaaggacgatcggaattgttgatttcgtacgtcattaattcctgcccgacttgggataaagctggacgacaaatcgagctcgtatttgaaggcctcattgtttggcttatgcttattcctataaaccaaaatttaaaatttagaacttaatttgaattcaaatttttggcttttttatcgtacttttttttacatcatttgcttttgagtcgctaagaacatatgtataaaagatttgcacacaaataaaatagtctttaaacgaaacaatgggctgtgattatttatccacacgtatgtacaaattaaattggctctacccgttgcaacgcataggggtatttttttctagtatattattaagaatataattatgattagtttgaaaagagtactcaaattcactctctaggcatagaccgtaagcactggatgaacatcagctgttgcagccacagtcccagccttatgaacactcgtatagaaattattaccagatcgaccggccggataaatcgaaaggcacatgttgcagaaatgtttatatttagacaaaatttaaatcctataaatcatttatattctggagcagagggagagggcgtagttgtttatactccatccgtttcaaaatgtttgacactgttgattttttatacgtgtttgaccattcgtcttatttaaaaaatttaagtaattatttattcttttcatatcatttgattcattgttaaatatacttttatatacacatatagttttacatattttacaaatttttttaataagacgaacggtcaaacatgtgctaaaaagtcaattgtgtcgaatattttgaaacggagggagtattagttagctcatgcgcattgcatacctacatgcgggtatgagttctttgggcactccaataataatctcctattttaaaagccccaaagaccaaatgaaggttgccccatttaatttcctgagaacctaaaagctctaaaccgcactccaaaccacttactccctccggttttattttaattgacattttggacaatgacaccgtctacaaaatataccttgaccttattttctattataatatatacaataaataaatacatgtttacttttattatagtgttttgaaagacaaatatatatatgttgttctagtttctttaaactaaatatttttaaagttattgatggttaaagttataaaagtttgaccttaaccttgttcaaaacgttaattattatagaaccggagggagtaggatgcaaaataagctggtcttgatagttgagagatattttatatttggtttaacggttgagagatgcttatcaatttgggcaatatatgaggggtcacaaaaagacttttgaaaggcttttatgggccaatgcaggtgcggaatccgtcttgggcagagtatgtgtcatgggccgtgcaatggctcaccgcttattgggctttttcgcgcagcgtgtgagaggccggaatggggggaatgggatggaaaaggtacaccgaaggtccctcaacttgtcatcggaatataaaaacaatctcgaaccgcaaaaccagatatttgggatcccttaactatataagaccggtcacccgaggttcttcggtggttttgacccggttctagtctacgtggcagctaaatcagcgtgggacccatgtgagacccacgtgtcagtgtgccacgtcaacagcctttatttcccatcttctctccccccctctctctctcaatcttgtctctgcagggcgccggcgggtggggaggaggccggcggggagctcctcctgcgtggccgcgagctccgcgtcaaagggtggtgggtgctgccggtcaaggcgcaccacgccgcggggcggctgacgggcgccgcgtccgccatgcttgccatcgcagccgtaagacatccctcctcggcgagacttcccctgtgttcatgttcgctgctgcttcttgattcgtcaggtcccgcgatgaacttgctcttcctgatttaatttgtccggtgcagtgcgggaagcctctgcagcatggcgccgttgcgcggggccaagcgccggagaagaaggctacaatggcggcggccgctgcggcgggtggcgtgcccagagcagattgcgaggcggatcgacgccgacggcgcgccgggggagagcacagcgctgcgggcgcgctcctacggctgcatccgggtgttcctcgtcctatccctgctgctgctcgccgtcgaggtcgccgcctacctctaggggccttgctccccccgccgccgcctacctcggccaggaggacgggggagctccgttttcgtacccagccaccgcgaccccatcttgaatattgatacatactctgaattttgagagcttttggtgtgtgttcttgtttcatggttgccctctcgatcttcatggtcatgggacgacgttgtccttctccagcggaatcgatcgatccacccgtccgtggccatagccgccgtcgccggtcaatacatcatccacgcaattgtgctgctcctctcccaagaaaaccacgcaagcgagctccgcggaaaccgatctccgctgccgacgacaaaataggcgatttagatgcaagattggggaacggcggggaggattcctgctccatgttgatcctccgcagcagccgtgaccgcgtccatgtccccatcagccgccatcccgccatccggcggggacgagtgtcgccctcctcctcccaccaccgcgctcgcctcccgccccgtgccgcgccgcgccgttcctcatcgtcgacagcctctcccgcaatcacgacggcgcgccgcggcgtcgtcggggcagacgagcagttgggcctccccatgcttcgcctccccccgtgctcccgccgccgtcgccatcggctgccgcacctcctttcctgcctcgccccgccggcctcctccccacctgtcgccgccctgcccgaatgagatgaagagtgagagagaggaggaggtgagaaaacagtgaaaagagattggtgatgacgtggacagtctgacagatgggtcccacgtaggtctcacgctgactcagccgccacgtccaacaaaaccagagacaaaaccaccaaaggactgttttgtaagttgagggatgttctatatctgttttgcggttggaagatgattttaaaattcgatgacaagttgagggatgtttggtgtacttttctccgaatgggattgcggagtatatatgggccgtatcttttgtgaaactttttgggccgacgcggtgaggaatttgacatggtctattgggcttcttccatttcccttctagtccgtgtaattaagtatagtcaattcgccatcgtcaacttactcctcatataggagtatatactatctgatcatgaaacatctatctcacctacttcctccgtttcacaatataaatcattttaacattttttatattcatattgatgttaatgaatctagatattttgtctagatttattaacatcaatataaatatagaaaatgctagaatgacttagattgtgaaacagatggagtaattagctacgaacttacttaaatttgtcctgacccgacctggattgatatgatcagtatcttgttggtttatatattatctggtagtacttgtacttaccactaaatatatgcttaattagatatgccatgccggatatatgcatgtacaacgaactaataataactccttaataactgaaaaaataactaataactcttcaactgaaccaagggttaagcagctcgatcgatcgatcatcctctctttatagttattatatatgccatcataatcattaagtatactcaactagtgtactgcacgctagctatttccatcttaattggcacgtcgtggcatagccaactagcatcaataattaacttccatcacgcactttttgtggccaaaggtattacttattcatcaagccaacaactgcatgcagctcatgtaagaactaattcacatcgaactttttttttcttaaaagaagagattaaaatccggtctctcatatatttcataatgttgaatgactttgcaaagtgagtggataggtttcttgtggtgaaatctatctatcctgttcaagttctaaatttgacacatgcgcttttatttatgactaattattcttttaatgatagacgatacatatacccctcacagcgagacactcctagtgatttcttcaatcttaagacatgtcaatctaatctttcaaaaatgtttatagggtagtttgtgtgtttgtaaatcccaagacatatcaactcagttttttaaaagtgtttattgtatttttaaaaaagaaacaataccgttgtgtgtcttatgacataagccggagatgtaatccatttccattatcttaaaaaaaaaagaaacaataccgaatcattcgtgttttttggggtaagtgtgaaatcgtgtttcaaaaaaaaattgttgaacgacttttgacttaatattttttaggtgtgccttttctcatgatcaatagataatagatgaatagtttgtgataattatttatggtataaatgaatgacttaataattataaaattttaaaaaatggatttaaaagtattataagaagttcataatatataaaaagttttagcaaatattgtaccgtttaggatcgagtggcctaacacaactaagtaggagtttaactgaagcaagttaccaagttagccagctaggaataactgatcttgtctcttgggggagacgagtgggtcacaaacaacaagtggcaaagcaacatcttctccattaatcaaatacaactagggcaagtgcgccctaatctcctggtcaggaaacttgggagctattaactgtttgcgattaaactatacaaaatgttttgattaaagggagctacggcaacaaccagctttgaatccttctgaccaagcagaaacaggggtgacataaaccacctttccgacgctgacatcacaaccttcaagcttaattggatatgtataacctgttatacccatcagattcctacaagaagaggaacactattaacttaatcctaatcagggccaacaggatgaggacaaggtcaccatgacatggcacattgccaatttgccttttcttttcttttcttttcttttcttttctttttttttttggttttccttttggtcctccaattatgcacttaaacaatgggatcatttttttgtttcccacaggacaataaaaaggcttaattggactgatcaactattgctgcttgcaaagcttgctcacctggcaaaggcattagtttaagcttggtcgacatgaccagctggttgagcatgaagtgtactagatttgtttgattcagctggttccgagctaagccagataactacttgccaaatagagtatatataactatctgattgatactctcaatgcctgtataaacatgagtatttaatttggtcattagcatccagctttgcttgcatctactctaagactttgcaaccgatatatgcgacaaaattatcagttgaccgacttaatctcttcagctcatttatttatttatttctcctactctgcagcataatcggagttgattatctaattgggtagctgctgggcattcatagtatgattagctcaagtacatcactacatctgcaaatggtaattgtctaagcaatagtgcccatggcatcattgcattacaataataaccagtttgatttgttcaagcaagaagaaattggtgtgtgtaagcatgtgaatttgcattacccatggtttaattcgatttatatttacctcctgcagcaggaccgacgaccggccggttcttaaccttttctgaagaagaacagttctgttaacgtcaacagattcagcaactctgtagatgaaatggtaaaggtgattacaagtgctttaattaattaattaattttttttactggcgtcaagtttcgagtggactgtatctcactctttttcttacctgctcgatcgtagttatttaattagtcactcatggggcctcatggtttcacattaatctgatcctcaactgtaatataccaatatatactacacttatcaaaggagtgatcaaagcatgacacagtgagcaaaaaaaaaaagcatgacacagtgatcagacataaaccttggatcagcatgcgcaactaagctactggttcaaagatcaatacacggtggattgaagaatcattctttcaacctctctcacttgtaattattttggatatgtaaagttaatgtacatggattattagtatctaaagctgtgaaatagttgtacgtacgtacgtacgtacgtgcagtaacagaatttagactgatgcaattgatttcacaaaccatgggagatggtgacgtgcacgacagcttgatttcttgatctgattatataattagggtagtctaatcacgctcccacatgtatctaatctatactacgtagtactatctaacacgcggagactaaggaacatttcctccccgttgaccacaaacgaacacaagatccatgcatccgggccgttggatcgtatgaatcaacggctaagattatccacgcgccaagcacgaaaagtcagcgcatgtacgacgggcaatgagaaaagtcataggccgttgatccctgatcggacggtccaggatcaacctggaaagatcccacgcctagtcaccatctatatatacgtggagactggagagagattagctttgtgattagtaagcaacttaacacaagatagtcctagttctagctagataggtttgaagagctagccatggccaccattgttgcatgggagagtagaaacctgcagctgcaaggaggaggaggtggccatggcggtggcggcggcggtggcggcggcgagcggcgggagtacatgttcgagaaggtggtgacgccgagcgacgtggggaagctgaacaggctggtggtgccgaagcactacgccgagaagtacttcccgctggggccggcggcgaggaccagcccggcgggcaccgtgctgtgcttcgaggacgcgcggggcggcgacagcacgtggcgcttccgctactcctactggagcagcagccagagctacgtcatcaccaagggatggagccgctacgtccgcgacaagcgcctcgccgccggcgacaccgtctccttctgccgcgccggtgcccgcctcttcatcgactgccggaagcgcgccgcctccgtgtcgtcctcgtcgctggtgccaccggccttgatcaaggtgcagctgccgccgtcgcggcctgtcgtcgacgaggaggaggctgcgtgtggccggcggtgcctccggctgttcggcgtggacctccagctccgcgccgatgcctcgccggcgctggatttgcagctttgatctagctgaggcatctcatcagttttgtactaattctccaactgattagtattcattttccctcaaaaaaattagtattattcatacacgaacatgcatgctgctctcctgtcgaataaaatgaggtcgtcgaagacgaagttgtacattagattagcacaagattaattaggaggggtgaatttaattaattagacatggatcgattgatatatatgcactgaagatgattaattggacgatggaagcaagcaacaacacaaggctaaggtacctagctagctttgctttcatttttccaaattaaatttcatgtttcttgtcagatcgatgaatagaatttgtttttgcgggttgattgtgaatttcggttctcctgttcttaatttcgccctcttcacacgcgtcgccatacgacattaacacgatcgccctcttaacatattctaattcaactagctagccacctacaccatgatcagaacaagaaagcctatcactatatatctaactaagctctagctagctccaaatatatatatatatatatatatatatatatatatatatatatatatatatatatatatcccggccacttgatatattacatacatcaggtcaattaaacttactcatcttgttcataaacaatctgcagcttgactgcatttatatgcagtcatagcagctagcgtgtaagttcacttggtgcaaatcagggaaaaatcaagttggtaccaagaaagaggaaggcccatgtacactgatgtcttcaataaacttaattaggcccaccgcattcatgcttcagtgcccatgcggcccagcccatcccttcaattgggctcactgtggcctagagcctactccagtagtttatctttggcacagacatctctgccccaggacaattatcaacttctttacacattaacccttctaatcccaccgtcaaatatttattcccccaattccaattcctggtgcctagtttcatccattacgctgtttttttttgtcaaatggtactaagcacatggaaaacaaatacaataattaatctctactattataaaaattaaagatgtttttgtcggtactttagtacgtcattcgtgtttgagtcggtttttaaattcattcactttaaaaatacatatttgggtttgactcactttctaacgtcattatcttttagaaatttagaaggagtcgcataagaaatcttttaaaaa

SEQ ID NO: 24886 - DNA, 580 bp, Oryza sativa
  unsure (1)..(580): unsure at all n locations
ctgactatacttatagttagctctctctcctgatctctctcttcacaattaagcagctacaaagaatataatggggttcccggtgggtggctactccggcgtgccacggctgctgctccacctcctcttcctcctcacccacctccgccgctctcctcctgcctgctccgcctcgccggcgccgacatcgacgactccccaaccgccgtcgacgccgaatatgacggcagctacagctacagctcccagtcgtcccagctgctggagctggacgaccactccccggcgctgcgcttagacnnncttcatcatccctgcagccgccgctccacgtcgccacctgcgccgtctgctccgcgacttcacaagtccgcccaggtgcgccgcgcccatccgtgccgccacgtcttccaccgcgcctgcctcgacgcctgggcccaccacggccaccgcacatgccctctctgccgctcgccgctgctgccctagtcgaaaccgcccgttctcatgccctttccactccctgcctcctagccccagggtcctttctgcataattatactcgcatagcaaaccgtct

SEQ ID NO: 24887 - DNA, 525 bp, Oryza sativa
caatcaaataaattagctgcatgctaagctggagcctgccttactagctcctgcaaaatcatgcagcaactgagactccatgaggttcctgtaagggagcacgtcatcttcttcttcctccgccgcctccaccatgaatgactgctgctgctggtgctggtgctggtgctgctgatgctgatgcatcatcgacgccgcaaatggctgctgctgctgctggagccctagagtaagcgacacggcgccgccatgaccatgatgcaatcctgctgctgaagaatagctatggccgcccaacagctggtggctgctgtcatggtgatgatcgatggatgttgatgctgctgcagggatcatcaacgaggaggagttactgtttccgctgctgcgaacgtggagatggtagctgctttgttgtactaagctggcttctgctgtcgttgccgtgtaattcttcttgggatcatctcgatgctgctgtttgttgcccgctgcgctaaggtttaatttgttgttgccatcaga

SEQ ID NO: 24888 - DNA, 4930 bp, Oryza sativa
atttgtttacagtgaacgactctttggatggtcaaaagcctgatatttttccatcggtgagatccagtagggttgaggggctactaccagaaaaggcagttgatgatcttaattataggcttcaaagtctagtgcctggtgattcagaacatgttcaagtacttggtcctgatgcgctgggatcccattctcatgaacggcgttatcaggctgaatctcaaaatctttatcatcttctacaaggtagaccacctgcactggctcctcgtcctatgatggatcacattggtaataggaatcagcaaaccccgtttgacatgacacaagcgatacagcatgatcctcaccgttccttttcatcgaacatgaatcctatgcaacaatctcttcatgctcctcgggctcctcatgtagacccagctgctcatcatcttatgatgcagcacatctccacacctggaaattttccaccagaaggcctgcaaagaggtgttccgccatctcagcctgtgcatcacatgcctggttataggcctgagatgagcaatgtaaataacttccatatgcaccctcgccagcccaactatggagaatttggattgatgatggcaggttagaaagcctctgcaagctgatattatatgttgtgtgtatttgcaaatttatgttgtcacagtttacaaaggtgagattgcagaagcaggcctgctacaggtgacaagataatatatgtgtcccaaatgtgacatccatgactgaaaactacagaattcactaattcacatagacaaaatctctaatctgaattatatggcactaaggtttgggaatatgaattgtggtataattgtgtgcttctgctttccttgagcttaacatgccaagtacttttttttcgttattcttgtctataccaattgttttattctctatatggaacgggctttctattatttccttgaaatcactttttaaggggaacattttctcgattcgttcattgttaggactacattaccattgtttgtcaaccaaataggtttggtttttaccctgaatttacctgtataccaatttggaccacatgtttgatttctgttctttcgtttttcgattttaggtccatcaggtccagaactgagaggcaatcacccagatgcctttgaaaggtttctccagatggagcttacagccagatccaagcagatgcacccagcaatggctggtcatgtacctggcggcatgtacgggcccgagcttgacatgaacttgagatacagatagatggatgcgtgtgattgcttatgcagtatgaaggacccagaaacggtttgctgtacttgcgtcaaatagtactctttacccatgccataccgctatgtacctgtgtcaatgagcttgggttagcgtttaccatcaatacaatcgtttggctgcgataaggtacctgatgattcactggtggtgggggttggttgcatttgcatataaatatggagaagttatgaatgggttggtgatctggagtgatctgttgtgaaagtggggaacccaacgaatattgggtgaggtccatcaccgtagcagccacctctgcattgtgtctgtctgcctgcctatctgttgttttcagtttctgtataaatactattctgcaaaagaaagtaccagattgacagacacatttggaagtgtttccctggcctcaccttttcttttagctacagtagcattttatgtttaatttagtttctaggataaaatgctatccatgtaacgattctctggtatttaagcatttaccccctccgttttcaaaaaaaaaaaagagaccaatcctaccaatgaaccttgattcgtagctaggaatttgtttttttttaacggagtagtagttcagaataaggagtcgccgcagaaagatcaacccctcagaacatgacatgttagaaaaatagtgtataacattggtattttcctatactaagctatctgtttttttaaccaaacaatttatatcaatccttcttttaatatatgacttttgcaaatatatgatttttgcacgtatgtatgtaattaccatttattttgctaggatttgttcttttacaaaatttttaacaaaattatatatctatactaaacagttgtggtggagtagtcactaccactgacatgcgatgccattgtagggggctttcacccattttcctgattccctccttcgaatggtaaaaaaaaaacatttaaaataggacagagggagtacaatgtatgatgatttattttcttctactcgtatatatgcaaaattcaatggtaacatttttcaaattaaataaatctagaataggatatcatgttattctaagttggtttattttagaatatattataagtgggtttattttggtagggagcaaacaattcatgggcttaaaatgttgggaagtttctcatttctaggcctaaacgatgctagtactaggcaagtagagtagcagccaaagcggacaccgctaccacctccactacccaccttccttccttcctgaggatctccgcttgaagaagagaaccccaaccctaaccctaactccaatggcgttcgccccgcgcctcctcctaccttcccggtgccccccgccggcctcctcccccgcgcgccacggcggccgcaccgcgcctgagctgtccggtcccaccccgcgcgtggtggtggtcacctccggcaagggcggcgtgggtaagaccaccaccacggccaatctcgccgcctccttcgcacgcctctccttctccgccgtcgccgtcaacgccgacgcgggcctgcgcaatctggacctcctcctcggcctcgagaaccgcgtccacctcaccgccgccgacgtgctcgctggggactgccgccttgaccaggcccttgtccgccaccgcgcgctccatgacctgcagctgctctgcctctccaagccccgctccaagctgcccttcgccttcggctccaagaccctcacctgggtcgctgacgcgcttcgccgcgccgccaacccacccgctttcatcctcatcgactgccctgcaggtcagtccgccccaccaccatttccatcaacttatgatgatggatgttatatgccactcgatttgctttaacgcaattaataattgtgatgtttatcttgttctcgcttgcccatccctatctattgcccagaattgtaactttaagagccatgatgcaagtcaaactttttatgatgccagtgcataaccgtgatgcaacttatattctcaaagtcaatccatttatgcatattacctattttctattttagattttagagccatatcaagttatcctttgatcattgtaacttaagattttgttttcttacctgccacatataggtgttgtttaggccaggcatcagtttgtttaatttggttgtgagctgtaaatttcaaccccactgattgagtgattgaccatccataactaactgcagcataattctgtcatgtcaatatataattatgaaccttcaccttttagtgctggtctgttaagtgaaaatgttgcaagacttagctttatcctttgcttaggacatggcaccggtgaaatggtaataggttccttttggctttgtaatcactggttaaacgtctattacatttccttaatgaaatgggaatgtcatcctctctttcttaaaaaagaaggaaccttctccttttctatctctatagtgctgtattcactatcccatgttcacagataataagttagagcactgcaattgtcaccactgatttgatcaattccagtgccacaaatattatctgcagttgcctgataataatgttagattataaccagttatatatgcatccacatatgttatgccagattgcttaaatcagatttttctttgtaggtgttgatgcagggtttgtcactgctattgcccctgcagaagaggccgtgcttgttactacccctgacattacggctctccgtgatgctgaccgtgttgcagggctattggagtgtgacggcatcaaagacattaagattattgtcaaccgagtacgcccagacctggtgaagggagaggatatgatgtcagcacttgatgttcaagaaatgcttggcttgcctttgctaggtgttgtgccagaggacgcggaggtgatccggagtacaaatagaggtgtgccgttggttctgaacgacccacccacaccagctggtcttgctctggagcaggcgacttggcggttggtggaaagagatgcaatgacagcagttatggtagaggagcaggagaggcccaagaagaaagctgggttcttttcattctttggtgggtaatttgctgtgagattaatgagctcagtgtaggcagtgtgtacagatttgcgttttggagctacgattgtttttcccatttcttttgctttgttatagtgtagaatgattcatccgttgtgcttaaatccatagactggagtattttgccttgtttgctcagtacataagtaatttacgaagatatgttttggtgcttctagtcttggatctggttttacgtcagaattaagcaagaatggagatgctcgtttttgtcgtcagaatcaaaccgtatagttgtcgagttgaatgcttccatagttccattgattttaaactgtatactgttcggtttgacgccaattactttataatgtttcccttaaaatttttctgtcttcgaggactaggtctggttgatttctttgacattttgccagacctttgctatctcggcaatttgataaatggtagccacatcataacaaggtaaattttgtatcacgacatcaaactcaactggaacactccgaaatcttttgatgattgttgaatattttcttatcaata

SEQ ID NO: 24889 - DNA, 2055 bp, Oryza sativa
tatttgttaaaatcccaaaggggacgctgtcaccactcttcattcagagttgcacttgctgctgctgttgttgctgctgttgctgttgctgttgctgttgctgctctttatcatgttcagcaacttttggagggaggtgcaaggcctcctgcctcttgccccacagcagaagataaaggccacctatcacaagtacagatcccagcacgctgcatatgtgtatggcagtgcaatggtttcaaaatctgaatgtgcaatcaatctgacattacttacataggagcatatatatgctgtaacaatgagtaaccgtaccttccaaggaagagctgttcatggaggacagtgaagtcaatcactgaaacaatgatctgcaccaccggaatgaaggctgcgacgaacactggaccgcgcttctcgatgcaccatgtcagtagcacaaacgaaaggccacaccccaccacaccctgaaacaaaagaaatgaagaaagaaaaaatgatgagaaaattaagcagaattgaagctctgtaagtgatcagtgaattgaagcaagaagaaacagaaaggagttgagtaattgcgtacggcgtagaggatggtgagtatgtggaacttggtcctgacgatccagacggagacgttgcgttgtgtggagaggccgacgacggccacctggaggaagctgaacatgcacatgaaggcattgcaggagtagacatgggggtacttcttggcgagcctgctgtggaggaggaaccagcaggagaggcacacgcagttgcccaggatggccaccgtgcccagcgtccagttcctgctgctcatggctgcttctgctgctactgctgctgctgctgttgcatggtggatcttggttgtgtgggtgacagccacgcccttgtaaaatgtcagcaccatggctcctgctactgatatcagcgtgcccacaagtttgcaatgcctgtctttctctccaggttcagtgattttgacctgtccattcgtgtataaggccaggccaattaattggcaagcaaaagataaagagaaaaaggttgccacttggtgtgcaataattcagaatttattgggtcttccaatcaagaacctcccgtgttaggatggcaagcaagaatgtgaggacagaacggatattggagaaggcagtgacgaaggtcgccgtggtgtatctcaaagcaacgaagatcatgtactgccttagagctgccctgcaagaacaagagagaagaacaacttagtaaagccatgaatttgttttttcgccgggagatgaatttgttttttcttcaagagcaaaagaagaagaaaattaaactagaggcaaaattcgtatgaattgaattggtacccgagcgcagcactgacgaagagataagtgaagatctccagtgtgagctttggcctggacttcctgcatgagcacaattcaataaagcagttacagcactgaattgttgaataatccaggtccaggatgtgtagatgcaagtcattgatgaacacctctctttgaagtaggcaattgggccgaggaagatggcggccgtgagctgctgaagagtgacgaggacgagagggttgaggccgccgtccatggcgaccttgacgagcgacaccaacaccgccgcgacgacgttgagagccagcatggcgatgaccggcaggccacctccgagccaccaccccatgctagcttcacttgttcttggaagctcgatcctctcggtgcagtgccctctgctctctgactggactgcaacaacaacagctaagctaagctgtctccttgatacaacaacaaagtcagtttcaggtagatttatagggtttcgatcgatagaggaaggagatgaaagaaagaaagaatgaggtggcgaggatgacaagacacaaaatgctggacgggcaggcgcagggggtgaccaaagaatcgtttcaggtacgcctttttcgtcctgaagaaaaaaagatgttgatctctgaattctgatgatgatgatggattagtagttacagcatttgggtgaccgatg

SEQ ID NO: 24890 - DNA, 1787 bp, Oryza sativa
ctaatgtgatccatcaaccagtcaaaaactaacttgcaccagtccaaactttcaattaagtccatgtcttcaaaggcacttaggtattttgtactcggaatcaaagaagagttcggacaaaggaagcaattcaaggaaacaatcataaagcagatgagaatttgatcatcaggaagttcttcatttttaattaacttttctccaaagaacttgacagaaggaatagaagttttcccaaaaatatgaagaatcttttgtttgccagaatcaaattttgaatggattgtactaccaccaacatggaggcctagcacaacatggacagattgcttgttcaatggaataagtttttggcccaaaactatatcagaacagttcacatctacttgttttgcaatccaaagagcaaaagaattgggaacaaaacacttgtcaaatagcagcatgcttcgaaaacaagaattttcaatgactgttttgtgatgtggacttaaagaatcaagaacttttgagaaatatttgacagagaatctagagaatgcatcagacttcaaatcagtgtcaacatttttgtcctaacaaaaagaaaataaaacaaattaattaataaataaaaaccaaacatagatataaaagggcattgcaaaaaactaaccttcaaattttgatcacctatgttgtgatgaatattaagcttttttttcaaattgttgataatctgatccatttgtatgatatcacgtagaacctgatttatcattacatcattgtccaattcaatagattcagaccttttcatctaaaaaaattcaaaattaaaaacaaaaatgatggaaaatataaaatgaaaaataacaaacaaaataattaccttaatgttatcatcttcacttcttttagacttactgagttttcttttcaaagttttcagaagttcatttgtagaaatttcatttacatgtggttgtgaaacatccatatcctaagaaaacatattaaacagttaaaacattgcaaatgtgctatgaaacatggctacaacagaaattacattaagatcatttgtagaaattacattaagatggtcttgtgaaggtacatccatatgctgaaaataaaaaaagaaaaattaaaactgtgcaaatgcatatcaatgaagcattagtgcaaaagtaaaacaaaagtaacaagttaaaaaaaaacttacatgactgtcacaattatcaccagaatcacagtaaaaagaaaagtaacaagttaaaaaaaaacttacattactgtcactattatcactagaatcacattggtagttatcatcattatttggcaacgattcagaatgaatatcatcagattcatttaaagactggctacaatcctccaattttgagcgcttttggcgaaccatctgttcaaaatttgttatcagcaaaaatggggcaaaacattaaaatattatatgaaattggggcaaacagagaaaggcccatgggttaaaaaaattaagttcacaaacatacatacaaaattaatgtaattcactagggcatacacatgcaaaagaaaatggtgtacaattaggtaaggatatgaacattgcacaatgtagtgatgcattgcagaaagccccatcaaaaatcagctagcaaaaaaaatcataaaaagcattgaacatattcagagagggaaaaatgcaatgcactactatgtatgccaaccaaagctaccaaatataaatttaaaatcaatgtgtaacttctgcatagcgatgcagtactgaaaaatat

SEQ ID NO: 24891 - DNA, 27353 bp, Oryza sativa
  unsure (1)..(27353): unsure at all n locations
tagtaaatcatcaacactgtgctagtaaaacttttcaaattgaagttgagcttctgtagcatgaacataagtacaacaaatcaggagtacaaaaaaattgaaataaggttgaaatgattggttaagataaatcatattcctagtgaaataaaaatgttacatcaatcccttttggtaaaaacaaagttctacatccatttgatctcagagaaaacatacatagcaaagagaattacattaagatcaaattaaaataactacaataccaaaacacattacaagttacatccctatcatcagatagagtactaaaaatcacataaaccttacattatatccagaaaaaacttatagaaagaataataaaaagcatcacatcacaaacaatttgtcctcctgcttgtgagcacctagttgcaacacaaatcggtagcacaagttggggataggggggaaaccatgcaaaacacagaacaaatgcaacaacaatgataaacagatgcaaaagcaaaaaatcacacagttaaatcatagatctgaatttatattggcgaaactacacaaaataaatcagcctagtgaattaaaatcatatctacatcacacatcacgttctattaaatcaagagcacaacaacttcaaatcccacatcatgttctattaaatccagtacattcatcctcagatctaaactgaatcaagtccagataacaactagatcgaagattcaaacaccaaatcatacacgaacaacatgacatcgttgtgagaagcaaaacatcacaatctccaaaaagcaaaagcccaccacgcaaaactactagtactggttgcaaaaaaaacttgatccccaaatcctatgcatcaacaaattcgaccacaaatcatatacgaactacccaaaaaaatcacgcatccagatggctaccgattccgtcgacactcgaagggaagaaggaggaagatgagcaagtactcaccgacgaatcaccctcacgccgctccggcggaatcgccagatcaacgccgcggcggaatccctcgcgttgacgacggcaaaatcgccgaaatggtcgcctctctctctgtttctctcacctcccagagaagagaacgagaaaaagttctctccaactctctctctctctctctctctctctctctccgacacggtcaatgccagcaaaaagataggcgcgtattccgaaatttgaacagtaattgtgggttccacatgaaaacaaaaaaaataaaaaaaacgagcccaacctagaagaagcccaacttaagcccgaagaaaacataaaggcaagtccagcccaaacaaaaagtccaactgtcagcccaaacaaaaagtcagaagaaggcccacatttagcccgaactaaaaatagtccaaatcacagaactcaactgcacgaatctcaaccatatctaacagcccaaaaaagaatgattgaggactcaaatatcatgcgacagtaatatagcctttccgtttttaattaccttggaggactcccccccccccgcgtcgcccacgcgctggcgacccgggggcaaaaccctagcagcgccgccgcctttcctctcccccctcccccacctctccgccgccggaaagtcggcgggcgagccataatggcggcgacccctcttagcgcgggagaggcggcgaacggcggcggccaatgccggcaaggagacggcggatctggcttcaccttcgccgaatctggccatcccctggccagagtgggtgctggtggcggaggaggccgcggcgcggcgacgcgacaaggccggcgacgccggcacgacgaggcggcggcgacggcacggcgacgcgacggcgacgacttgcacggcagccggcggcggccgccccgacggtgagatgcgcgcgggcagcggtgctcgcgccgctggggggcgagtgacggctgcagcgccgccggccctggtggcagcgggccgagtgacggcggctgcacggcagcgacggcggcgcgaggcttgggaacgacggtgtcggcggcgcggctggtgatgggcaatggtggcggtgccagtggcagccgcggctgcagcctgaggcagtagcggcaacgcccgtcggtgcggaggcagaggcctcggagctcgtcgcagcggcggcgtcagcggctgctgtggcacggtgagaggaggcatggtggtgcgttcggcagcagtggctgcggttgcggtgaccacggtcgccggaggcatggtggcctcggacgactggcttgaggcgtggcaaacggctacatcggaccggcgcagcattgtttggaggaggggtcggagaccggcttggcacagagtggcatagccgatgacagcggaggccggctcggtgcgagaggcgcgagcggcggagatggaggccagctttgcgcgagaggcgcgaccggcggtggaggaggcgaccttggtgcgaggaggagcggccggtgggtatggcgtggtctttggcgcacgaagactggctggcgggagacgccagtgcaggggtcccgtatgtcggcagagctggagaggtggtggagcaccggtgcgtcagccaaggatttgcaggtggtgagcagcgggtgaaaacctagtccggccttggccgggccgacgacaatggttcattccccctcctgagggcgttgtcgtgctgtctcacccttcaagggcggttgccgggcaaaagcctagtctcggctcctttgagccccgacggaaggcggcggcggttttttcggtcgcttctcttcttgaagacgtcgtttttggcatcccttagagggcgatcttgtctgtgttcctttgttggtctagcggcggtcggtcacgcttagcggtggccggtccggtgctatcctcctcccgggttgtgtgttggcgctgtcggtgtgcgggtgttggtatattttttttcctttttcctggttacgaccctctagggttgtaatcttgtaattttttcctgctctatcaatagaacttcgcaccgtctcgtgcgagtcgttcaaaaaaaagttatggagtactccctctgtcaaaaaaaaagcaacctagtattaggttaagttttcttgggacagagggagtagacattaagcagatgaagcaggcagtgacaccagcgcacacacagatagagagagcgatgtatgtatactcttaggcagcagtgtgtaaaaactattgaggcaatctacctctcgtggaggctgttcaagtcattatatacgatacagcaatagtacaactcaagaccgaatcgtatattactaacctatacagattctacatacacaaggaaaacacctatacagcatcggaaacgaatcagttatgcagtaacgtaagcagcagcatctctattgtttaacacagtgatctctgattaattattgtttgacagacaattgacaatcgagcgctgcgctgtataagactgacgccatagttaaaagttgccatagaaagatgtcaaagattttctttcatcagaatataagcatgcaaagtggctgacgactaatttctcatttgtatttcacgaactgaagtttaagttacataattgcagagcaaggagaggcagcactgacatgacgcagagcgagcgctgtgaagcagcacagtcagaaaggtcactctgggttattgtttttgtttcagaagaccgcacgcagaggctagtgttgtagtagtaacgacggtcacagctacagctacagcgctgcaggctgcagccagatcagctagatggaggccgggacggagtaggcgcactgctgcatgacgagctggtcgatgggcagcgtgtccgtggggaacgggcaggcgccatcgtgcgccccctgcagcggctggcacggcgccggcgtgacgccggtggacaccccctcgatgtcggtgcaggtccacgggtacttgcgcgacttggagagcgtggcggtgacgttggcgatgcagatgccgcggaagggggcgccctggatgccctccagcctggcggcctccttgtacacccccgtggccaccacgtcctggtagctgatgttgtccacgacggggatggcgttggggtcgtaaccgtcgtccgggtgggacttgtagttccccgtcatccagaacacccacttcatggtgtccagcgacatcccccggacgaacacgtcgcgcacgtacgccccacgccccaccgccgtcttgatccgcaccgccgactccgagttcaccgccgttatgtcctccgcccgcacgtcgctgatcccgcccgacatctcgctgcccagcgcgatcaccgcgcttgtcggcgacacgcacgtcagcctccgcaccacgatgtgctggctgggcatcccgtacgcgatcccgtactcgtcccacccggacttgatcgccacgcagtcgtcgccggacacgatgtagcagtcctcgatgcggacgtgggagcacgagtccgggttgatgccgtcggtgttgggcgagtgcgtcggtgccaggatcgtcaccccctgcaccacgatgttgctgctgtacaccgggtggatgttccacgccggcgagttcaccagcgtcacgttcgatatcaccaccgtgtccgagtgcatcacctcgatcaggtacccacgcgtgtacttgagcttgttcgaatggaacttggaccaccacatcgccccctgcccgtcgatcgtcccgttcgcgccggtgatcaccacgtccgtcaggttggacccgccgatcaggctcgcgtaccggccgccggccttgtcgcggccgcggccgtacgacgggaggggatcgatgatgggccactcgcccatgtcctgggaccccaggatgacggcgtcgctgtggaggaacagggtgaagtggctcgtcaggttgaacggcccagtgagccacttccccgccggcacgtacagcatcgccccgccgccgccctcgccggagtactgcgacaggtggtccaccgcgacttgaaagccgccgtgttcgacgtcgtgccgtcgcccacgccgccgaagtccgtcagcgacgccgtgtgcgcgcggcagctcggcgccaggtacatgctctgcccggcgatgggcgccgccgggccgtggcgccgcgccgccaccgtcgccgacgcggccaggaggaggacgcatacggaccgaagaacctgtgccaacaaattaagatcatcttatttactaaagtactctcctaaataaaagggaggaaaatatgaaaaattgcagatttcgacatactcagatttctcaatctactgtgcttgctagttacttcgacagaaaaggggatggagattgctaattggacagaaaatttagtgaaaacaaatactatactccttataatagaggggaaaaggtggtgatgaatttcagactttgacagtgaaagctcacataatttgtactactgcactgtccgacacacccgacagaaaattttaaccagaaattgggattcaaaaagcagggagcgcgtgatctttgtttagttggtagtgcattcctaaagcattgttaaatcagtatagaaaacgagacaagaaaaaaaaacattactgtacaatattcagagaagaagagagcattcttcaggataggagaagattaggtacagagaaacaggaacaagcaatgaccaagaacaggttgcaagacaatgaaacgggcgttctggcactgccattcataagatttttaggacagccataaagaatacagcaagcgaaacagctacgcaagcaatgaatgatgctactaaatagcaagatggaggcagagtcagttacatacatgaagaggtgacgcatttggtaccggctgcgtttgcaacgccattgctctggatgagagtggagtgtggtcacggatgagatgagagaatggagtggggtggattggatggtaacggcgagtgaagctgcagatttataggaggcctttctgcactattgagcactcactcctgcctcatccttagtactattaattaattagtgagatttattatccatgcaatccagcactaactttccctgtcttttcttttctgtacgactcctccctttttctcttcaaattgacatcctgaatactttatgctattaccagttcatgtgaaaaatttacctttttactagtagagcttttcagctgcctgcctgcctgccaatagcccaatagcttgctttttaccggccacccggcctcatcttatcgatgcctagattatattcgctgtgacttaatacgaactagtgaactactaaagcattcagtttatactagtagtagagttcttgtttgttcagttcagagatcacatgtgatggtcagttcagtgttgtgctctcttttcaggttgtctgtttccctatcttaacactagatggttgatactgtcaatcagtcacgggtctagaaattaggcagcagcatttaccctccgagtttatatcttttctataacatattctcaaattaaacccctaattaattttcagctataactaaggtttttttttctgttactgaatcagctctgtttttttttcagtctttattgtgcactatgaagtatgaatgaccacatgctgtattttgtgataaaaaaaagtgcatgtgttaaagctgtgattgtgggacggtggtaatgaacaattcatttgtctaatcaatcatgttgtgatcgatgaaccacatatatatggtgcggtgcttgtcatcgtcgtcgccggaattgaagtgctctgtttcagtgcgcatgcaatcctacgcaagacagtctttgggaagtcgccgctcgtgctggattttgtggccaccaattgctttagaattttgtgcaccttttggttccactagttagtatagtagttattattcaggaggattaaacctgcttttgcacctgatttccctcctttggatagaaaagggcaggtgcatccgtgcatgagtattactccatatgaaatcagcctgccagatcctccaaaattaaaagcttatggccaccgaaggatcacatttggactgaatanctatgatagatcatgtgtgggggtggtgactggacatatattcagagacaaactgccggtttagtttttttaaaaaaaaagaagccggttcatagttcatgcattgcgtctcattgtattgtactactatcagagattcagagagagagagagagagagagagagagagagaggaattcagccatgtcacggggcgttcatagttggtgagattggtcgttctttgtggttcacgggtggatcgtagtatatgcattagtaccattgtcgtattattgttgtcggtcccattacacgatcacgatgctttcggccttcactctactactactaattagccttttcttggattacgcaaagcgagctcacgagctcaacatacatacggatatgcttgctcgcctcagttgagtagaacttgagtgttcatcagctcagtcctttcagttgttgctgtcttctcctgaatcagtttcagtacgctctctgccctctgcagccggttccaaactgtaatcctactccgagcatgcaaatgaacctcagttaattcattactgctgctaatcagtgaatacaagtgtttttttaactaggagagccaagcaaatgagacattacatcagtgaaatgagacagaaatgagacattacatcagtgaatacaagttgttaaggaaaaatgttacaaacaaatactactatgatactattcagtgaggctttaaggattcagacagaaaagatagtgaatgctactgtagtacatgttcggtaccactacaaacacacactacacttgcattgcatgcgtgcaagcttaacttaatcaagtaacaagtggcaacctcatgtctgcatgcgtgctttacgcgcttagcttcagtgggtcggcgccgctctgccatatatgctatgctctccaccatcacaacaacattcacaactcgatcagcaatttatttattttgagcaggctgcacatgtacatattacaggatatcagacagctgaaaatgcttgtccaaccacaatatttacatatgggaattgaaaatgcatgcatcacttaatatatatgctggtccaagcacaatccatatttttacaaggtcagaaaagaggccgaaattatacgcacgcccggtgcttttcgtcagagaaaagggtttctccttttcctttcctttcctttcgtttgtggcacgcccggccgtccagtaatgggatgggattggtatcgcccactaccattttccatccatctattccattctcaacttaaatcacccgatcattgctcagtaaaattcaagtgaactgaaaggagtcacagagctttcggtgataatgctggcggcggcgaaaaatcaaggataactcaacctaggctctagaagtaaaacgactctcacaacttatcctttaactttgtttctttctcgtactttttttttccgcgaagattacatttctttccttacttgtaccttttcctttttctcctgctatatataataaaattggtatggtttaagtgccggttagttttttttaaaaaaaaaaaagaaatcacctagcaagccgatatatatactcttgtttttacttaatttttcagtgataaaacagtaaaaaaatgacacatagctttttataatgaaaatggtttgaatttccaatctctcccagcaggcacgcaacgagcaaaatgacacatataaacacatgtttataccaccatacatacatgacactagcaaggagtagacatgtgtggtgttcaggcctaaatatgttcatggacaatcgatctgcagtagctcttgtgtgcgatgcatgccacgtacacacgcacaaatgagcttaccgttcttgttatactattatgtaacatatactccatatcttttggctttttgcatgaagcagtttggggagttcgcacaaaggtgagagacatatatagatcgatgggaatgcagtccccaccactcacactatagctagagagtacagatccaatattaacactgttctatcaattaacaatggaatgactgctgcaaaaaaggaaggtggccaggagccaacccaaccatgcatggacaacaataatacatgcactttctatccactagaattagagtacatgcatatgccggaaagaaattaggaaaacaagcatcacaacctggaggtgacaattcatcaataatccattccagccacatctgatctactactatgagggaatttaacatgcagatgctaggttatttctggtcgagatgcgatcatgccaacacaacgaaacaatcaggtaagcatcatatcattcatcactagtctcctcaactctcaaggaagctagctaggccatctaaaaatgcagtttacaccacaaacactttcaatcaaataaggcaaggagggcccattacaacacctatataattaactgacaccaaacatttttgtctttgaactcgtaacatgcaacagtaaaaatggctttcctataccaaactttggtttctaaagaaaagaaaaaaaaactaagtatcactctgataaaaagatgcatcttatgtgactacatacagattatgcatttggtatgtttataatcctctctgtatttctgttcagcctattgttggttccactgaccactttcagactcagtggctgaagatgctgccgctactgcttctccttggatggtaaatggatcctccctcctcttctgcaatggtgagacaatggctatagggccagggtggatatctgactgagcaagtgcttcttgatagagtggtgcttcacaatccgtcaattgctcccatgatgaaaatgtctgggacatgccccaattggtccatctcaattggggaacataagcatgagagacacttgttggtttgccagaaggataagcatctactccttgtgaatctggagcaaatccaaagcccacaaaatcctcccagtggttgcatattctaaggttgttcaacatcaaatggcagggttcctcggagtcttcgtctatgagaacatgaagagccactgcttcagctattgcagcaccttcatcatctagcctctgttgctcttcccttttctgctgccgtttcttctccagttctgaaataatagcagccgagtttgcaagtgctttctctaaccggcgccttttcttctccgcttgcttttggcgatccagctcatcttttgcatgcttctttttccctttcttcaacaccttgcctccctgattgcctccagccttatccatggaaaatgtgccaccttctcactatatgtgatgttcctatacaaatcaaagattcagaatcaaaagatacctcaatgatagattttattttaatgaagaagctattcaggcagtaatgaattcaagatggaatacctaaatcaactcaggagtcaggactgaaagaatatactgtttcttctattgttaattttgcccataatttcttgctgcgcagtttttgccccttttcatagcacaacaaactcatatggatcttctcctgtattaaggaaataacaaagtgaggtactgactactgaactaatatatgaaggtacaaaatgcagatgctggagtaaagcaggagagcatacaaggtgattcttagcagtcaaaggaatatacacggggaataaaggccatcaagtacaacatatgtttgctgacaggcctaagatgagggtgatacattacttgttgaacctgaacgcaaagtcaagccaaaccatgttgaaaaaaaatggaacatttttttcaaaattaaagtttgatatgcttttggttttcggaatttttcaggaagagacagtggtatcttaaccctattgtcaactacaaatttcaataacatatatggagaacagaggaatataaataacaaaggcaaagaagatgctagcagccatgtactatgtgcaccagaaattataattagactaagaactaaagagttgcattcttagatataatatgcagaccacgaatatttagttcttatcattaaataacacatagctggagcccaagatcaaagattaatacttctagtcataggaaagtctacttttgtgtctcagatttaataaagaccaaaagattcatatcagacaggagctgtcttcctaagcccaacatcagactaaactccataaaactatagaagtgatcctgagtaactgcagttaatactaatattatttgtctcatcacttagcatgggaaaatgcagcctgaagatacaattcacagctgccttgcccgtgccaaagggttctgattccacccacccggagcttgttggtcctccagggctccttccaagcacaatacgcattaatcaccgccggatagtaggacccagcgcgacaagtttctggctttaattttcacagctactctaaatacccctggtgaattctgttgtgtatactttgtttggaaattggaaatatagacgggtcatagaaaacaagagtgcataggaactagctattcaaggagttagctacatactaaccaaaatttacaagtttgggcatccagaggataaatagttatgacaagacattccccctcatagcattaattggaaattgaacctaaatagtggagtcccatttttacctatttgatcgccaaagccaaaagtttcctaatagagtagacaaaatcaagcaaaatttgtatctagcgtaaggctttcaaatcctcggaaataacctagatttacagatttgatcaatactactatatgcaaaacaattaccaccactagtgttatcctggtacagttgaccggaaaaaaaagatggaaaattgaagcaattggcgtcccttgtccatctgagtaagaaacaagagagagaattgaggatgaaggattgggggaactcacccctatggacctatatgcgtcccagtggcggcggagaaggcggaggagggagagatccgttgggtgcgagtggagatccgggggggaggaggcgaagtcggcgagcggaggggggtcgagatccggcggcgaccgagtgcgtcgcggcctcgcgggggaagagaagagaagagaagagaaggcggcgacggagggaggaaggaaggaatccgcgggcaccaaaccggatatcatcaattaatttccctccctccaatccaaccaccgcaaaatactaccgctgtactacatgggatgggatgggtgggaccatcggtatccaagactattatctctatttggcttaaatttgcaataaaaaatttaaaatttctcaagccaatttgcaacgcaccatcataaaatgccactaagttgaaaaaaagaaacatcatatttgcaatgtagatttagactgggtgacgctaatggacgggtgatcgccgtccctccccccccccccaatgcactcctctccccccttcctcctcctcttcttctcttcctactacaccataattttttaaagaaaataaaaaaacaaagttagaaaaatttatgtatagaaatactacatataaaaatatttgaattctaattctaatttgaatcaggtatataaatttttgacttataaactttgggtctataaactttagatgtatagaaatactatatataaaaaatatttgaattcaaatttaaatttgaatcggatatataaacttttgacttataaactttgggtctctaaactttagatgtgtaaacttgaggtgtataaactttaggtacataaatttactaaaataggaaagtaatgcggtgccaaaaaagaaaaccacatggaggagggggtgatagctcggggcgatcgattgcccattaggcttttcgattcagactttacatgtcatactcatataaaggctatgtttagttcctcaaaaacttttcgcaaaaacatcacatcgaatctttggacacatatatggagcattaaatatagataaaaagaaaaactaattgcacagtttgcatgtaaatcgcgagacgaatattttaagcctaattagttcatgattagccataaatactataataccccatatgtgctaatgacggcttaattaagttcaaaagtttcgtctcacggtttacatgtgagttatgaaattaggtttttcattcgtgtccgaaaactccttccaacatccggtcaaacgtccgatgtgacatcaaaaaattattatttcaccaactaaacagggcctatactagatggaaaaaacgttcttccagcacatgctcaataggacaggcaccataaataaaccaatacattaaaaaaatcttataagtattcgggtaaaaagatctatgccgtacggatttatcaccattctaccttatacgatccagtagtagtactacctccgtttttttaatcgatgatgccgttgactttttctcacatatttgaccattcgttttattaaaaaatttatgtaattataatttattttgttatgagtggttttatcactcatagtactttaagtgtgatttatatcttatacatttacataaaaattttgaataagacgaatggtcaaacatgtgagaaaaagtcaacgacgttatgtattaaaaaacggagggagtaatagttattatgtgccacatcatttattgataaaacattttgatttaccttgattctcatcgaacctatctcaagaaaatcgaatgcaaaactcctgctatcgaaaggggggaaaagaaaaggaaagaaacgtagaaagggtgaaaaatagaaagcaagggaggcaggcatgagccaggagggatcacagacgtgactacacagctagtggtagctgatttgtctaaactaactaccactccatctataagagatcctatccacctatacttcaaataaaattttctcttaaactactcatccgatctacgatccgattacaccgttgtgttcgtaacaattaaatatttataacaagatcttacatgattatattttgatgaaaaattataaattacttttagatttcactaaattacttcttagacatataaaagtaaattcaatatagcctaaaattaatttacatatattaagtaacttataaaaaaagaaagtaactttaatgcatgcctttttttcattagccgtgactacacaactagtggtagttggtttgtactccatctagtgtctcctttcatattatttttaagatctatttgtatcattgtacttcactcaaaatatgtgacaaaacgagattcatattgaatatattctaacattttattaatttaaaagtaatttattacatgttatagaaagtaacttccaagttatcaggaagtagctattacatcttatacatggttaattctcattatttattccatcaatgttatttgcaatccatcaaaggttttatcttcttttctcattctacacgaaaaacaaaaatgaaaggagaaaaacaattggtaattaaacagatttatagagagttacttctgaaccatgcaaaagttccttccaattaacattgaagttacttttaaaaattgttaaacttatgtgtgttaatctgtgctgattaaatttaatttctagataaagtcatatttttatccctacaacgaatttacttctaatgtcgtgacaaagttacttccgttttgttttaagatacttttataatatatgtaaattacttttagactttattgaatttacttttatatgtcgaagaagtaatttagtgaaatctaaaagtaacttacgtatataataaaaataatttataaatataaacatttgttcatcgtaatataattatgtaagatattgttttgaagatttaattctaacgaacacaatagtgtaatcggattgtagatcggataagtaatttgagagaaaactttataagaagggaaaagagaggttactttttttcatttttcccttaaaaaataggctttcttggaaataggaatcatggaataatcctgaattctaatgtttatttctatagtataagaaaaactaattgaatcaaattcatggatttaccacgacctcggctgtgaccccatagataaaaatgcaaaatttctatcttcgagaccattgaaaaaagacattgaacgagaaaaaatcgtcggaaaaaaaaagacatgcatgtctacattgaaaaaaagcatgcacgtgtagtagtactttttctcacaactagatggtcgctgattaacactaaatcaagaggcttctcggtttagattttgccgggggatcacccatgagcgagggcgaggaggaggaggggaggcaggtccaggaggtggtggcgcacgtgtacgacgttgcgagcagcgggtcgtcggaggggggcggcggcggcaccgccatcctccacgtcaaccgcttcttcaaggacgccatcggcctcggcggcatcttccacaccgccatccaggtttccccccattaattgttcttccggattgtaagaaatatcgatctgcatcttgcttgcgcccggcccaatgtattcgtcttctacggaaaagaaaaactctcattttgaatgctaagcaaacagacagcggtcgatctgggaataaccagtttctcctgggaagatctttgctcattcagtcacattggaaccggtggtgcacaactcaattgatgtagaatgccttgcaaaaatcggaccttttagaaactggaagaatactgtgagaaatgtagtacacctggtaggacaattcagagcctttttcggcttccacttaggtctcaatttcttgttgattaaatcgtcaaaaaatatcctacattttagctgaaatgttcactacgaattgggtaaatctgcatatactagccttccgggaaaaaaaattatattgatgcacttaataggtggcaatactgttccttgttgaactttcttgatacatggtcttgcaacgaaacccctagctacttactgttgattaatacatgctcattcttgagcatctgcaatcagatgaacccctaggtattgattcattctgtgtgcctattacaggtgtatggagatgaagaatggtcctttggttactgtgaaaatggcaccggggtttttagctgccccccgtgcaaaaaccccatgtacacgtaccgtgagtccatagtgctggggaagacgacctgctctattttcacggtaaaccaaatactacgggaactgagctggaaatggcctggaggctcatatgaactcctgtccaggaactgcaatcacttctgcaatactttctgtgagaagcttgatgtaccaaaacttccaggtccttcaaattgtttgctgattcattaccatataaaccatatgtactcatatctgactgtaatagttttacaacacacaatgacaacaaaatttcaatcaattatgtacagcttgggtcaatcgcttcgcaaatgctggggatgctgctctagaggtagctgaaaatacagcagaaaaggtgcaccattctgaacttctatgctatatgtaacagcccagtgtccaagccggctctagtaagtagtaaccccattatatatactatacacacatagcaacccatttgcacttttaactcaactcatgctaattggtaaccagcttcctttgtgcatctaaggtttatatgctggttcccagcttcaacttaatactggttatactccatttgtatgttcagtactttaactggcactagaaggtagaaacccaataccatatatatcccctcaagtcccgtatatctgctagatttttcagtaacaaaatatggatacagccgtagcacataaactgtgtgagcacatgaatgatacttagatgctcaattgaaataaataaataatatggtgaaagcacaaaaaaaaactgcaaatcagcacttatactagctgtcaaaaattttgaaattaatgtgcacactgtcaacttgtcacatcggtttggaaaggtaattcatgaacaatagttcttagtataaatttttggtacctcctcaaggatcataaaaacaaaagaagtgcaaaaatccaaataccatgtccactgactattaacattagttagttttactgcctatttatttggagtaaattgatctggcatagatcttttttacttttcactcagctgaagcaagcaaaaaaggacattgcgggtgcatgcaaagcagccaccacatatttgactggtgcatcttcaagttcaccatcaaatgcagatgactcaggcggttcaacaaatagttctctttttgaggggacatggctcagaagtatcatcggcatcagtatgaaaccatcaaggagtctcatgtgttcggatagttcagatagttcagatgatgaaaaatctgaagatgagagggaatcagattgccaacagcctagcggtgatcaaattgaagaaaaaaaggatgctacacaagagcaagcaggaaagtgagaatagaccatgccatcatccatgaaggtcacaccacaatgtaccgaaagaggagcaacatttcaagattgcaatttgctgattaaaaaaatttacacagcgagcaagcaatctacaacaagaacctaatttacacattgggtggcatcgacttgtgatcaagaacggggagctgtgacaaagccctgacaagtgccgaagtgatggcgctcatcacaatgcgtgcaatcctggactttacttgcccacggcgtggcagtggacgaactctcatttgcttttcgcccttgtagactttgatgagatgagcagaggcaaccttgcaagctttctcgcccatgttggtgaaggagatatcagaaaacttgtctggcactatgcttgatctctgttcccgtcgtgtacttataggctaggagatgttgtatctgaatggaagacatgacagctaaactcttgtttcattgccgtattagctgagggagccattgactatacctgaatgatgttgtttttttgtataatcttgcagtgtctgttgagatgaaatgagatgcttctgttgatctatttgtgtcaagattgatagagctgtttgtccgcgtgtgatgtgcaaatctttgactagatagaggctctgtggtttctgatgaacagacatgtgtgcatctggtggaacaaactgcagacttgtcatttattctggtcaggtgtggtgtcgtgtccatgtttctcaggtgcaaagaattgttgccaacctgtgatgtcccccaaatctgagtataaaacctgatgcagaagcatttgtggttaagcttgtttattaggggggcaatcatgaggttcgtagcattgtctcaatcttgaaggaaatcatgtccaccattattgccaattatccttgcttgcgtggtagagtagttgcagtccagagattggctgaatgcacgtactggtgatgaatctctgatggatggaagaagtttcctatgccaagacttgatcatcctgaagtaaggtattccctccgtaaatatttttttttaaaaaaacgaacttggaactgaatgtgatatattctagtacaacgaacatggttagaaattctgtccagatacgttgtgactaggacatgtcacatccaattctaaatttatttatttatttatttttggaacagtaggtaggagaagccctggtcctgtgggagagaagcagaagcaggtcgcggcgttcatctcatcactcatcagggtttgtggtcacaagtaactcgtaccatatcttctcctatctcatttctcaactgaatgactcgatttttatggcgcttttcgccactccccgtccccaaatataaaaccatgatttcgcgcagcaactcaggcacagccaaacagcctgaccattaaaaaaaattataatttactgttttgtgttttggtgtgcctgactaaaaatgtttaaacagcacgccacgacggacaaactagaaagaaagaaagaaagaaagaaaaaaaaacatttatccgtttggtaccacggtagtagaaaatatcagcatgaggaattaaattgcgtttggatttatcaggagagaattgatgctcaaaacctgaatgctactagttgtttgttgcaacataaagaagaagaagaagaaaaggaggagggcgtcacacttggcgcagacaaaacaacgagaccgtacaggtagaggtggtaaaggtaaacgacgagagctaaagaaatctggcatggcgccaccggcaccggccgctttcctcctcccctccaaccattcatatcgcccgctcttgcctcgcccaatcctgcaccacgccaccggcttcgcctgcgcctcggcctcgccctcgccgccccctcgccttcgccttcgccttcggcatgccgccccgctccgtgccgccgccctgccggccatcgccatcgcccccggcgaccactggggcaactgggccttcctcctctccgccgccgccttcggcacctggtaccgaatgccgctcccttcttctcatgctcgtctcgtctgctctgctctgcctgctcattgctgaataatgatggcatggcaggtcggaggagtccacgtcgtggggcgccgcgctcagcggctcgctcgtcagcatcatggccggcctggccgccacggccacgggtctcgtcacggccggcgcgccggcgcaagacgccgtcatggactacctgctgccggccaccgtcccgctcctgcttctcggcgccgacctccgccgcgtcgtcagcaccaccggcgacctcctcaaggccttcctcatcggatcaggtaacttaattatcttccttattatgtgtatattaatcaattctagtacctccacaattaattaattaactaatgtctctctcttgaatcagcgaaccaataacattgcaaaactttgctactttaattgattaattccccctcttgccgtccggcctgccggccagcccagctaattaattttcgtttaaaagcaaacaaatcgcaagctcccaagatgcaaactcactcggtcatactgacattatagtgcatgtgtcattgcctttgtaactggtaggagtacttactttgattaatttttaactacaaaatgccacaatgatttcatctttccaagtcacccagtcactcaaacactgggacagtgatgttgagcaggaattaactgactgacaagattgatgtgatgcggctgaatgtgctttattattgatgatgcaattaacctttgcagttgcaactacaattggcacaacgatagcctttctgttggttcctatgaaatcactgggtcaagatagctggaagatcgccgctgcgctcatgggcagctacattggtggaggtaaatcatcgttaccagctaaatggggggtatattttggcaggatttaagaaagaattacacatactacattttgattaattaggacattaattatgatctgagcacgcatttccatttccatatgattgaaacagcggtgaattacgtcgcaatctctgaagcacttggcgtttctccgtcagtgctagcagccggtgtggctgcagacaacatcatctctgcactctacttcatgaccctcttctcgctggcagccaagataccagctgaacctaaaactgctcaaggtacgtacggagattcaatatgtatatatcatctgaatttcttagcttataaagctaattaatgaaatgatggatggagcatagcagagggtagtaacggcggcgagtctgagggcggaaggcggatgtcggtgctccatggcggcgcggcggtggcgctgtcgttcgtgatctgcaaggccgggtcggccatctccagccagctgggaatccagggcggcaccctgccgtgcgtgacggcgctggtggtggcgctggcgacggcgttcccgcggctgctggggaagctggcgccgtccggcgagaccatcgcgctgatcctgatgcaggtgttcttcacggtggtgggcgccaacggcaacctggtggacgcggtgaccaaggcgcccagcgtgttcgcgttcgcgctggtgcaagtgaccatccacctaggcatcgtgctcgccgcagggaagctgatggggttcgagcggaagccgctgctgatcgcgtccaacgccaacgtgggcgggccgacgacggcggcggccatggcgacggccaaggggtggagctcgctgatcgtgccgggcatcctggtgggcatgttcgggatctccattgccacgtttgttggcatcgggttcggcatgtttgtgctcaggaggatctgcggcgcctaaccaatctatagtactaacaattcaattggtttatatatagctgtgatcaataaataataatggaggagtagtagcaatgaagaatcatgcatgcatttcaatgaaaagtgtaaacattagaagaagaagaagaagaagaagaaaatactgtattatttatcaagagtaatactattattattagaagaagaagaagaaaagtttgcagatgatggatggattacaacaaattaaggttctgaaccgaaaaatcaagctcgtccttgtgctactgatttccacagtgaggaaaattggttgggtgcagtaaacgggcagggggacagaaggcacaggtggtggtggtagttggcaatggcagggtcaagcgtggacgaagctgggggcgtcgaggaggtagggcgtaaagcggagctcggcgaagaggaggtgcttgtgggtggggtttttgatgctgcgagcgacgaagttgaggtggaggtagaagaggcctctgaagcggatggagcaggcggcgatgggaggcgggtcaggcagcagcttgctgtcctccactgggtcgaacaccaagtagtcgtcatcaactccttggctcttgcaatggcggcgccatcgtggcgagttgtaatgggcgagggcttcttggatgtactccgcacggcgctcttgctccgtcattggcgttcggtgctcggtgcaggaccccatcacaagtagttgccggcgtgcttgctcctgctcctccaggtacggtggccgcttggggtcgtccaaaacggcgcccccctctaccatcacccacctcacctcatcacctttcgttgcgcgtcccaaaactaaccccaacgattcgatccaccgcgcgatgtatctcttatatttatttacaatctgtaggcagcctccctcgtttcgtgtttgtatccaaatcggaatcattatagattaatctcaatacgactcctactgcttctcatcaaaattacaaaaacggatttgatatacaactgtcgccagattttttttttccctgaataaaactcttagtttgtcagtcatcagatgagtgttacgattcgtgctagggcatggaatggaaaaaatatcggaattgctaaatgtcatccaatagaaaactaaggtcaaaatcttgtaaatttaatttctaaccttgagatttgctttgtgattcatgctccagcaaccctacctcctccatatccgacgaagctcggtgaccggcaacaactgtaacaaccctccctcccgtaccgcgtagccagcctatcggacaggcgggcccacttacacataccactccgcttaattacactttcgtcctcccgccagaaccgcgtagctgtcgatgcgaaaaatacgcgctagcctaagaggtttgctttactctagtgcaagtccaaagagatcgctttcgagttcagggcgttccagttggtttgatcctacaaccaacaagaaacaaagaaaccaaagaagttgtaattgatttaactcctgcacgactaggctaacctcttgaaaattagtctttctttccacattaaataccactagtaatatgcacatactaacgctacgatgatatttggaatgcaaaccaaacataaatgtaatataacgagcttgaataagatatatttaagattgatgaaaaatgaacgacatagaattattatattgtgaattacatagccacaagtgtctaaaataacatccccattttttttatcttttgaaaccatatatatgttcttgatgcgcttcttttttgagaacgcgcaaaaggattgcacgtcaatatattagcaagaaaagagtttttgttacacaaagtaatcggccagactggcttatgcaaagggaggaggggagaaaaagcaaaataaaaaaacttgaagctaggaactactacgacggttaaaaacgcaactccaaacaacgggaggggacagagccacgctacactcctaagagatccccaaaaaaagcaacgtcggctaaagaccacagctggccctccgagcgggtggactccataaccactgcgaccgaagcgagcgcagagtcgaaaaccctggagtttcgttccttccacagctgccaggagactaggagtaccaaggagtcgaagccgctgcagtggtgctcaggtaaacaggccctggaggatgaccaccaatcctggagccagctgccacgaaggggagagagggcagcccagccaggaggggacatcacacggagccagacctgccgagcgaacacgcaatcgatgaggatgtggttcgccgtctcaagcttctgagcgcaaaaggggcaagcagagtggctatcgataccacgcttttggagaagatcggcagtccagcagcgctgctgaaatgcaaaccaaaggaagaacttgcatttagcagggcccttcgcgtgccagagtaggtcggcacaggcaaaagagtgctggccaaggaagaacgcccgatacgtcgattgcgttgagtagcactggtcacccgtccaacgccaggcgaggtgatcctcaacacccgatgagagctgggtaggaagcaccgcatcccagactaacaggaactgagagatgaccgggacagtgagggcgccacatatgtcaccaacccaggagttgttcgctaacccaacggcaaccgtgcgcgatccccgaaagcgtggaggcacggcgtggaggaggtcaggagctatagaagctatcgagcgaccatcgatccatcggtcagtccagaagagcgtggactgaccatctcccaggatagagaaggtggatgctgcaaacatgtcgaagacgctccactcaacaggggccttcagaacaaaccagtagtgatgtcccgagtgctgaagccagagccaacgaactctcaaggcaaagccagccatcatgagatccataatgcccagtccactgagatccctaggacgacaaaccctcgtccaggacacccggcactatcccccattggccgagtccgtacccgtccacaagaaggcgcaacgcttcttgtcaatggctttgataacccagcttggcaagccgatcgccatagaaacatggactggaatggaagagagaaccgactggactagaaccgagcgacccgccagagtggtgagacggcccttccaggagggagccgatgggagactttatccacaagcggttgcagggccgcttttggcagcttgcgaactgacagtggaatgccgaggtaggtgcagggaaactccgagattgagcaaggaaaagaggactgaaccagtttcaggtcaagaaccgagcagcggatcggagtaatcgagcacttggtgaagttggtccgaagcccagaagcggcaccgaagacagagaggatgccttggatgaactcaaggtcttgccgaacgggggaaaggaagagaactagatcatcggcgtagagggatgcacgatgtcgaatagcacgatcattgaggggaagaaaaccacccgagtcaaaggctttgcggagcatcgcattgagcacatccatgactagaatgaaaagcatgggggaaagaggatctccttggcgaagacctctccgatgggggaaccgtggacctggcaccccattaaccagcacccgggaagaggaggcactgagaatgagggagatccaatcacgccaacgttgactgaagccaagttgggctagcacctcaagcaagaaaggccagctgaccgtgtcaaaggccttcgcgatatccaccttgagaagaagtcagggaacgcgtttggcgtggagcgcccttgccgcaagcttgacatagcggaagttgtcatgaagagagcggcccttgatgaaagcgctctggttagacgccacaagctcgtccaggcgaggggagagacgagaggccaagatcttggagaacagcttcccaaagctgtggataaggctaatcagcctaaaatccttaatgtcaacagcctcgtccttcttcggcaagagggagatcagggcgttcttaaattactgtatgactataggtgtaatgtcttcaaataaattctcattgtaattcaataagttaatgaatctgcaaatagttcacgtaaatggaacataatgcttgatctcaaatgacaaagaaacatatatagtatgggcatcttatccctgatcaacatcacaaagaaggattcatcattttacagtgttaaatgaaaacatgcagcatcaaatctattgcagccggattatgagccacccctgcaacatgaaaattcacatttatatttgcatggatctatgactcgtacagatttgaaaggcatgaacaatctaacctgtgaagtaattccagtagtaaaatggaatgcattgtcaataaattgtagtaaaaaaacaaaaaaactgtaccaactgaaaacctttcaaaagaggaaggagtcaaaccatatcaagcaacgaggtttcaaaatgaaatcattttgtgtaatactccctccgtttcaaaatgtttgacaccgttgactttttagcacatgtttgaccgtttgtcttattaaaaaaatttgtgaaatatgtaaaactatatgtgtacatgaaagtatatttaacaatgaatcaaatgatatgaaaagaataaataattacttaaattttttgaataagacgaatggtcaaacatgtactaaaaagtcaatagcgtcaaacattttaaaacggatagagtagtatatatactactgaaatagtgagagcagagcactatatgagttggcatcaataccccagatattatgcagtgaatcaggcatcaagaatagccaaagttaatcagaaagttgaaaaatagtatatacaccttatgaatttgtctgcaatttagatattcttttacaagattgctccatcactcttttatggtcaatattctcaacatgattgaagaacaatgttcaatattgttatacttatcctacctattgtgtgataatccacaatcatttctgacacaatgtgatatatgtctaaagaagtggtccttctaagatcatatgccaccaaaccactattgaattcatcactgagaatagatattttgtggcacagctcaggttattagaagggagctatttacctgaaatgcttttggacatctaccatttgacgctgcaaagcaaccaaggtaacatgataattcctgccaaaaaaaaaattgactgaataagcaactgaatatcagagacaggatgcaggaaacaaagaaatttcaacaactgttatgtcatccttgttgaattgttgagatgaacctcaacaatctgacccctgcgatagattcaaaagcatatggagtgcaattttttctttgtattttattccatgatagtgaataagtcggcagcgatggaacgatgggcggaggtcaatggcgaggaagcgggatcaggcggtgatgtagtcttcgagatgataatatcgctgagatggatgtatacggcaagatcagcttaccaagctcagatcagttcataattctctcactgtcccactttgatctggaaagttccaagtgctgaatttatgtgtggcttggctactgatttcaaaacaggatatggacagctgatcgcctgcaactacggggctggtaaaacaacaacatgagatggcattctgggaggctgtggaagcacgaatgaagtattcacaactcaaagcgtgccccgggaatccttgttggataattaaccacggaccaagaaaacgaacaagggcagagtcaaatctctttcaatcccggtttcttgggagtttttttatcgctgagatggatagctat

SEQ ID NO: 24892 - DNA, 2027 bp, Oryza sativa
tcctgtagggtccaacaaatctacggtatctctctatctgtagtagagccataccgtcagtcgttggtagccctccgatgtcaatgattacatccagcaccctgtcagatttcccaccactttcctgtgaccaggcattcctcttaaggcattcttttctgagttttgcagggggtgattctaccctccatgcaaaggatcctctcccatggattctctcaaacgcaagccggtcgatacatacactgcacgccgagagcgagcagcctcctgcaccatgcatacaatacatacacagagagatcagtcagtgagagggtggagaaattagtcaatcaatgagagagcaggtattactattccagttaggagcttcacctgcgtattgaataattggtgagcccattacttcttcccaactgtattcattcggtactaatgcttggtgaatccctgccactactttccacttaaaatttcttaagctgcaaacccagtcagatagaaactttgtgcagtacacaggttttgcatcagccttctgcactgaggcctcctccaagagtgatatgttcattccctcatattcctcttcattcctatccttgtaatctgcaagcattgtgcaatttgttcgtcatgtgactagaagcagaagcatgaacaaacataacaatgtactactactactacaaattaacctggtagatctgcaagacccatgcagctaacagcctcaattactacttctagttttggacttgagcttgttggagctagcgaggacaaaaactacctgaacgaattgctacactactagcttcatgctaaactcaatctctcaggcagacatggagcaatgagcgaatacattttttaaggtactagctgctattccctccattctaaaatataaacacatgtagcatttgagatctgtaccaaattacaagtacttctaaagcactcaatttagaagtgctcttcagtgaaatgtttgtttactgaaatataaacacatgcaacaaccttatttcagtgaacatacaagaaaaacaaaacgctggacaatggggaaggacccaatgtggaatttatcaagaaagagggtgagcgtgtccggccagagtcgaacgcgggtcgcggggagcacaacggctgcaccatgccatctgcgctacacgcagtctccagtgaacatataagcattcactcagtttcagttaacatatggagctaatttcagaaatatgaggagcaggctatgggctgttttcaatgatgataccagttaataagagagagccagtgtttagactgaaaacatctatcagaacaatcatgataataaatattggttatatcgttacctgatacaatgtgatgtatatggagcccactgcttctgagaagcagacgaagggagatgaacgtctgcaacggaaaacacacaagggaagcacatgatcaacaattgaatcaggaatttcacatcaagatgtagctacccccaggcatgatgaaagaatttgttttttaggcggaaaaggggaataaccagaagaaacacggcgcaagagagggggtgcaagaaaccccatgagaatgacatggcggtggcaatgttgagcgaatcaagaacaagaaacagacttaattacccgaggacgccgcttgcacacggatgtcctgttcttgacgccgggttcgcggccaggcgacactgacacctgctcgcggatggccagcgtcttcttgttgttgtgcacatgtagaaggccggcgtcaccgccgtagatggggttcggaatcacaaccctgcaccggcggaagtcgcggcacaaggagaagaggctggtgacgtcgtggcccagtgagaggggttcttaatcgccgatgggcgaatccgatagcgtcgtcgtgtgccagcgcagtacgccggtgacgccctcgccgccgtggaagggggtcggcatcgcgcccccgcgctggctgacgtcgtggcccaggggcgcctgctcgagctc

SEQ ID NO: 24893 - DNA, 4562 bp, Oryza sativa
aaaataaataaatcatgtttattgcttctgcaaatttcctttttctagccaaatacacaactactgcagcagatatctcagaatacagcatcagggctggttcaatatcccaatttgcagcaactgggtaaaagggcttttgtcaccagtctcaagtcagtgcacctccagagtccagagtgacaaagaggtgtttgatctgagcaggttcttcatggagaactttgctccgcatatactgcttcacttggtcttcctgctacctcaaagattcattttgttagccacacaaagaatgtgccaaacaagtatattggggacatcgatgtgaaaacaagttccaaacctcaagctatagaaattaatccacaggtcaacagtaacttaattgtggatgatggagatggaaatatcctttattccaaggagtcttgggtgatggtcttgatgatgtcctttatcctcagggagtcaactgcagacacaaatattgaaccagagaaagtcacacagtacatcccgggaattacttccaccttccaactttcagcccaccattctttttgtagatattgctttgtgctgttctattctaaacctattgtcattgtcagattgagaaataagcccataaaaatcactttcagcttgaatggtaaagatgttgattaacaaaaacaagtctcacattcaagtgattctcaagagtaccaggtatctgtggtgatactaaaaaatgacttaatgagtcgtttaaggacaatggatgataactcatggcatcgtccacatgacaagacttctgcaacaactcaagaaaacaccactcgagttcatgcgagtgtactccctggtaatccggttgcactctgaaagttgtactgtcaccatggtcactgcataatgaggttttgtaatggctgcaagaactcagttgacaattgcagctcacaaagcagatgtacatcaatgcttcttcgctcatttgaagtttaaaaagtgaactatggtgtatgttatgatgagaaaaatgtcgatgattgactgggctttcaatgtcatacctgctgtgggagtcctgctgatgttgtgtctgctcctgctgctgctcatgattgccattatcacatattcaaagtagttttgcgtgctaggatgctgtgcatttggtgcaccatagtatgcatcacagcccgtatccttagtagttgccattccactggctgggatcctgctggggaggcctgaaattcagtcagctggcattacaggttttggggttaacctatgcacatgcatgctgcagctcgcataaacaaccaaggattaaactctgtacagaaacctgtttgttctgatgaggagagcagccccatgaaagccgaacttggtacccacctatcggagatacactccaaacacggatggatggtttctttagcggatgacctgaaagtagaataatataaccaaagcaacaaagaatcatatgtactgatagtattaggtgaagatgattacaaagaaagcttgaagaattcattaatctgctgctagtaaattgggcaaatccacggagctttgcctagagaaatcttcacatgaccaatttcagcacatgattgagatggttctcatttacattggaatctatgggggcagcacaatacgaaaaatcagttgcgtcaaaaaaaaaaaggaaaaaaaatcaggaaacagcaagtcgtagaattaaataatgagaaagttaatgattctcgaaattgtttccttgggagctccagctctggtaagctgcaattagaaaacatatataataagcaccataagttgagaaagatcaccataggatgctgatgctatatagtaaaaaagtatggaaaacccgaaatcaaagttagcaaccatgtttgctagccagacgcccagacccaaaacaaacaggccactgaagacaacagattcagtgttaccatgttgataagtaaactaaatttcttccttaataatctatgggatgatgaaaggaatacaagcaatccttacttgatgaaggtgatttgacaaactagtgaatgtattgtatcagcttggctgaaaaaacaagaaaagactgaatgcatttagtaattagccaatattgtgaccgaatctgaattgtcgtgcctggttgcgggcttgtgatgtgctttgaagaggtggcgggggccgggaggaggaggacgcggccagcgcgccccgtcctccgccgccgagcgccgactcctccccacttccacaaccacatggcgccgccggagttggaggcgccgaggcagccggagcaggagtggtcgcggtcggagccgacggcaagaggggcgcacgaagtacgcccgcggcggaacaaccaggactgagaaggcgatgcaggcggcggcggcggcggcggcggcgaggaataggaagctaggagcataattttcaacttctgagccgttggatctgacaagtgacgaggcctccctcaccctaccactcttctgcgcaagtctttttctttttcttttaacagaaaaaaaaaaccctactggaagggaccgatcgcacaaacagaagggtgtatgtccgcgtgtaaaaaaaaaaaagtatactccctccgtcaaaaaaaaaaaaactcaccctaggactaatatgtgacataatctaatacaacgaatctagacagaagcatgtccagatacgacagaagcatatccagatacgttgtactagattatgttacatctcattcctaggttgatttttttttggacggagagagtaggcggggatgattcacacatgttgggggagtggctccggttgacggagctggcctccgtcagtggggaaactctactcggagccatccaccaagggagaatgaccgaaggtttcggaaccaaccgagagctccggagcacatcaccagctccggagcagactagccgccctgaagcctgtcataggctccggagcatatcaacgacgctggagctaaccaatagctccgaagcagatcaagggctccggaatatccggggacccaaagtatccaagcatgaaggaatggcgcacgagcgtagtggggcgccataaatacgcattacgcgtccgccaaccacctctgacattctgacaggggcagggcggcatccactatcatccgggggcatgcctttacccggataatagccatcaccctcggaaagcgtcaccgcatccttaatgggcgcagcctttcctgtcacttgggattttaacgattgcccaagggctagcccatcggccggccacactacatctgttttagttagagcaaagatgtaactttctcttgtatccctagtatatgtaagcattgcccacagttaagggcaaattgaatacagaatacacattgaatacattgtttggactttgtcccaacaacacgtctaatatcattagtggaactagttgcctctattggaattaatctcacatataatatgatcatggcatataacttatacatgtgagaaacatcaagatgtcttccgggtaattccacaaggcggtgggctagccagccttttatttgatattagattcttccctaatatttatttttttttactcgtacatgtgtgttagagaccattatatcatggactcatgtaagtgattaactgaaccatgtaatcgtggttgatgacatggttcaaatgttgtaaaccgttagatcacagccaatcaacgaatattaggcattccaagcattctagaaaatctcttgatatacgagaatgcatgtgtcagggactcggtttgtgccatccaatgggccagttctcaccgagcagtgtcccaaaccagcccaaaagagagaactataagagcaacagcagctggtcctctaaggacgaacagaccagaagctctcggggaattttaactatttgctacttttaggtttgtcaattatctaaatatccctcttaggttcgtatttaataatttgccattggagagaggtgatttcttaactatttgccacttttgcctacgtggcgagccatcgtggcatgtccgcgtggaaaacgacgtggaccccacccgtcagcccctcccatctccttcttctccacctccggccatcatttctccacccatcagtcgaaatccgcaccatggggaggttgggtgggcattggtgccagcgcacgagcttgacgcggtagagggaggcctgccagtgcggcgtgagattggcgagtgtggtggggtcgcagcagtagacggcgagcgaggtcaccgccggcaagcaacccacgagacgggcggcgatggaggcgttctgctcggagatcgcctcggggtggtacaggttcatcctcgacgacgtcgatgtcaacgacggcgcgccgccgccgccaggccggacgaaggagaggagcgggtgcccccacagcgagacaagtgagaggtcgaggcggtccagcatcgggaagcagaacgtcggcgagaggaacaggaaccccggcgagccgaggtggagg

SEQ ID NO: 24894 - DNA, 4256 bp, Oryza sativa
  unsure (1)..(4256): unsure at all n locations
acgggtggggtccatgttattttccatgcgggcacgccacgatggctcaccacgtaggcaaaagtggcaaatagttaaaaaaaatcacctctctccagtggcaaattattaagcgcgaacctaaaaggagcatttgaataattgacaaatctaaaagtggcaaataattaaattccccgaagctctcggtggcggcggtgacctgggtggccggtgggtacccttgtcgatctcttcctacctcccttcttccctacttgttctagaagcgccggtgggcacccttgtcgatctcttcctacctcccttctttcctgcttgttctagaagcttctggtgccttctaccacttgcatctatttagttttccctcttccaactctcccaaaatatactagacttgcactggtagattaccaattgagttggtgttaagattgctgattgggttgctaacagcatgcaggatgaatataatatttacgacaataacttaagtttctgaagcgacaaatcaagctcatccttgtgctgctgctttccacagtagaattcggtggggtgcagaacacgtccgggcgggcagaaggcacagccgccattagcggcggcggtggtgagatcggcatcggccggccgctgctggagcacggtgcatgtgtcgacgaagaagctgtgtacgtagggggtgaagcggatcgagctcagcgaaaaccaggcccgatggtcacgcccgcaccgacagcttcgctgctgcctgccatgtccggcctcctctccttcgcctcgtgcccttcctagccttcccttcccgcgccgagaaccgccgccgctcccaggccgcgcctccgcatcgcaggctccgccgccgtgtcccaccgggcatcttcctcctccagagatcgcctccgctagctcgtccgccatggggagctcgacaaggcgctccgcctcgtcgggtgcgcgcggaggcctgatgcgggcaccttcgccgcgctcatcaagaagctaagcgcgtcggggcgcaccgaggaggctcgccgcgtggagccgatcgctggatcaactctgctccggccgacgcctcctcgttctcctcggcgccgaggaggccgtacctgtcggaggcgtgggacgaggaggaggaagagctgaggaggatgctacgcatcaaggaggatcccaccgccggcgacggtgacggttgtggtcagtactggttgttgcacatactgtgtttttgttgttgcagtcagcgttctcgagtgttgcattcaattgcaacattttcgataaagcggtgaaacatttttcagtgaaagatgaaacatcaagaaacaattcatattgaaacattttttcaagcaatgaaacattgcaacattttttaacgtacagtgcgacatcgtccggagatttgcaaatttcgatatacttagtgaaacattttttatcaacttagtgaaacaattccgatatacttggcgcaacaacgtacaacatttaaaaataattcaataataaactaattttttttcatcagattatattcatatgtggtcttgttttaaagattcaattgtaacggatttaatggtataatcggatcatgatttggataaatattttaagagaaaaaaatagttaaagttcgcttgatccatacatgatggatggctggcgcgcacgtgcgtggatccgacggtcgtgcgaggcgtccgatttttcgtctcgcgccgtacgtccgacgcgtagcacgctccccttaattgtgggccacacaggcgcgcatgcacgtgggccggagaaaaggactgtgctgcacaaactttgagtccgagcaggccttcttcaccttcgcgggccgaatgcactacacttgtttctcacagctccaagagaaccaaatctataactaactaatataaatattcggatttttcctatcgtcacaagtgggacgaaaggcgccttcgtccctcacggtgcgccttcaaaaccccccgaatccctattgcactcagaatcgatacaaggaacacatcccaaaatcggcacaaccaaatcggatgaacacaccgcaaaaaaaaacaaaattcaaccaatctttgcccaaaattacaaaatattacaaaaataatcatccaacatacatacatcacaaaacttcactccctaccaccggatccaccctcggccgtcgccgtagccaccgaatccatccgcggcagccgccgatgccgccaccgtcgccggatccatcgtcgcggatctggagcgggagggaggcgagaggggaggagcgagccgacgccggatcaggagggagcggagaggggaggagggagccgccgccggcccgccgccgccgccaccgccaacggactcacccgccgacgcacagacatcgcaatcgccgtcggatctggggcaggagggagacgagagggcaggagagagccgccactgtcgtatccgcccgcagccgccgccaccacttacggatccatctgtggctaccgccgccgccgccccaccggcggatctgccgcgggagggaggctagagnggatggagggagctgctgtcgccgccgccaacgctgcctccaccctcggatccgccgcggccgccaccaacccgcagccgcttaggtgagagggataggaggagggggggcgctgccgccgttgctttgagagaggggatcaggggcaccgctcgccggtcgttgctccgagccgccgcagccgctcgggggaggagggtgccaccaccatcgtcgctcgggggagattgggggcagggggatggggaaatgaatcctagggttagggttagggttttggtatatttatttaggttaggattaatctggaccgtccattcgatcgaacggctccagatgctcccgtgtcgggccgccgacctattgggccaccgaatggaggatgcaaaatggacttcaacggagaaaggaaacaggccagacacatagaatagacgaagggagggaaacttttctttattcggcccaaacctataagggaggattttgattcctttttccaattaaataattgttaaatgatgtttgtattattaaaaattagcaattaagctctgataattttaataaaattctaaagagcgtaattaatcatggagaatttaataaaattaaatttaaccatgtcattttatttctcacacttgatttacttataaattgatttaattatacacctatctacttaaaaatactaaatatttcagcaaatttgtattttaattgattacataatgtaatttttttcttaacttttcctcaattttctggtctatacacttcccgttgtaacgcacgggcatttttgctagtaatccaaattttgtgaccaaaatgttaatttttctaaagcagtataatttttgtggaaaattagtacacactactgtaagtgaactcgtgctcgatctgttctgttttctgaacaggggaaattaaagagcatgcactgttgttacccagggcccatttagttacctaaatttttttcccaaaaacatcacatcgaatctttaacacatgcataaagcattaaatatagataaaaagaaaaactaattgcacagatatgggagaaatcgcgagacaaatcttttaagcctaattagtccgtgattagccataagtgctacagtaacccacatgtgctaatgacggcttaattagtctcagaagattcatctcgcggtttccaggcgagttctgaaattagtttttccattcgtatccgaaaacctcttccaacatccggtcaaacgttccatgtgacacccaaaaattttcttttccccaactaaacacacctccagtatttgtgacttgatagaccaacacaatatggtaagtttagattagatcagaggtgtttgtcaatagtgtctatatgaaaaataaggagacagataaaggtggctcctcaaagagttgcatgtgttagggtctttgcctattctatactatactatatattccatgactcaaaagggagctctagcatatcaacaatgtaatgtctcgtcaaagtgatatatcgatcgaggaaagcagagaattaagctagcaaacgatctgtcagggcaaacacagcgtcctctgcccctacaaattaaagaactgccctgctccttcttgcttttagtttagggctgtatttttttacctaattgaagcattattaacagtgtta

SEQ ID NO: 24895 - DNA, 5222 bp, Oryza sativa
cattattaaaaaatttaagtaattattaatatttctctatcatttaatttattgttaaatatacttttatgtatacatatagttttacatatttcacaaaagtttttgaataagataaacggtcaaacatatactaaaaattcaatggtgtcaaatatttagaaagggagggagtatatatatttgcatccacatgcatgcatatacactgaaccatatggtgaatattatatagtgtcactacgatggccggcacaccacgtggaacaattgcctaattgtcactagttaatatgcaattacgtaccactccatcaataaagacaagaagctagcgctagctacagctaggattaattagcaggcaaactaagcatctgaatcgatcacccagcaaataaaagaccagctgatatatgagtatgaccgatcgatcgatcgcgacaaacaagaaatacagtcgtcctagctcgcgccttacgtagtacgtactgcatcgatcagctggatctatgcataattattttattatatgagtatagtatgtatgcattgtcgactccaaacctcactttaatctgtaatcatgtcgagttaacattactacatgtgatgggaagaaagttaaaacaaattaaggaactcttgttgcagcgattaatttcttttttctgaacgcacaaaagaattgcacgtcaatatattagaaaaaaaagtttttgttacacaacacaatcagacaaaccggcttatgccaagaggaggaagaaaacaaagacaaaaaccaaggaagaaaaagaaaaactcatacgacgggtaacgctactccaatcagcgggagggggcaaagccacgctacactcccaacaaatccccaaaggaagcaacacccgctaacgaccacagctggccttccgaaagaatggactctaaaaccactgagaacgaagagagcagagtcaaaaaccctagagttccgttccttccacagttgccaagagactagaaggatcagggagtcgaagccggcacggaggcgttcaagtaaacagaccctagaagatggccaccagttctggagccagttgccatggggggagagggcagcctagccaggaggggacaacacctgtaaccagacctgccgagcgaacacgcagtcgagaaggatgtggttcgtcgtctcaagctcctgagcacaaaaaggataagtcaagtggccatcgatgccacgcttctggactagatcatccacttgaaattgctcatcgtagaatgatgccaagattggtgatccaacgtacgattgctatgccaggatgacctgctagagtcttgcacgtacgtatgcatttatgtgaatttctagtaagatactctactctactctactctaccagagtgagtatcatagaaagtacttaattactagctaagtgtgaaaatagaagaaagcttagctagcgaatcatgggtatgcattgcatggtgggccgatggatggacggatcgaacaaggaaggaggaaggttccgacgacgaggggatcattgatgggcccactctcggcctgtacccacaaacaaaccgacaccaatgggctgggcccactctcctccccgaccactttgggccccacacctcctcattaattcctcctcttctatctactgtattatctctgcctgcctgccacttgttttttttcccctcaattctttttgtcgaacattttccccataaataaagagtaaaaataaaaaaactaatacaaactcttagtgtcgtactggattgctcatatgcaccgtaagtatgaaatggaccagcccgtcacccgtaaatttctatctcctgttgttgatgtctactcttcccatcttaaaaacgaaaatcaaacttgaatctatacattttttttgggcgaaacttgaatctagataaatggtcgtccacattcatcatagtcaggatatgagggtgtgtttggataataggaaatgaggggtaggattaggatcggaaaataaatgaatgattaggattaaatgtaagagagagagaatggatggttaagatttaaacatatcttttggtgggtgagaaatcatttccttattccattagccaaacatggctgattgttttgggatatatagtgtatgtatttttctctatttctagcccataacataatataaagagcattctgcaaagcaaaatggaccggctaatgcaagcagcccatcaacacaagagataccaaattaggcgaggagcccatcaagctgcttcaagacttcagctgagtcttcttcacccttttttcgccgggagtcttcttcacccttcacaagactactgaagttctccacctatcagaacgcatctcctaaagtttaattttttataactatacatttctttgtgcctcgtgattgacagtaaaagataactccgcctctatcatatactgcttttcaataactgtcaaaaattaaaggatgggagtgagtgtgatgtgcgttgagacttgagagtatatatgctcagtaaaatgaagtctcagtctctcagatctttcttaccatttttgcatggcaaaggttggttgcattgcaggcttccttactctctaagtagagggcagagcaacgctgaaactatccaatcatcaatgaaggcagcttgttaaaaggaaagctctctctctccttaatgtgtgagtgtgactgattctaatgttaatataatctttctaatcatctcgtttagaaagtctcttttgttcttaaggagctccgatcgataatatgagcttgcattgcatcctcattttgtcggacagacagcaaaaacaaaagccattgatgtggtgacaatgcatatatgcaaaaaagacacttttgctgcaaaattaaagccatgcccccataccccataccgagaaagccaatgtctgctacctttatttattttcctttttttctttctccctttcctttccctccatgtgcttttgtttgccgtctctctctctctctctcttctcatcactggaattgtcacactaatgtctcattttacctgtaactttatgatcagataatgtttatggaagagctaaagaaaatggctacaaattaaagtgggtgagaagattgaaaaatcttcagagcatgcatttgggcagttataataatgcctgaatcagttcatgcagtagatcaaagcaagtggttaccggttgtaactgccgatgtctgatatttcaacgaacatttttgttttaccaacatatcatagcaattggaatctactagcggtagtcggagaagaagatttggtcacttgttgatctgaaaaaacaatggctcaaaggatataccaccgcgctttcgcattcctcttttcaattggaagctgctcgtctctcggttcattctttatggtacgagtatgaagcgatatcagatcagactggaggatttttcacaatttctttttactctttttgataagaaagatagtaacattgttcaagcatgatgtgtgttgggtttgtgcccatgctcatcttcactagcaggatgatactgatgacgatgcactaccaatgcaacgtgaagaggagttagtacatacaacaactacaagtgagatgatcactgatcagatgtggtggatcaaattatcagacagacagctttcacactaggtgagcactccactgcctgcctccggccctatccgagctgcttttcattctttggatttgattggtgccgccttttttcgctattgaatcgcactgcgagatgcaccatgatacgaatcaagtcaaatttctggcccaaacaaagacattgccacgctaaccgaactgttcaaacgatggtatcttttttattgatgcctctctaaactccacttatgagagctgagtacttgcaatccctaatttaagagcgctgagagcttgatatttcagatctttaaaaaaaaggtgcctgatatttctccattaccttccatgatctccaccatcagcttcgtgacaaaagaaacattcgcagaagtggtcaaaatatactggaaatattgtatatgattatcttgtttgcaaacaaaaaaaaatactgtcacattttgcattgccgacttgcttctgaatgtcccattgaataaatggccttttagataatgactgttgaataaatgtgtgatcatgcatgatatagtgcagtacccttttttttgtgtatgttttggaggtgggggctaaaacagtcagtgtgtatatcctgtatctgtcacacctctttttttttaagaaaaagaaaaaaaagtgccatcaagtaaaatgtctataaatagtccattacaagaacaatgctgcggcgatataggtggaagaggtactgatcatctgaaacaccataatgtggaagatgtcacaagtcgatgagtggaagccggtgatcgcaatgctgttctttgacctcatatctgctgtgacaacagccttgctcaagaaggcgctcgcggaggggcttgaccgtcttgtactcatcacgctgcgacaactagtcgccacgatcttccttgctccgattgcctatttcaaagaacggtacattgcctaaatgcaacttccagcaaatggtgatcagagttcacaacttgagctatgatgtgatactactgttggttttgccaccctctttttcaggggtaaaagacctaagctcacactggagatccttgtgtacctcttcttcagtgcagcacttgggtacaatctaaaaaccacttgttgatatcacattgaggtcaaaattttataaaactatatctatctaatccattgattgcattttttccccctctctgcttttagtgccgcgctatctcagtacacattcttctatgggttgcagtacacgaccgcaacattcgccataactttcaccaacatgtcccctgtgatcaccttcctcattgctgcactcctaaggtgttacatttttcaagcctagtacttgtctgcgctttgtttctttttttttttgtctgaatcattgggtactgttcatgtactcagggtggagtcactgaacatgaagaacaaggcaggagctgcaaagatcatcggaacactcatgtcattcgccggtgtcatgctcctcaccctctacaagggtgtggccttgacacaccaa

SEQ ID NO: 24896 - DNA, 4524 bp, Oryza sativa
gtgtacttgtgtagaacctcttttaggccttcatcctcgcttcgctcaaaaggttttaacatgtaagcgcaacacattggaatgactagtattaattactatatgctagtgaaactaaatgtcaaatggaaacgcgttgtttaaggacatgctcaagatttaacccaaaacctgaggttgttagataacggcggcacaagttgcttgcatttgagcatgtcaaatcattattatgtgtcacattgaacatgaaaggaaaagaaatgttctttgaatgcacgattttcgtaccgagagctcctgtgagggcggcgaatcaatgctttgtgatttgatttagacttaaagtgaccaattgctcatcaaagcagagacaatgggcattggatctttaggactttctcatggaaagatgttttctacttgttcttagtagttgctaaacaggctcaagctaatgttttagtgctgaaacagcatcctatgctctacagtagaagcaatgtatgcatgatcacaattatatactacttggttgccaaaactgaaagctttaaattgttccattgcactatgagaatactgttattccaattggttggttgcgccgttttctcaatgcaaatcttccatactgaagatattccgatgtcatcagctaatacttgcccacccccctcaactccaactcttgtgtttactcttcgtcacgtgttgcgaaaacgaaacgaaatcgaaatcatccttgcagatgccatgagcaccatcaccatgcatggcatatggctccctataaaaccatgacattaccaaaaacaaattgctcaaactaggccaccggatcaaactttagttgagagcaaaggaaaggcctctggttttcctgaaatgtggagggcaggatgcatggagcaatggatgccgacggtgtcaatggtcgccaccaatgttgtgatagccatcatgacagccttgatcaagcaagcactcaaccaggggatgaaccgcctggtcctcattactttccggcaaatggtggctactgtattccttggccccatagcctacttcaaggaaaggtaccaaagcaaaagtataactataataataaagtactgccaactactagtcgcttgtattttactgttgctgatcactgatttttcaggaagacaagaccaaagttcacaactgaaatctttgtctacatgttcttaagcggaatgcttgggtaatcatttgacaaatactatattatatgtagagagagttggatttcaccattcattgatacccctggatcaattgtttctttgacttgcattcatcaggccggtgcttcttcagtatacactgtttgtagggctggagtttacaacagcaacatttgctgcaactttcggcaatttgcttccggtggttactttcttgatttcactcgttttcaggtaactacaatttctttgagaaatctggaactcttttcactgaagagcactttgtcctctatatatgtctctctttaagtagctcaatatcaggcaagcagttacatttgctactatctactactccctctggtttttaagatacggcgcaattgactttttttttcacaaactttgaccagtaatatttattcaagtaaagtaaaaggactaccactaaatctctcataaaaaatactttaagcgtgcgtaatatgcttgtgcaaatacttctagataaaaatgaattcaaaaggtcaactgtgtcattttttttaaaaaaaaacagaggtagcatatgttaatagcttttcatttgaagttgtactacaacaccttaaaatcaactaaggccccaaagcacctaaaaggaaactccagctttgttgcccagcagaaagaaaattgcattgggtcctaaggcaccttcaactcctcacatgcttttggatttttttttcagtgaaacacaaaagcagtgaagtacttctcacaaactagttccaattctttataggtttgaagcacttaatgtaaagagcagatcagggagtgccaagatctcaggaacattggtttctctcagtggagcaatgatgctcaccttctacaagggctcagcactgacccatacaccatcatctagcagtagtccagcatccagcagtagccacagccaagctgaagaacatgacacggcccattgggtgctcggttccgtctcgttgctcgcgaacgtagttgggttcgcattgtggctgatgctgcagaggaaattcaccaggaagtacccagcaatctactctgctactgcattcatgtcattgttcagctgcttgcaagcaggagcacttgccttgtccatacaaaggagcagcatctcaatctgggctctcaaggggaaaatagagatagccacagttgtatattgtgtaagatctcttccagagctccccaaccatattttgcagcatttcttttatatactttttgtccattttgtttggcatagtcgaaaagtaccaactgaaaatagaactagccccgcctacttttcttcttctttttttgtttgaagctgcatacttaatttgcatgtgcactcttctaaaagaactctagacaaaacatagagcatgctaaaatatttgcacacatgaaacatatgtactataatataaagagaaataaatcaacaactttcatatctttctgtatgttacacaaataatcattcgtgcacgtattataaaaattctctacattattcttttaaacaaaatctagttaggtgtacataatactacatccacactcaaagaacccataatcttctccggtggatagtttcttatctacaaaagataccttttgtaaaaaaagaaatgaaaaggaaagaaagagaggggagaagatagtgttcattggaccagtatattatatgggatggatggatccatcctccacaccatgcatcatggaccagacctttaggataacattagccccgatttgaaacaaattattcaacagattatctacttaattgtaggaataaattaaatatttttagaaataaacttaataaatagcttcgaacaagtggcctaagcaatgtagtagaagaaagttttttttttaaaaaaatagagatgtggagcaaataatccgccataataatccatgaagtaactgaaaagaacaaggccagatcattataaacagttttcaactcttctttttcaatgtacagagatccttctacaaagccttatttgaaaagaaaaaggtctaactttcaagtttcaatagaaagggattggttaccactcaaacctgtctttatgacttgaaccgtttgcacagggggtcaaattgttccctttttactaggattcttccccttctatagatttttaatccctacataaaggtataaatctaacatatttggagagattattccaggatagccaggtgaaaaaagaaaatttagcccggcgaaaaagagattattccaggataaagaacttacaatatattaaattgataagcctattggtttctagcgtgcagcttaaaagatctttactgaaacatgtcctatggtcctttagaagtatcagattttttaagtgtaaattttgatacctcccaaccatgagcatgatggaattgtacaatgggacataggggtggaattgtatccccaaagtttttggcaaacaatatgcaatcaagtaggcataatatgtatatagaccattagataaaaaagaattattaagcccaaaatcaccatttccaatatattatagtttattttgagtatataattttatctttttgttctatgcaaataatttttatttgcactagtaacaaaaactagcacctcattttctgaagttctgttgctcctatttcagtcaaaaagtggtatggtgctcttctagcactgatgtaacaagaatttgcgacatatcgaataacaaaatgtgggcattgcatttgttctgtgaaatttgcagggtgtagtggcgtctggctttgggtacctgatgctcacatattgtgtggagaagagaggccctgttttcaccgctgccttcagccctctctcccagatcttcgtggccggcatcgatctcttcatcctccacgagccgctctatcttggcaggtactaattcttaattaatttctagcacaaacgaattgattgattcattcatgattccataagttactgattgttggtatggcactaaaagaatagttaattttttgcagtgtgttagggtcagtcctggtgattgtggggctctaccttgttctgtggggcaaaagggaggagaccgccgccgtcagcaaagatgccattgcttcgccggagaagccagtgcaagacgtagaacagcagcaagagaaagtgtgattgatattgattcctcttagctaggctgcatgctatctgcaaatgtgttgcaattaacttaacttgagtgtttatgcatttgtgatgatggagtatata

SEQ ID NO: 24897 - DNA, 8289 bp, Oryza sativa
gcacccaccggcttcccccatttacgaagtcaccaagtccatgctccgcacccagtacgcctcccagactcccaagcgagacaccggcagcaaccagcagctggaaatcgagatcgccgccgagaagccccgccgattaatcacctccgatggcggcgccggcggcgaggccaagccggagtccgctccacctagcgaaggaggcgatagagggggcaaggggcccacgttttcggatcttggggggatggagtcggtgatagagcagctaatgatggaggtggtggtgcccctatgccatccggaggtgccgcgctggcttggggttaagcctgtggctgggctgctgctgcacgggccaccaggctgcggcaagaccacgctcgctcatgccatcgccaatgagaccggcgtgccattctacaagatatcggcgccggaggttgtgtccggggtctctggtatgctatccgattcttttcatgaaaactctgaacttagctaaacctttgaacatgtgttacaagcaagaacaaattagtttaacttactaaccaccaatcatgtttgctgctgggatgcttgaggaatgctaaattttgcaaatgctaatgtggtgttttctgaatcgcaacttctcaacatactagcaaatttggtaacctgttgtgtcgatgtctgcaagttcaggttgttcgttttaataacttataatgcaatcctcacttgataaatggaatttcatttgttaactaatggactctgaagctattagtgttcaatatgtacaaatagaccaggatcactgtttttattgctgcttcttacattagtcgtttgatctacttcacttagttttctttctcattagggaaggagtgcccgcaagtctagccgaacatagaactggtagtttctgcttgatgtcagtgtggcatgagattgatcctctatcaaattaggttcctgagttctattgttatactggtaatagtaatactctgccttgcaatgaaacataacacataggctttaaaggttctgattgctaatatgttctgcgatgacatagctccactgagatatgatccttagttgaaaccatatcggtcaagctttgtccttaccctgcataccaaatcagatatagcctatctcctattttcttttaccttttttaatatatatttcgtccctactcttagatagatctcttctatcagtagccatataagggtacaccttgtaaaccctcgttttcttgcaggggcttctgaggaaaacatcagaagcctgtttaagaaggcgtacaggactgctccatcaattgtatttatagatgagatagatgcgattgcatccaagagggagaatctgcaacgggaaatggaacgacggatagttacacagttaatgacatgcatggatgaataccaccaacaaattggctctggtagcggtgatgtgggttcagagtcagctgaaaagaaacctggctatgttattgtcattggagctacaaatagacctgacgctgttgaccaagcacttcgtaggccaggaaggtttgatcgagagatctctcttggtgttccagatgagtatgcacggaaaaagatacttatgatgcttacccggaatcttcgactggaaggtcagttggacttgttgaagatagcaagggccacatcaagctttgttggtgcggacttgaaggcattggtggataaagcggggaatctagcaatgaagagaataattgatagaagaagagctcagttttgtcaggagcatgatgaaaacagcaagcacgactggtggagacaaccttgggatgcaaatgagatagagggcctgagtattacaatggatgattttgaggtgaggtttccacctgttacatgtgcagctcaagtccaataactcctctgctaatgtcatcaagtgtaacttctaaaatagttttcctggccacgtatccaatgctttaatcatgattagttctgatctcatttcaactgtgtgccttatgtggactaaatagccatgctaatgaacctttctgctttttgtttgctgaaggaagcaaccaagatggttcaaccatctttgagaagagaaggattttcttctatccctgatgtcacatgggatgacgttggaggccttgattcgctaaggaaagagtttgaccgctacattatccgatgtatcaagcaacctgaagaatataaggtgaacatacttagtatgtcaataaaccgttttctacaattatttcttatgtctgttctattgttcctcttttagcgatgatgcagcctagtagtttaaagtaccacatgacatacccatgatgtttatttgcaatatgttttgaagtttaggactccttttgcagtacttttacttatttgatttttttattccatgtccgctttgttgtctatattttccagacatttggattgaatatgcaagctggctttttgctgtttggaccacccggttgtgggaaaacactgatagcaaaagcagttgcgcatgaggcaggggcaaattttattcatattaaggtagttgatgcttatatttctgtattttgaccacgttcgttcagatttatacaaagtaacgttaagatattcctttgtgtgtttaggggccagagctgttgaacaagtatgttggtgagagtgaatcagaagttaggaaaattttcatccgtgcacaaactaatacaccatgcatcctgttttttgacgaggtaaaggattttggtttatctagccatatagtctgttccattgatgaaaacttggacacaagttactgaatgactccgaatgtttgataaattttgactgttaaacacacatcaagcagtgtatatgtgtggagtatgaagtcgtttttccaattctaagacgctcaagtgtaaacccatgtgatgttacaggtagatgctttgacaacaaaaagagggaaagaggggggatgggttgttgaacgtctcctgaaccaggtttgaatactttacaagttaatatatatttgcggtagttgatctgctaacaaggttctttttgttctgtgttactctaattgttttgttcacagttgcttattgaacttgatggtgctggtgaacggaaaggtgtttttgttattggagctacaaacaggtgctgtcagctgctgataggttctccttacatatttatcactgaacataaggctgaaactgcagctccttttctggtgcagaattgatgtgatagatgatgcagcacttcgacctggtagatttggcaagaaacattatgtacctttacctggtgctgatgagcgggtttcgatattgagagccctcgctcggaacaaaccgatctcctccagtgttgatttgggtgcactggcacgtagagaggaatgcaaaaatctcactggtgctgacctagcatcaatggtaagttatgactttttgttgagtggtttctccatttgaattttgtacagggtgatcatgtctgctttaatttggggcaatgtagttctttatatgttttagttgattattttcttcccctaggaacctatgggacattttgtgagttaaaccggatattggagtgattatagttgctttttgtttgaatattaatcatgtgattaaagaaacgtgcaaaatggaactaatgtggtccattcttcaggtgaatgaagcagccatggcagcattggaagagaggctggagttcctggagaatggggaatcgtcaatgagctcatcatctgcgattgagctccctcattttgaacgtgctctagcaaaaatgcagccatcagtatctgaacaggttagaagctcttaatagttcataaatgtcttgttgctatagcgaggagatgtacatcagattgtcatggtcaacccttttgatgacacgtttcaccttggttttgttctttggtcacaacagcaaaggagacactacgaggcgttgtgcaagaaatactccgcaagctgatatatattgcgccatgcttacagagatccatgtcctctgagttgcttgcagggaaaatacaggtttcgcttgcaaccaattttggttttgccctttttttttgttcccctttgagtaggccttgtggcaattttgtgcgaccgaaacatagatggttgagtgagtagtagtatgaatatgcgagaaaaatagttgttttttttttcttttcacttattgtaccattcatcatcttgtattgtaatacaaacttcatattggttatgagattgcataatcatccaattaagcccctactatgctccaagttgtccattggattgagctgctgctgctgcttggagcttgtctaatgccgcccagagcttgtggtctttgtagtccctgatgacgagggacgctccggcggcgacgaccttggcctcccgggcctcctccgcaacggcgatcaccggcatcccggcggcgacgccggcctgcaccccgaccaccgagtcctcgaagacgagcgtgtgacggggagacgcgccgagcaggctgagcgcccggaggtagggctccggcgagggcttggggaggtcgcagtcgtcggcagcggcgacgatgacctggaagaagtcggagaggccgaggatggagatcatgaggtcggcgttggcccgcggcgcgttggtgacggcggcgcgcttgaggccgcgggcggcggcccaccggcagaggtcggtgaggccggcgacctcgcggaggccctcggcggcgtagcgcgcgaagagggcctccttgtcggcgaataaggcgtcgaggcggtgctggggccagtccgggaagaggaagctgccgatctggtggttgctccggccggccatgtgggccatgccgaactccggcgtgatggggacgccggagttgtagccgagggcctggaggagctcggagaaggccctgtggtggaacgggtcggagacgcacatggtgctgtcgatgtcgaacagcacggcctccaccagagacacctccgccaccgacatcctcttggtcgtcgtcgtcgccatcgtctccatggccatggcctcttcctccatcaagctcaccatcatcagtactgttattatattgacgaaggcttggttggttggtgtggttaaagttggcgcggttggtgaggtgaggtgacccgtctcgccttctttttctacgattcccgccatgtctccaccgaccttatttttcccactgtttttgacttgccctccaccgctgagtctgactgaacagtcaatatattgactctctgaagcaagggggaaaaatccattttaactcgtaggacttgttcggaatataggaatattaaaaatggagaaataggaaaagccgagaaatttgataggaaatgtgtaagcaaaatagaggatttgaagtacatgacttttataggatgggtatccggatgattgcgagaaacataggaattgttctggaggaatgcaacgtaaataatcaacaaacaaatataaagccagctgacaattgagtctagtgcatataattgtgtatgacaccattattaaagtagagtaaccaaaaataatagagttggtataggcctttgggcttccacgaaaccatggcctacctttcagttcacaaagaagtcagaaggaaagaagataaactttgggccgtttgcaaagaacagatgaactatgggctcaattcttgagcccataatggacgaagcttgaccactgtatggcggagaatccggtgcaggaaacattgaggagcttctctcttctgttgatttatgcagggaagattaggattcgggattgaggctctttgtgttgtaaaccaacacgcctattaacggatcaccggatccgttcactgtccctcccacagcagtagaggcatgagatgatgtagaacacccgcgtccatccctttgccctcaagaacattacagaagtagacaatgaacacatatatagggtggagctctctcttcattatagatctcatctggagtacaagccagccattagccattagatgtcacatcctgcccctgtatagataggggtcttaggaggagatagaccttatctctactccggttcggattagcccacaagaaacttatctccaagagatttgtttcacaacactcccccttaggctaatccacgaccaactcatgcctcgtcaaaactcctaccaaaacccagtgggaaaaaggctaggagaaagagtacatagttatcgctcatgcattgcacgttgttgcctcgttaaaaaccttatgtgaggaacaacagctccactcactcaagggaaaaagagtacaacactaaggactacacggtccatattgtgggtcatgttctagggtgttctccccctgaacctagcaaacatcaaagtcttctcatcccaattctccggaaaagcttccgagaactaaaagctgggagagactaggtgatcaatcctctagattatcattcaacttgaattgctgctcatctcacctcccctcaggagtctgtgaggtagcccacttgtatttggtgtcagtcaataaagacagatcttattatgataggaccttaggaacaggtctaagtgatcgtcatcgagtcaatgccctgggcatactctaagacatttcaatgtctcgcaaatgacaatcaacacatagcacatactccccctgatgacaacctttgtcacagaccatgttcccatagcattaaacatctctcagatgtatgcgtaggcaagaatccttcagatcctcaaaccattagtcttaaaagacttgtctcatttcaccgctaaaacgagaatagggaacacagagagtaatgcattccatcactatcatataccataataccatactgctgtgcaacgcaatctgtttcatccttcagaaggattattggataaataagtagcaacggcacgcacctcctggtcgtgaccccatcaagcacttggcctgatcattgcaactttctctgactgtgtcaccaacaattagggattcacaagatcaaccgaagccttccaaagacatgttgtaacaatcagagtaactagctagtctgaaaatttaagcactgtgggggataacacacagccaacaacaccaagtatacctcaatagctattagaggacaccaccattccaaccattaggtggaacggatttcacgagtgtacacactccagtgataatcacgagatgcacatgtgcctacagacctcgtctgtgatctcatcaggttcctcatttcaatcttaccgggtcataaatgggtcatcatccctccaagggattatacaatatggtgtattcagacttactaattattttgtatctcagaggaaaattcatcaatgaggtctccccctcagagaaaattccgtccatgagattttctcccaacgggagatggtactcttaccggaatacctattggtacgagatttgcatgccgaaatttcactatggagtctattcaagacctcctcatggatttcccaaatcctttaactgcatatttaatttcatgccattttgccaatacctttgtttagtggaacattcaactcacgtggaagaggtctcatgaaggacctacttgaaccatcgcgcatcaccacctcattatattaataatgacccataaaaatccgaacaacgttcgcgattttcaattggcgattcggttcaacctcaattgcatttccatttgacccgatttgagcaccgtatgctcatgccatggacttgttccggatccgggttctctctaagagaatcattagcaagaggcgacgtagtgtcgacacatttattcctacttacacatttaaccagatcttcgtcatttcccaaaatgatcgatccatggttgttccatattcctagcaccataatatgcgcgcattgctaggaatgtagtctccacgacgaacatcattatgaggtatatcaccttccagaggtgaattctccaccaggagaatcagaggagtatgctcacatccagtgagaactcttatgctctgactaaggactacggatcgtgttagcaggcgtccccgcacaacatgatcaaatgccataagtcttatgtggatacgatattattcccgggtctatccacatttaccacaattgggagcattactctttttaacaactatctagttgttcctcatatgattttgttggcaaaaactc

SEQ ID NO: 24898 - DNA, 3663 bp, Oryza sativa
ggagacatttgtccatatatgcagtgagcctagacatatacgaatacagtggcatgaatactgtattcttccttcttccgaagggttatcctcaacctcctagttaggatatacaggtttgcaaaaaccaccattgctatcaaatgtatatgcaaccaacatgcaatactttagccaaatgcactctccatggattaatgctcacctagtgccattcaaactcacaatcgattccggatcgacgtgcattacacatggcatgtcatatgcttaagaaggcaacctatggtggcaaaatgcattccgatgtgctcaacaaggagtatgatagcaaaatgcgcggccactagcctgcgctgccaaccatattttgtggtgcagagttgttttaaagtccatcttgtttaatgcccaagtttgaccccaattactcataacaaactctagaattgggtcatagttaagcagcatgtattaggtaccatccactagcgaattattaaaccacatttgctaatgtcccctggacatagccatcgagagataatcaatacctccaacaatggtaatattcacaataaaaccattatattcagacatatccacaaaaatagtggaatgtgtcggtgcaaccgtcgttggtataacgaagctcaacgcatgcaacacgacgaacctttgcatggcttgcacatgtccacacgcaaaaaacgccagtgtgcgacaagcatggtcatcaacccatgggatgatcaaccaacacaaccagggagtagtcatcgactacgagagcgcgataaaacgcaatagtgcatagccaacctttgtctgaaatacagttacgtcgaattgtgtgagtggttgtaactcctcggattatacactaattgttcttctaaactaaagcattttatcaattccagcatgaagataagctttagaatagaacaggaaagaccaagaacgttatttatctgagaaatatcgatctaatgcaaagttccaaactaagcaaaagataaactgcttggcaacagtatagtcgaccattgtcctcctaggacatgctctaaactggccatacaactcctgttgtcaaaacaactttattagacaaacactacaaacaattggtcaacaaccagaggtggcaatttagcgctagatgcacacgaggaccgagactgggtcaacacccaagtcaagctgttggcgctatagtgaagtgggaatcatgcctattcacagcatctacccttgggcttatccctctagatttgcctcctcttttccggtgtcctcgcaagacatcaggttccaaataatattgagaaaatttgtgcacaccaacggcaaccatacgaacagtgtcattccaccatatgaaaaacactttacatctttcaccgggccaggtgaaaaatatctcaaattattgaacctcgcaactccacgttgccagaaaattgaggtataatcatttatctccaaatcagaaaagcgtgctctcaaccattgggaaagcaaaaaaaaatgtcgaccgtagtccggccatactctgattgagatgttaagccactaggggaaagacacaatgaatcccaaacacattgtctaatcccacacatttcaatgactcagaatcccattcttgagtgtgatcacagggatagagtgatctacattaatgcccaaagccatacaatagtcattgaaggcttttacgtgaaatcacccacactatcatccgaatcgtttcatgcggttctcagagaacgcaacacgcaaactgacgatatgcagagtgaattcggcaagagcatggatcttgtacaacaagtatacgtgactccatcttgtagacacatcgatatcaccatttatgtatggaggagtgtatcagtaaagagtggtcttatctatagccatggatatttaatttcccagaatttccatgcattaggtgattttctattatttacttggtcttattggcattatattcccaatatttatgccacacagaaaaccatcacacataaatgcaggaaaataaacccatcataatgcttccaaggggggattctacactgtatgaacacaatttatggaagcatcataacctagaaaaccatctctagattatttagttggaattgcatcaattttaaaagcaaagcaatgcttaaaaaacaccattacatggttatttacgagtccggagacccacatgcaaaaccaaactatacaaggcctaagcaacaagacataaccacacaaacaaaattaatataatctcttgttaattacaaggttcaaactgtaaaattgcattaaacagtgaactatagcataaaaacccaacactccgggggcttaaacgcaagttgtcaataaaccgaaattaatcgggccgaattaccgttcatgccacgatcttatttgggctagcaagcacagtgtagcccaacatgcctaatgggccgaatttccgaaagtctaggcccatgaggatttccaggtttattatttttattaatttgtttgggctatctcgttactgttgggctttattcggtcgggcggaggcagaccggcccaaccggttcgcctaagtgaccgagagagggaagggggggaattagggtttcccctttcccattcattgtccgcaacggcgtccaccgcccggcgcaccggcccctcgggcatggcggcagcgttggaggccgtcgactgtcgactttgaagggatttagggcggtgcacgcgaggaggtcatcgacgacccatccactaccccgattggcaggacggcggcgatgacatcactcccgtgtggcaatttggtgcggtggcggctcggtggcacacgacggagctccacgttgacccgcgcatccttatgatggtggcgaggcgaactcaacgacgacaactgagacaccaacaacggcaaccaaattgcatccggccatatcgtctcggcggaggttaatccggtagcaggcagccgatgacccatcatcctcctaccacggctcgacggcagcgtcgatgggaggtcaacggcggcaacggcgacatgggtttagggatttctccgagacggcggtttcctgcgacggcatcgacgtaaggccgacggcgtacccaacagcgacggcgaacgacagttgacacgtctccaagtccagcaaaacggactgagattatgtcaccgtgttcccggcgtggcatcatcaaagaaagagagaaacagagagatgcgaggtaggagggcgagtcggctgattcggcctagccgaattaggcacgtctccagtccagagtttcctatcgattttaatgatttctctcacacagttttctccagttttcatcaaataaaatagatgcatatagatcaaaagcagaaaattaatctaccgctagatcaagagcagaatcaaatctactgcaagcaaagcatccatatgataaaaacgagaaaatataatcaatctataaaacatatagatttcatgccttaataggcacatgcccggatgtatatatatgaattatagtaaattagtttataaactaatcttactaattaccgtgatttgcgcgtctgtcttagatcgcgcggttgatgtgcgtgtgtgcgtcgaccaaccg

SEQ ID NO: 24899 - DNA, 853 bp, Oryza sativa
tattcatgttgaaacctaacatatattttccctatttagcaaagctggggcagcatttcctttcattaattgcaaagttgcttctcagataattatgagattcaaccaaaattttgaattctgaccatcaattatttctgatatgcttagtttaaaaataaaagaattaacatatgtagatttgcctcgaaagttactacaatatcagaaacttattataatataaaattgattgttggaatttgataagtttgaccgaatcttgtcctaaacgtcaaatattttttgaacaaagggagtaatttggtagagaatcgacccaaacttgttatacatggagtaaaccaaccatttttttggcaaaagtaggaagaatccttcagccactaaacctgtttaacttcattaaaaacttcaagggagcttataaacacttcttttaaacaactggctgaatgacatcaatgtttatactgccacagggaattatggggtctggagtgggctacgtactgatgacatggtgtgtcgaaaagagaggtccagtgttcacttcagcctttattcccatcatccagatcatggttgccataattgatttcttctatcacatgagaacctctaccttggaaggtaatcttgtcttcagttcttaaatcaaggcatggagtctcatgtttctttcttaatttattcctcttcctgatgaagaactgcagaatctttagtaacagacattggatatatagcacaattttattctagctagtcttattattttctaaactaaattctagtcttattaaaagagtgaaatggtacatagatacatcacattcaagctatgagtttt

SEQ ID NO: 24900 - DNA, 5907 bp, Oryza sativa
agcagtgatctgccgtgcgtgaccccgccgattagagacatcctgttcccatatctgctgtttcccatcgacacccagtgctccactcaggtctgatcccaatccgctgcctgctccactcctttgattgttattcccctttcttccacataattgcacacttaggcagattcaaccaaattttgtttttcagatatattgtgatatagtgttacacaatgagaattcctcctcacaaataaatggctccacgtgcttctgttttcttggaatgctatacgttagtttttagatgcagcgattaagcgagtataatctgtgagctatctaagtaggatatgacttaattcgtgcaaggttaatcgcaatagcagccatattgtagattagtattcttgagaaatgccatataggaaatggatcatttcaccaatcatatcattttattcctagtttcaatagtaaggcaatgaatctgcatacttcatcatgttaacaagccggcccaattaactactgatcaatattttttttggaaaataaatttcatttaataatgccatggattggagaaggttgagaaaacaaattactagacaagattcggtggtatccactttagacttcttattggcaaagtcttgaacattttaggtttatatattttgggatgaaatgctaggctcatatattttttatttgcattctccttcttaccctctgagtaaataactgaaaatagatgttttagcttcttttcaattctcagaaatttcgctaattttcacaagttcaggagatcgtcgtgcgtgacttgcctatcggagacctcctgtgcccatatcctgctgtttcccatcgacatcctcagttcatcattaccttaattgaaggtaaaagcagtgccttctcttttttttttcctgtttcccttgagtgattgatatgagcaaatattctttttcttttttttctttggcatctgtgcatgtggatttactcatctgaaatacccttgagactttgacttctatatattccttgcaaaggggaataatgtctgttttctatcctgactcgttgggttgtctctcatatacaagggaaggaatttgcaagagctgtagccatactaccttctctccaattatatcggttaacagaaagatagaaccattattccattttgccacacaatcccaacaggacagatcccggagttgctcagactttgaggattaaaatactaactttgtaatttctcacatcattatttttccttctgtgaaacaacgtgaaattaaaaaatggtgaaaaaaagacagattccatcccctgaggtggaaggtgcgttagtgcatcacacatgaaatttgtacttagctggaaccatcaggtaaagacttaagagctgttaagcttaataaaggaattcagttgttgaataagcaggtagatcctgacctgtggattagtacctatttgtgtgtttataagatgaattgattgttcatatgttaccgcgagttaatttggaaaagaaatgagcatagggtgaaaacagcagagttattatttcatttgcactctgaatgaaaaataagtaaataacaattcaataagaagttataaatgcaacaaattgatttacctctgtacatgattcaagattcaagtgcaacagctaaaaggtttcttcccctggtcaaaatagagtgaatctcaacagccatgtataataccaacgttctacagtattctaaaattaatcatcccaatgttttcttttgatcaatggtgtaatcctaccaatttggaattgggatacatcgtacatccagtttgcatgttctaagtgtgcacatttcttactccctggccgctatcacaaagcttgaccagtataaaagtctacgacataactgtaatcttatttgcatactttatgaattcattccttctctgtttgcaggttggtacgtaggcatgccaaaaatctaccatcatttgattgtacaacctgtaaataaatatgctggagatggagtgatcagaatgaataacaatgtcatccatcagatcgcctttggctttgaacaagctctatgagatggtcaaagattttttaatcttctgcttaccattaattggttacctgataggagccaaggtcacagtaatagagggaggcttaatgaatattcccttgattgaatttttctgactccatatgtataataaaaagttagtatggccatattatttgggtataaccctgttaggaacccaaaggcataaaattcatactagggaaaactgctccccttttttctaatatagaaatacttccagctggaagctgctggtcatttgttagtatatatcttgatgattttttcctctattgctactttccatttttatagccaatgaaataagttactaacatacgccatacagacaatattatttttgaacttgttttacagccacaacaaattaatggaataactctatcattcattttttgtatgtgtggacatatattgctctatattgtactccctacatttctacatatttgacaccggtgattttatagcacatgtttgacccttcatcttatataaaaacttttgcgaaatatgtaaaactatatgtatacatataagtatatttaacaatgaatcaaatgatagaaaaaggattaatagttacttaaatttttaaattttttgaataagacgaacggttaaacatatttaaaaaagtcaacggcatcaaatatttaaaaacggagggagtatattaaagcgattggatataatggtcgatgccctcgatatcatagtattgtgtcgcgccttaaatatatttatatatgatctgaatggaattaaaacttaattggatggattctagaaaagttattttctgacacatgaaattttaacaatgtattaaaaaaaattatgacaacgtagcgttagcacgggtatattactagtgatgagtgaaaccatttgttggactatagggtagatttatgatgattttttatcccgtttatctggcattacatgttgataacccggcaaatcttttctgaagaatagtactattacttgcaacagctactgagcaccaaattatagtcagtgagtcaggatggcaacacaacaattcaagctccctgctaccctctctagtctccaccttactacagtctactggctgctgctgtgtctcgtcagataatgagataaacatgtttgtttcctgaactaatgctggaaaaatatcatgaaattagaggagttacagacgcctatcttggttatctgaagactctgatgtttaagctgttcagccgggtatttgacagttatatgatctctactccaaattgatgccgacttcaacagacaagaagaactggtcgaatcggagggctggccctcgtgccgctcatccccagggcggcgaccaggcgagcgcgccaccgccaacctcttcctctcctcccctccatctcgctgccactcgagcggccgccagcaaagccggggacgcaatgatgacggtggcggggctccctacctcctctcgcgggcccggcggcctagggcagtagactcgctgctccggggtcaggacttgctcagcatcttcagggccaaggactacgacgccaccgtcgagttctactaggcgtctaaatattcgatgtgacatctattttttttcgtaaactaaacaaggcatttgaccaatatgaaaacgatatgtaacggagggagtacatttcaacaccaaacataatagtaagagatatcatgggtggacaaatactagtagcagcagataaataacacaagaagaagaataagcagcagcagcagcagcttcttctcacaaagagggctggaggaggaagatctcttgtgctcggtttgacatgaggtagcagcgcgccttgtgcttcacaaggcgcagctgtccttcttctccggcgacggcgacgacttggacagccatgaggaggagggcgaagcgcgtgggcatattagaatagccgtattgctcgccgaactcgacgatgatggtccagccgatgcacaacctgccatctcccaggtaggccaggctcgccggcccatgcgggaaatatccccgctccaggcactcgcgagggtacgtctcctccacccacgcgtacctggtcaccggcgccgccgccgccggctcggcggaggggacgtcgaaggcgcagaggcagtaccttgtccggcacatggcgaagcaaaggttgagttcgggcacgaacacggcgcgccgcacccatggaagctcccagtcgcctaccttgcgccacgccatggcattcccatgggcggtggtgtcgaaggagtaggtgcccctgtccggcgcggacacccagatgcgcgcgccggcggccacgaaggccgtggtgttgcagaagatcatcgcgggggccggacggaccatggagaagtcggccggtggatcgggcagcgcgcgccacgaccaatggcgccggcgccggccgccggacccggcgacaggggtggcgggcgggaggaggacctggaagcaggggtcgggctcgcacgggcggttgtccatggagtagagtcgggtccccagcaggatgagggccgtgccgccgatcgtcgcgtgccggagctcggaccgttcgacaccactgcggcggcggtgtcgtagaggagggtgcgcttctgcgtgctgacagcgacgacgttggatccgaccaggggcgaagtcgaggcgctcggcgcaccgctccagcgaatcgaacggggcgattggaggaggtaaggccctcatcgttgcccaatcgtggtcgtcgccggcgtcggcgaacatgggcttgagatttagggtgaagacgaagtatatgccgttgccaccagtatccagcctcttctcatccaccacgaaaaatatgcgatttctcctcctccccttgctcttcttacgctgctgctcgcttgcgccgcctgattccatctgccctgccctgatgaatcggtggagacggcgaaaatgctttggtacgggagatgcagagatcacccaagaaagacgtggcagattatcgccttaaaaaagtttactctattttatcgacatcatcgctccctcaccgacatcagcgtggcggccgccaatccgttccgcagtggattccgactctctgtttgagttccctgccgacggaatcagaataggactgggagaaaataaatactccctcgataccaaaatatagtagtaagcatatctacaatcaaaactaaattagagtgttctcgctaactgaggatgatctccggaaaactcatctcttaatggcggacactccagatggactcctcaaaatctagagtaagttggaagagatactccagcctacaacggttatcctagaccacaaaacccatgtatatttttactaccctacccctaatctctccctcccgcacaaaatctctcttttttcgccgccgcccctccacttctctttttcttcgcctctctctctctccctctcgccgccgccgtcaatcgcctctctgtcgcctgtggccacgaggaggacgagtagggccacctccctctctctctcatcgccgcccatcgcatccctctctcccgtcgccggatctaggccccccgcggccagatcggggaggagacgttggcggacacggcgctggcggaggaggccggggagggaggttggcggcggtggcttggtgcattccgacactagtatagtagtgtcataaaggagtagtgtatagcaagcgcttctaactgcatcaagattaactaaaatcctgtgatcttgagaaaatcaat

SEQ ID NO: 24901 - DNA, 1084 bp, Oryza sativa
agatacttcaccgaggtcaccatcatcctctcccagaccggcggctccgtcgcctacctcgtcttcatcggccagaacatctgctccgtcttccccaccaccgccgccggcggcgaggagccgccgcgtcgcgtgtcgccggcagccgtcgtcctcgccgtgctcctgccggccgaggcggcgctctccttcatccgctcgctgtcgtcgctggcgccgttcagcatcctcgccgacgcgtgcaccgtcctcgccgtggccaccgtcgtcagggaggacgtccagctcctcgccggccgcggcgggagcccattccaggggcggagcgccctcgcggggctctggggcgtcccgttcgcctgcggcgtcgccgtgttctgcttcgaggggttctgcctgacgctggcgctggaggcgtccatgtccgaccggaggaggttccgccccgtgctcctccacgccatcgccggcgtcaccgccgtctacgtctgcttcggcgtctgcggctacctcgcctacggcgacgtcaccagagacatcgtcactctcaatctccccaacaactggtccaccgccgccgtcaaggtcaccaccaaatcaaacataaattcttttagagttctttgatcaagttggccatcaagcacgatttgattatccgattcgcagatcgtgctgtgcgtcgcgctggcgctcacgttcccggtgatgatgcacccgatccacgagatcgtggaggcgcggctgttcccgtcggcgggcgggtgggcgcggaagcgcgcggcggtgcaagcgagccgcgtggcggtggtgggcgcggtgaccgcggtggcgtgcttcgtgccggcgttcggggagttcgcggcgttcgtggggagcaccgtgtgtgcgctgctctccttcctgctcccggcgctgttccacctccgcctcgtcagagcggcggccagcgcgtggcggcgctcggtggacggcagcttcttgctccttgggctgggcttcgcggtccatgggctttacaccgttgtctcggggcctttgaacatgggcggtaatgggctttcctcgccgtccaatcccaatc

SEQ ID NO: 24902 - DNA, 634 bp, Oryza sativa
ggaatcaactggaatactcccaaatcattggctcgttgatgtacctggctagtgcaactaggcttgatatctcctttgctgtgagcaagtggagccgatttacttctaatccgggagatgatcactggcgtgcgcttgagcgagtaatgcgctatctgaaaggtactgtggaattggggcttcactatactgggtatcctgcggtactggagggttatagtgattctaactggatctctgatgtggataagatcaaagccactagtggatatgttttcacactaggtggtggtgctgtttcatggaggtcttgcaaacagacaattttgacgaggtcaaccatggaagcagagctaacggcactggatactgctactgttgaggcagaatggctgcgtgatctattaatggatctgcctgttgttgaaaaaccggtgccggctatccttatgaactgtgacaatcaaatggtaattgtcaaagtgaatagttctaaggataatatgaaatcgtctagacatgtgaaaagacgattgaagtctgtcaggaaattaagaaactccggagttccaacgttggattacatccaaacagcgagaaacctggcagatcccttcacgaagggactatcacc

SEQ ID NO: 24903 - DNA, 1564 bp, Oryza sativa
tcttgtagtattgtgctaacgctgatgaaatttatcatcaggtggtttcgacacggcgcacgcggcagcaaggtgatgtattaattaagctcgatcgcgtgaatagaattaattaaccttgttggattaactggtaatcatattgattcatcgaggttgatgtacttgttgctaaatttgcatcgatcgatcatgtttacgcagggcttacgatcgcgctgcgatcaagttccggggactggaggctgacatcaacttcaacctgagcgactacgaggacgatctgaagcaggtgatctagatatatgattacatactaatcgtagtatgatactccatgctagctagctagctcgtctcgacctttcgatctcatgtgagtgaactgagctgggttgctgcagatgaggaactggaccaaggagaagttcgtgcacatactccggcgacagagcacgggattcgcgagggggagctccaagttccgcggcgtcacgctgcacaagtgcggccgctgggaggcacgcatgggccaacttcttggcaagaagtaagcttaattagctagctagctagtgatcccccttcatcaatacttcaatttcacaaccgtataattaggagtgacaaacgaaagtacagatgtgagatgttcaggttaggaatgataatgagtttaagctaattaattgagtccagggccatgctagtgtgacacaagttgtttccggttggggcgtcttaatatgattcgggtgagaggtccacatctccaattctcagtgcatcaattcgcagccaatattggggaaaacacatgtactttctcagctggagagacagtattgtcatcaaagagtctagctagcagttaggcatgtactacgcttttctgatctgaagtggtctcagaattcagaaatatcttcttgcaggtacatataccttgggctctttgacaccgaagttgaagctgcaaggtactattcctttgatgaagtgacatgcatgacgagtcatgaacttcctggtttctcgctcactttcgattcatgtctggttgaatttggtagagcatatgacagggcagctattcgcttcaatgggagggaagctgttaccaacttcgagcctgcatcctacaatgtggatgctttaccagacgccggaaatgagggtactacaatcagtctcaccatcgaattttccgtttcagccgaagcacaccaaacaccatttctcatagccatcactgtttttttctttagcaattgttgatggcgatcttgatttggatttgcggatttcgcaacctaatgcgcgtgactccaaaagcgatgtcgccacaactggcctccagttaacttgtgattcccctgaatcttcaaatattacagtccaccaggtaatgccgtaatgcttatagaaagtaataaattctcaattctgtttttagtttcaattttttttcctgtttttatgattttctctgcaagtatatatctgtcgaaaaaaagtgcatgcaaaaaaaaaaaaatggtagtagaatggaaacaactgtagc

SEQ ID NO: 24904 - DNA, 631 bp, Oryza sativa
gcccaaatttttcttgcggcccaggtactccatctttcacctgggattaagatattttctttttctccctccaaagcaacacgaagggcggctaatgctaatctgaaatctcctctcgccatatgggttccggttctcctctcccctgcccatgtcgcttgccgtggccactcaagcgtcagcacgcctctccccgctcaccacctcctcccccgaaccctgccgccgccgccgcctcctcctctccgcagccgcccctctccggcgcacccgtctccggcgccgcatcgccgtcgtcgcgtccgtccccgaccccgcggcgcggccggcggagtacacgccctggctcatcgccggcctcggcaaccccggcagcaagtaccacggcacgcgtcacaacgtaagcgggatgccttctctcgttgcgcaccttcctgtccgatttgagatgctcaccctctcaccgctttgtgctcgcgttcgcgttcgcgttcgtgattaggtggggtttgagatggtcgatcgcatcgcgcgagacgaggggatcaccatgaacacgatccagtccaagtcgctgctcggaataggtaccgccctctccttgttgcagtggagtggactattttgtttc

SEQ ID NO: 24905 - DNA, 2150 bp, Oryza sativa
gccaatcttctgaactctactcctcgctcattattgtctaatataggatctagatgcctctctttgatctcttgagaggaaaccggctctattgattcagtcattccacttaggcaacctggcatattatccatccctgcatctgaagtatgcaaaacaggacctttccctctttcaggctcaagcatatggccttttgtacttgcaattcctaagcgaggctttccaagcctccatagaagaggagggagaggtggtggtttttgaggatcttcataggaaacatttgaaaacggttcgttgggtggtggaacaggagacgacaaccgatatgtttcctcagtacttggcatggcattagcagaagacattgtcgatgcctcagatagtaccactgattctgaataacatggttcgatttggcaatcaacttgaggcaagcaataagatccgttctctgattccaattgcttgcatggaggttcatctagctcacaaaccttatcatcattcaaggaacatggagcaactagagaatccaattctgggaatgaacacacttcttgctctaactccaccggaagaacatgagttgatgtagcaccatctggttcattagtcttatcattaggtgaagagcacggaatgatttgggaatcaagatcaccagagacactgtcttctgactcgagttctattaaaccagaactgctcaacggaggggcatttagttcatctattttctcattacttggtgttggagaacatgaagcgatttgagaagcagattttcctgggacacaaacttctctctccatttccgctaggagagtattgctcaatggagaggcatcatccagttcacctatcttctcatcaaccaaagaagatttggtgacttgagaattatgctctcctgatatacaatcttctggttcctgttctgcttcaagaacagtactcaaaggaggggcatctacatgatctgccatctcattaacagagcaagatggaacagctcgagaatcaagttcgcctaaaacaagagcttctgatccctgggtttgaattcgtttgctcaacggatgggcatccacttcatctctcccctcatcagttgaagaccatggaacatcttggtaattatattcatccgagtcatgaacttcttctgatggttccaacaatacggagttactcacaggaacttctagttcatctgtcctttcattaataaaagcacgtgaaacaagattggcacaggtttcctgtttatctttcactgcaatactgttgcctgaaggagagctacatgtttcatcgatcatgtcattatcccacaactgggaatcaccatgagaatcaacctcatgcaaggcatgttgttccacctctagttccattggaacagaagggacacctaattcatgaattttctcatcaatgaagggctcatcggattttaagtcagaatttgctgccttgtcatcaggatccgctttggcagaaaagtgcatcaatgtatcatctggagcatccctggattcctcctggtccactcctgtccgtactgcagagacacaatagaggaactccgactcactggtcaccaaactacttgagacgacattagaatctgaggctggtttatcatcaatactttcaggcgttgctgtcagatccatctcgtggtactcatggcagaacgatctgaagtcctcctcagtcataacttctgatggcaatggcacctcatcaggtggagttgcaggttcccagagggaatcagcaaccggaaccggattcaggtcttcgattcccatattaccatgagggattaatagttctgaaataaaatcctgttcttcctcagagaaacatggttgatagctaggacacggatcagctagagcatgattcgctttgtacccaggatccatgaatgggtttgtaccaaaagaatcttgagcacgaggctccctcaccaaatcaatattttctggttgttcttccaccattttactattcaagattactgcaccacccttctccacatcacaatgatactgaacgtcagcactaagattggtctcgtctggtaattcctcttgacaaacaggatttttcggacaatgcaatgctgaaagatg

SEQ ID NO: 24906 - DNA, 1288 bp, Oryza sativa
gaatattactacatctgtaagagaacatcaataatcaacaacaggcatatctttgttgcagacagtacaactaaaatgtcatacaacaaagcttataagacaaacctcaccaacaaagagcctgtcaaaagccagcaaaagttttgcaatcaccagttccaaatgatgacacggtatataatagaaacttttcaaaaaaaacaaaatgctttaaattttacgaagtgttgaacttagatactgaccgaattgagttgaaaacactacaactattccttcaaaagaaaatatatatgaaaggcgctctcatctgactctctagaactttcgtctctattatgaagttcacaatgaaatgtctttgtccctcatctaacaaaatccaaactatgcagcatttccaacactccgcaatagacaaaattaacaaggttgaatacccttcccaaattacagaaattagctgcagtgttaattttctcttctattcccaaatacaacaatgtaccctctagtctaatgtctaatctcttcactcactaaaacagctatcaattgcactacgaaaaagaaggaactatcctgaaatccgcacagcgtgcaatgaagactaaaaaaagcaatatctgcagtggcccatcttgctagcccgaaagggatgcaaatgtaactcacaacccccatttgccaaggaaaaaaaacgtcatgactcaacccaaatttggaaatccaattacatgctcaaactggactcagaatacatccctcgtggtctccccaaaatttgtaacaaattcaacaggtgaagcaaattctaagaccaactgatgccatgaaattgagtaaatgagcgcaacaaagttgaattaaagtgtttccaaaaccatcgagttatctagtacatagaaacatcccaaaagcagatgaacacacacaaaaagaaattcaaacaccgacacaccgcatctcaatcgaccgtaccataagtccaaaacacatccagaaacttgcaaactccacagcgaggccactcactcactcgctcattcgctaacacgaaccctagcatctctccacacaggaaaaagaacaaagaacaaagccagtggtactcactccgcgagatccccgagctggcggagcacgccgacgagccccgccatggcgaccccctcgaggagcgcctccgggtcatccttctcccccggcgcgtacagctccggatccgacagcccgtactcgttccgtatctggtaccgtatcatctccgctccccccttctctctcc

SEQ ID NO: 24907 - DNA, 644 bp, Oryza sativa
agtattacaagtcttcctcaataaattactccaacaaaatcctcacctaggtcaaagcagcttttcctatggttattttcttcagagtttcttgtacttgcatttgtatagtataatgccttcaattcctctgcttttcaattgaaatgtttatattgctgtgatcctctttggtgattactaactggactgtgtgaatgtatcatttttacaggacaaagatgaaacgaaacccagccttcataagggattgcctgttgtttcattttcgctaggtgacactgcagaattcttgtatggtgacgtgaacgatgtggataaagcttcaaaggttgatctggaatctggtgatgttctcatatttggtggtaaatcaaggctcatattccatggggtttccagaatcaaaccaaaaacagcaccaaattggctgaccgatgaagcaaaacttctacctgggcgtctgaacctcacattcaggcagcattagcttgccccgtattacatgtagagggaaccttgttctgttctgttgtagtagctcagtacccaccctattagcatgagttagctggtagtacattcgatctaactactggaaaactcgagaacgagtcagatcacactatcgaacatatatatat

SEQ ID NO: 24908 - DNA, 868 bp, Oryza sativa
tccatgcataattaactcagttccatctagcaacatgccagtacaaaatgcaggtgtttgttgatcctgccattcatagaccaagtctgatgattgtttatgcatagatcaatcatactatatagtaggctcgttagatcaatcttatacggttagcaactttatagcagcaaaatcaaaccaagttttgtttaaaacaggttctgttgcttctgggttcaaaataagttatgagctggcctaatctttttcagtcactgtgtacctcgtgcccccagtgtcggtgcttaccagtgttgggcacttggcttttttgagaaaagccacatgttcttttttttctcttttatgttcttttttttctcttttatgaaaatacgatgacatggacgatgacatgtacaaggcattttcgtcttttcgacaaggaagaaagagaaaaaaaaagaagggagaaaaaaataaaaagattccatgtcatcatccacatagcgtgttacgtaggtaagaccatggtcaaacgcggctttggaccgggatgatacaataaaccaagtttaagaaccttgatgtatgctttgcaagtttgtggatctaagtgaaacctcctgacaagtttaaggactgccggtgcattttactcaaaaaagaatgtgcagcaaaatcaacagcatgtgattagcttccattaactcggaaaggccacataatattctccatgcgactgcaagaatattgtcgcctcgatattcatgtccaacaaaatcaacagccatgtgattagtacagtatgagcatgtggcttttcaacgagctcagcattttccatgatatttccatctagtgctccttgtatatttatgattca

SEQ ID NO: 24909 - DNA, 3060 bp, Oryza sativa
atttctggggttcatagttgttgtccacccgcctcacggagcgcattcagtaccatcccataggcttcctgtgtttccatgtgtgcaatatccttactggtatcgttcaaaagaaccggaaggggaagtaatgtgttcagaattaacattagtatctgatcaactccagcttaaataagtaatcttgtggtctagacaatctacaacttctgcatttcatgaattcaataatcatgcacctctgaatttaaataaatcaattagcaatgcaatgctggtctggaaaaaagcaatgcaatgttcaacaaaatatgatcttctctgctgaaaatttccacatcctctcaaattttatctatccaaagacagtgcatttgaagtgtaggagaacaagaaatatgagaaatgttctgaaacataccacatataatgatataaatggaaggataaatgaatattaatgtgctcttcaaatataatgtaagctttagccttcatgtgagtaataacttgtaacaatagaagatacttacagaattttcatcttttgtccagtcatccaccaaaggtagctgttgaataccaagatgtcagctcccttccaaaacctggcatgcttttcaagggctgtcccccttacaattctatccgcaatacggtgaacaacagcatcatcagaatttgattcagctagaaagggagcccagtagaactcaatggtggcattatagttctagcaaaaagagaaaaaccaaaagcatattcagtgtgaatgagactattcagcaagctattaggatggaaaactcattatataattaaaaaatagatgtaaaatatttctaaatttggatcctgttgctctctttgtgtctgctctagcaatgttttgagaaacatttttaaatttcgcagtaggttcagtaatcatgaacacattttaagttacaatctgtcctgtaagcttccattagaaaaagaaaaccataaaacaaaacaaacaagggatacctttgctctgaaaaccgtaagcgagtcaaaagtttccatggactttgagctctcagggatggaccggtgtaggaggcacaccaatgacacatactgtccacggttcagagaatctccaacaaacatcatgcgcttcccccgcagcatctccaacataagagttgcattaaagctgcaatgcatgccattattaggcattagaatgggataagcagaaccaactgaagagcttgatcaacaatttagcatttcggttgtggttcaactgccgctttcatgtacagcactaaactgctaccatgttgagattcgtttaactatttaagagcacctgatattctttcataaatattttttttcaacattatttaagagctgtctagcgagttcagtgccacatagtatctgtccaggcccagatggtgacccaagacctgggccagctgccagcccattgcattttgtgctgggccatgtcaattacatggtggaaaaaaagcacattaaagtgggctttgaatcccaggccttgggccatggcccgtagtatgacccacatatgagccaaaattttttgaggagctgtgcacaaggaaaaaattacaaacaagttggtaagttcaggcaggcagttgggggaaagaatccatctacatgcatatctggatgctcatgcaccatggcatatatttaaagcgcactacaatttgtgcttagaacttagaagaatagggcatttgttttgtttaaatttgaaaacttgtagcaacctcaaggtacattaaatggacaaaatggtgcatgaacatccagtcctccatatgtgtacagactatagatgcgccaaaactgcatgaattatcaaatgcacatttaaattgaaccaaatgatagtctaaggcaaagattaggatgaggccagacagcaacagtacaccaaacggccccccctcatcatcagaactatcgctgaatcaagaccagatccgcagaaagagaagtataataaaggaacccccccaaaccttgcaagatggagatgggtccatgcctccatgccattgcattaacattaagccaatgcagagcacacgcaaaggagttcccttgccatggccggccggccctcatcctcctctccctcaaacccccatgctctcccatgtgacacctgctccctcaatgtcacacagctgcgacaaactggagccctcatgtgattatgcaaatgcagcgagatgcccacgagagtttggcactttcacttgtttcaccgtgacccagtgagtatggttgaaccagtcagcagccacggctggctgccggcggcgaacggctgcacggtgcactgtgctccgtcggccgggccggccatggctgtacccggttcaacgaggctggcctgttctacagtagacgccatgttaggcaaggcccgccattgcagccaagaagagcagcaagaatcatcaatgcgcattgctacgcggctacaccaggttgctgccgcgcgtcgagccgtggcgccctcgccgcacgaacacgtctcgctgtctcgcaccaagcccaccgcccaccgcccaccgccagccatgccgtaccgctcacctcacctcacctacacccacccacccgcctgagccgacacccgacagcccgagacacgcgccgcgctactcggccgctcgcccacgcaacgcgcggtcaggtctcccggcaaaatctcgccggagtttctaccgtttcgcggcgattccgcctgaacggctgaacctgaaaccatggccaggcaggagacccacgtgacacgtcgatttttattcagggataatattgagtagtaactaatctactcaacatcaaatcttttttttggaacatgcgtgctctcttcgctcgatctagttggtgcgcgttcaacaactcgatttctttaccaaatgttcttcttcttcttcttctttttacagttctttaatgcaaaagatcgaactaaatcaggagggaatttactgccattgttcgcgacgccgacgccgacgagaaggt

SEQ ID NO: 24910 - DNA, 1986 bp, Oryza sativa
gccgccgccaccgcccccacggcgaacggcggcaccacatcgccgccaccggactgggcaaagaacccgagttatcagcaggcattggcagatagaggattgatacactgatacagagggagctagctagcgaagcttacgctgctgccgccgccatggtggtggctcggggcgcgggggcgggcgatctggcggcggtggggaggagggcgggtgaggaagggttggtggagcgtggaggagaagtccttgaagtagaggacggagacgaaggtgatgaaggcgagcgtgagcgcgtacgacgtcaggaaggggctcctcgtccttcctcctccatgccccgccatgccgccgtgctgcggcttcatcatctcctccccgccgccgccgccccgcgcatcgagctacctcctcttgctctgatctgatgatctcggtgaggatctgatgggatctggagcaatgggagaaggagaagatggatgtgttcttggctctgcagtctgcaatgagaggagaggagtggcttttggtgatggggcctccccctttcttgcactttggtggagtaggcttgaaaatggttgaatggcgtggccgactactggttactggtagtgggtagagaagtgcagaggtgggtggctccagctgaaaacctcaaagtagtagtagatgagagaattggaacaattaacaaatactcctcctctacttttttttttcggttagaggaaacaaattggatatttattaattgtattataatgatttgataatgaactggagtaattggatggtcatttattgtattgtaatcatctgataataacagctgtcactatgaagagaaaaccaccaagttaaaataaccctctaccttttcagttaacaaattggttgttcattaattgtattataattatctgataataacagctctctctgtcaagagaaaatcaccaagctaaaataacactctacctttttggttaacaacttaacaaattggatgtcattaattgtattgtagttacctcctaacaacagttgtatctgtgaagagaaaatcaccaagatgaaatactcctataccttttttcagttaacaaactggatggtcattaatagtattataattatctgataagaacactcctacctcttaagttaggaaattggaatctctctaattgtattataatcatctgatagtaacagctgactccttgaattgaaaaccaccaagttaaggtaactgctagcaagaggtaatcttgatatcatttgctacttgcaactagtagtacaaaaatactcaagattcattttttttgtacggaagtggttttgtctgaacaatggtcgttttcagaggttgctaaacacctgtttaatagtactagtacttctacttgtgtagccaagcaacatcatcctgccctccttggcacggagagcttcccttccacgtgttctgggtagctagggccacatcagacgaaaaacaatatcctgaatttgctggtccattgctctggaccatttggttggtcctttcagtttatgagaacgattctttgcaaagttgcaagaagattgatggtgattaatgaagtatagcactagtgattggaacaatattaatttcagaaacattgctgcttttatgtccccaacgccccaactactatcggttgcagtatcttcatattccaaaatagttgtggtggggtagtgagcaataacatttttcataattcagatcagaaagcctagcgttttatcaaaatagctgtgtttcttgaacacaagttcgtcagttctcacaatctcacttgcatgtgaaaattcagacaatcttttcctttctgcttgtgcagaatgcatggaggctaatttcatttgactactgacgacctaaatttgatggatatgtctgaacttttttggctgatgaatcatttgctgagttctaatcattca

SEQ ID NO: 24911 - DNA, 2411 bp, Oryza sativa
aaaaatattcagacactcccgggctctggcggagggacgaccaatgtcaacgcgctgcgctaatcacgcgcggtcagacgttgactaccatgaaaatgccacgccagctgacacgtcacccacaggcaagtaggcccactggactttatcagtgggccgagatatgggccttcgtcgaccgacagagatagtgggccaagaaaaagtaagtagccagagttatgggcttaatggaattatgggccgtgtaggcgatgaggcccactagagcccacaaaaagcccaagaggaaggccccgtgtccccgtctcgtcttccccttccttcctctcgttccccttcgctttgccctcgtgcgacccaaccaatcaggcggcgctaatcctcgccgccgccgccgccgcctgccatggccgcccgccgcggcccgcacgtaatcaagctgcacgactccgccccggcgctgctcggccgcgcgccgatgccgccgccgcctggcccccgagacgagctcccgccgccgtcggccgtgctggtccaccacccacgaggggggctcgcgccccaccccgccgtcgcggcgctcgaggaccggctcgccgtccgcgaccgcgacatccaggagctcctcgtcgacaaccagcggttcgcggccacccacgtcgcgctccagcagcagctcatcgcggcccagcacgagctccgggtggtgtccatcgccgccacgagggcgcgtgccgagcgcgaggatgaggtccgcgcccttgcggagcaggccgcgcgcatagaggccgaggctcgggccgccgtcgccgcgcgcgcggaggtcgaccaggtccacgcggacgttcaggtgctcgccggcgcgcgcactgaactcgtggaccggttgcaggacctccgcgggcagctcgcgcgcttccaggccgaggcgggtaagactgagtccgtccgtgcccaggttgaaaccatgcgccgggagatccagaagggcaggtattctgttggtttatctcaacccccagttttaatgctaccatttcaacactaaatgtctgcttggattattcgtgatttcgtgtttacattttgtgaatgcacatgagtgttccatctcatgcattgcaaggaagaaattgtgcacttcatagcttaactttaggcctgatgaggataatgtttcacagagttggcgtgagcccgtgacttgagcacattgcttaagcgagttgtgttctttgttagtcaatcgagctgcttagagcttctacattttagcaagtcagtttgtgtttagttagagtaggttgatgatgcctcagaatttcacttagacatgtagcctgtttagatgctagtatatttgatcaatctggttttccagaacctttcgatttctgcttgcttatgtttgtatgagtccaaacctgtggcctatacatgatcacagtactgtgtttctttgtccagcaaattgctagctctatatggcactgttgtcattttaagcataattgaagtgtattagataggatgtccagggtgagttgttgaacatgctttgctcatgatttagctggagactagaaatcacttctatttcacatgttatcagcagtagttattttcacaaaaaatattcacatatacctgactaagtccagatagtctaggcctaggaataggattcttgctaagggtgttaattctgataagcctagtttccatggatatgccactgcatcggcgcttccacgcacaattcttaactcttagtcacaacactttcaagttcgaaattactaaaatgagctttgctcatcataaggcataaattataatattgtatgctggcagatgattctttgatgattggagtggtaatgtactgcccttgaaagatgaaggtggtgagaactacctattgctttcaagcactcccagctagtgttctaaaaagtggtcgtgcagccgcttaaatatggatggccatatcccatccatgcatgaccatgaaccaaacacaccctaagtgtacaaggttgccaaacctttctgagtattgtaatcgcttcgttttcaaggcttatgatgttaagtgggcagcacatgcggatatgcaacccatttaccgcatacaaggccgattaaggatgtatttggttggagggattagagtgtataggatgcgatagtacatgatacaactcagttatttgcttagaggtatggaaacgtacaacagtttgtctggttacttgtatgatatgggatggtatcgtacgggaattcgtttggtaggatgaatgaatttgatttggtaatacaaattaaccccatacagtaatgagctccatcttttgcctttcagcttattagccgttgccaaaatttgaattttaaaacttaat

SEQ ID NO: 24912 - DNA, 818 bp, Oryza sativa
taatgatcttaagctgataaatgctgttaaaactacttcagtgcagtacggttaactattgctctctgtttgagaatgcaggttcctcgggcatcagctagtgcagtagcatttggtttgggtctactttctgggaaagggaagcttggacctgtgaaaaaccgtgccttttctgttctgagtgagagtcgtgcaagtgatatttgtctgcgattctttgatagctgtgaaacatacaaggtactattgatgaactatggtaacaatgagataaaataataaacatatttggagaagaataatgtgatcttgtatctcgacatatttgttcccttctctttggatgcagacattttatatttataagacatgcaaatgttggatggatatcttaattaccaattttgaacagatttgttcagctaatcaaacatactgctacatgcacttgtgtgatcactctgtactctatactctgtactctgtactctgtacatgcatttgacgggtttttcatgtactgttttatgcatggtgcattcatacttctgcttatgtctgttggctattctctctggacttcttgttttgccatgtgattatcaatctctattcagtcagtgatagtaaaatgttctttttagttcgatatgctgtataagataactttcctctgttcatacaactgctattgaattgttactttgacaaaggattgtaactacaatactattttcaggactacaggaaaagaaaggagcctgatgttgaaaagcaaaaggaaccaattttagaacacgtcacatcggcattagtta

SEQ ID NO: 24913 - DNA, 583 bp, Oryza sativa
gtcccatccatctgtctctatttccttttctcccgctgctccccacctctctatgtcctcctcctcttgttcttcatccaaccccccatggggaccaccacctggtgctgtggttgctgctgctcctgcctcgccaccgctcgaagccggtgagtgagtcgtggtcagtccaggcgccaacgatcgagctgagctatagccagggtgaaccagaaggcgaggagagttggtggtgagttgaactggatcgaagtccgaagagggaaagagggtggaagtgtttggttggcttgccggtgtggtgaggattggacatgttgttggatctcaatgtggagtgcccggaacgggtcgggcacgtcgagctcctcggtgctaaactccgggaacccgggaggcggcggtggcggtggcggtggcggaggattattccggttcgacctcctcgcgagcagccccgacgacgaccagtgctccggggagcagcatcagttgccggccgccccggggatcgtgacccgtcagctcctcccgcctccgcctcccgcggcgccgtcgccggcgccggcgtggcagccgccgc

SEQ ID NO: 24914 - DNA, 782 bp, Oryza sativa
ttttttgggcagcaaaaggcgcatgtatatgggctgccagtccacacaatcgaagtgtcttactgggcctaatgcttatggcctcaaaacataagaaaatatcagaataagtccacctttaaaagtgacccgaatctaattcataaccctaaactgcaaaatctaattcataaccctaaactgtaaaaccggatgtcttgaccacccaaactgttgaaaccggtgcaatttgactcctttggtggttttggagggcggtttcgctgacgtggcgctgacatggcggtgttgacctagtatgtttagttaacgtggcgcttaggtggtatttgaattaaaaacatatacgtgggatccgtgtcattcacacacattaaaaaattgtgggacacactgacatgtggccccacatgtcatcatctctttcttcttccccaacatgatctcgtagttcttggtctgtgaagatgcgttgttgggtgctctattttcccatcgaggacgaacctcaatctgtgctcgagagatagctctccatacactgataagggatgtatggattcttgagaagagaggagccgtagtgcccccggaccgcccggaacccacgagtgaatagaaagttagatctacatgggatctcacctgaattgccccatctatcctcctgaggagaagtttgtttggtttcaaactccgattcaaacaggaggagtacgccatgctaatgtgccttggatgatccacatcttcgtgtcaggcgctgatgagcacattgaact

SEQ ID NO: 24915 - DNA, 2089 bp, Oryza sativa
atatagtgtccatgagctataagatgcctcttgtggctggagctgatttagttgctgttcgaaattatgaattaccctccaggtctccctagtcattagcaatctatacatttttacgttttgctacggcagtgtacactatatgctgaaatatggatcataatctcatgggtgtagtaactctttctgatgaaatgctctcaattcactggcttaagcaatcagcatagcattcacccctaattcaatatttccatggctagactccactggagtgtaaatatagcaggcttgttaacattttctgtctgctggattgtgctctactgatttaagtagtagtcaccacaaccatatctagttgcatacatctgtttgctatgctattgccttgtaggagtattgcatagtggatgcatattagacgcatagtgtttcccttgggaaatgttttccaattggaggcgactataagaggtggtgggacatttgcgtttgcccttagcctgatcgaacttaaattgcactgtcgaatctcttttgctgctttccctttagcaaattggttgttcatgagtgatgcttgcagtaaactggttgttgagtcctcaaaattcgtctcatacttttgggtagttgaatcttcttcaatggagtgatctgtcagacagagttgtacctatgtacttttagaacaaaagcaattacactcatcttaatataccactgtgctaatatttctagttcctttgatgctcatgttgaaactgtttgacgtatagctttagaactttattgatgcacttggtgtttacatatatttcttggatgcaattgcagtaagacacgtggtatgggagctgggcgcaagctcaagacccacaggagaaaccagaggtgggccgacaaagcatacaagaagagccatcttggcaatgaatggaagaaaccctttgctggttcatctcatgcaaagggcattgtccttgaaaagatgtaagtgcaataaacgtagagcaattatttgctctgaagaacattcaataaccaacatgcattactttatctgcagtggcattgaagctaagcagccaaactctgctatccgtaagtgtgctcgtgttcagttggtgaagaatgggaagaagatagctgcctttgtgccgaacgatggttgcttgaacttcatcgaggaaaatgtatgttcaactgctgccatacagagctttcttgttgcttatcatgttcttaccattttccgttcgggatatgcaggacgaggtgctcatcgctgggtttggtcgtaagggacatgctgtgggagacattcccggtgtccgtttcaaggtggtgaaggtctccggcgtctctctcctcgccctcttcaaggagaagaaggagaagccaagatcttaaatcctattcccctccattgcaagcagctggagcggcatggcggctataagaagtacaattagctacattcagctaatgaattctggggccttccttttctgcttctggcagctaatctctctctgaaattcagactcgatgttgtggtgaacatgtcaatcgtatttttaccccccctaatcacctgaattcaaattccatatagaagtagcagcggatttggtttccttcagcgcgattttaaaattcaaacctggaatgtcgtggagtgaagtagtgtcatcatatgcttgtgaatctctgcaagttgcaagcagcctattttgttgttttcttgtggcgcggtttgaatcttgaatgaagtcatcattttgaaatctctccctctatgctgaaacggaacggatctgatctgatccacgtgcgggttcatctgagcccttggcggcgagatcggaccgaccaaaaaaggcctcgggggccaaacgaaccggataaacccggtcctcccttcccattggacccggttgaaaacccccgggccatcccgatctgtgccaggtcagcaacctatccgggcccacacgcataggacatagctccccctacccatcaactcacaccaatacttttacccaaccccacccacttccacgtgggtcccatgactcgc

SEQ ID NO: 24916 - DNA, 4118 bp, Oryza sativa
ccaacgggagctgggaggtggcgctgccggcggaggaggtgccgccggagctgcccgagccggcgctcggcatcaacttcgcccgcgacgggatgaaccgccgggactggctctccctcgtcgccgtccactccgactcgtggctcgtctccgtcgccttcttcttcgccgcgcggctcaacggaaacgaacggtactactcgctcgcatccgcaattccgcataccttccccgaattcaatttcttggctggaaaaaaaagaaagtcagtaaaattttcagtgtctctttcctgacagaaagatttgtgcagttcaaagctgcctttcggtacagtagtttgcttgattgttaggtgaaggaggattcgcgtgatcgatttcatggtctaatttttgtttcagttggcgcatgtgtctgcatgtgcacatgtatcccgtgctcttctttttgtttcctttctttgctttgagtgaattggagtcatgcgttctggatgtgctggctgtagtgtactggccgttctatgtgagttttacatccttacccttctttcatgatagaattatcaattcatactctagggttcatattgattcatggtagctgctcgtaagaatttagtgcctatcctatcccattttagtttttgaattgaaaaacttttccagaacttgatttaatgagtcgcagagtctagcaaatgcaggctttaaagattgaagtagcacctacaagactcttatattaaatgaagggccattcatttctgcatttttctggcatgtcaactgcgccacaacttactccatttcattgtggttggagaaggtgtacatttactagtactagttgatataggagtaatgtgtatacggagcaaatatgacaatacgtgtatatgcctacatagtactattcccgtcttaaaataagttcacttttatacataaatctagacacttattttgggacagaggtagcaagccattacttgattccttggtcaagtgctatgcaagtaggtctctattattctccttttagagcttttggcattttagctggcatgatatatcatatatgaccaaattattctaagattttcgtagcatttgttaccagaaattttagattagtagtggagtttagcacacaatgcatgccagaaaaatatgctttccatctacttatgtacttcatgatgtatctgtgctgaagttaaattttctttactaaggtgaataaatcaatgaggtcatgacaaaaggagtacttgatgctcgcatcgatgttaagcatcaaaatgccccttatttcagctttcttgttcatcccatcgttgttcatttgtctagagacagttgtagctaattgcgggtatgggatgttatatctagaacttaggagcacataatgacattttctgctacacataatcctaccacttttattccaatatagtctactgctggtatgtcgacaatgcaatcaaagggattaggcaacatatttaggctttacttattgttcaactctgcgcatatagtttgtggcagaggtgttctgttgataaaagcgataacttgtttcttcttagtttaagaagtctgcgtatgctatgtcctggtatgctattagggtcgtaatccagaatctcgtgttttccacatcaatgtatttctctgtactagtttagttttatgttattcatttttttcttcttatttttcaggattagatgtgtattttaactgaagaaatgatgtatagtatttctgtttatgctactgagctactctattatactacatgttagtcacttagtctcgtctttggcatgctatccatgatggtgtgttactattctcatgtacatgtatctgccccatcaccttaaaattcaatgtttgccaaaaaaaaaaaagttccgcaatgcttacgagtagtttctttgctgctgactgtatgttgactttaggctgttactgaatactctcccgggctaataatattagtcattttgaacaagggtaaagtcaaactttaaaatctttgactatctaaaatatttatcttaaaaatatggaaacatatgtgtagattagtcttaaaaaatacttcaataaaattatatatttgttgatatttctatatatattataatagaaaatagttgctaaagttactttttggagaccatgcgcttggagggagttacaatattgctccttttgtttctcaggaagcggctcttcaacatgatcaatgatctacctactgtatatgaagcattggttgacaggaagcacgtcagggataggtctggtgtcgatagcagcggaaaatccaaacattcaacaaaggttagtatttccctcccccaaaattcagaaacttcaaatgcagttacttcagattttgtaacctaagctacaatacacagagaacaggcgaaaggcaagtaaagcgctccaagggtgttgcaaaggagtacgaggacgacgacgaagaacaccacgagacatttttcgggacttgcggtggcctttacaacgcgaacgagttctggatcgggtgcgacatctgtgagcggtggttccccggccaatgggtcaggataaccccgggtaaggcggagcacatcaagcactacaagtgccctgactgcagcagcagctcctccaagaaaaccaggctatagggtaaattgtggtgtgtgcaatctcctctgaccaatctgatcaaacgacaatctgtcctgccactaggaaaaaaaagatggtgaagctgttcttcggtccaatgtcgtagcttagctagatgtgaagtcatctagacattgtgctgtgtggtagatgaggcaaaaaagagtgaactgaaaagacgggaaaaacgtattcgatctttagctttgttttataaatgttttcttcattgtcaccgatgtgctttgggttttttcagacttcagagcatgggtatcgttgttgaattgtagctgcatgcattgcatgatatatttgtcaagtgctcaacaactggagcattcccaatcatagcgtctctgcacatttccattattcataaacacagagtgcttgctgaaaatggcataataacacattaacacacgagtaatctactcaggcagaaggattaatgcatagaaggatcaagagatgaagcctctgctcttgaggctttccactgaatccctgatgatcttctccatgggactgaactgcaaacccagcgcgatcagcttcttcgacgcagcctctgctctcaccagcccaggctgcgtttccttgggtaatctgccacacaaaaaccaaaaataatttatcagttagtgatatttgcaattgcagctgcatcattcacagtttgatatagtcatggaagcatttggagatttatgtggtacgtctaaggtttttgccgggaaggccgaaggaggccatccgaatgtattaagaaggtacgtctaaggtttggcgtggcaacctttggctgcgaaccaaacaggccctacagtccactaaactcactttggcactttgtactcggggtagagctcggcgactttggaagcgaaatcgctccagtgagcaatggactgcacgcagaggtgcctcccggatgcagatgggttctcgtacagcagaatatgggcaagagcaacgtcttccacatggactggccccatgtaaaaatccgcatactcctctgtgcaacctgcattgtcacaatggtgagcatgtttaggtgtttccttgcagtagcaatcacagctggaagaggcaaccattcaatcaagaatttctaggcacacaaaattgccattctatccctcacactgaatcaaacaagagaagtttttgagtagcacatgcatggtcatttaggaatcaacggttctcttttatgccaactgaactgaagaagcctatttttcatgtcattacatcaagtgttgagggatagcaaaacatgcggtttcactctctggtgatactaatcactgtgacatattcagtgcagcactatcagcttcctagtattctcagtatttgtggtaattttttttttggaacaagtatttgtggtaattt

SEQ ID NO: 24917 - DNA, 1684 bp, Oryza sativa
gttttgtgaaatgtactcgttataatatcatcatcaatttgcacttcgcacactgtcaaataattccaatgagaatggaagaaaaatggagatgccaagacacaagactgctcaccccgttcttctcgcagtagtcaaggtcagtccagcagcgctcgtcgcgcacctcgccggccggccagccggggctgggcacgatggcggagatggacgaggtcaccaccacccgccgcactccgccggcgtccttggccgcgcgcagcacgttcagcgtcccctccaccgccggcaccatcagctgcgcctgcaaacaacgggaacacggccggaggcggtgagcctggagcccgccgacgccgacgccgacgaggccggtacggacgtcgagaggagaagagtcgccggccggtgtacctgggggtcgaggacgcggtccacgatgcagggggaggcgaggtggaagacgccggagcagccccgcgcggcggcgaggagggcggcgccgtcgaggaggtcgcccgggaacacgcggaggcggcggccctcgccgccgccggcggcggcgagcgcgtggaggtggtccgtctcggccttgtcatctgcacagcacaacaccattgtcttcatcacctcctccgccttgcaagcaaacaagcagcagtaatggcggtttcgcactgaccggggttgaggacggcggcgtggacggagtagccgcgggcgaggaggcggcgaacgagacacgagccgatgaagccgctcgcgccggtgaccagcaccgtctccccctcccctcctccgccgccgccgctcgccattgtcgccgacgagagagactcgagctctcgtgtgagagagctgtggcttgtgagcctggagcttttattgtcgatgtggctggtacctactagtagcactgtagcacagtacagtacaaagcttgactgacagaagcagaagcagatgcagaagcagccaactttttggatctttcacagcctcacaagtgacagtcacacggatgatttgtcatgattcatctcgaattggggatctcccaaatctggattgattgagctgaaagcttgaaacggattgtccaagtagtagtacatgatctcaacctaccacaagggccacaatcacaaccgtgtgctagtactttcagtttgatctcaacagagtcagcagttgagcactagagaaagtccagattaaaacaaagattacattgatcaacaaacgtcttctatctgaaagaagaggggcaccagtgatagcgtgttgttacacattggactcgctcatcaaactgagggttgcaagtacagaaacaccgtagtttagtccacgagtcagtcccttggttatccatggtagatggatagtagcagcttagtgcgaaaggtagaagatgcaccatctgcctagtataaacctacagctccgacttcacatcctgagcactaacacggtatcctttctgcgagaacaaacctaggaagaaattggacatcctggaactgaaggaggaaggctcctctcttgccaccggccttatcttgcatagggcgtcgtagtcatgcttcaggtggggttcaactatcttctcctgtaaatgtagactggcattaacgagagatgctcagcaggtaactgctaaggggattcatgtttgtttctt

SEQ ID NO: 24918 - DNA, 580 bp, Oryza sativa
gtatcaacgaacttatttgataaacttaaacttgggaggaaccactaccttctttagcaacgattgcttcttccattgactggacaacgtccttgagcaatggcagtcccatccgatagtttattgactcaccataaccttttagcacaaagccctccagatcatctgtccactctagaaaataaacctgaccaaacaaatgtgttagtcattaatcaaaatcagtcgaggcacactaatgttttggtaacttgcacacaattatccaaaaagaacctacgagctacctacgagctaaaaagtattatgatgattaatgctctagaagcattcatgtgcagtgtatatagtttccagatgttatccagtgtaaatactactgttctacaacaaccagataacagaaagtacatagtgcagttgagaaataggtctgtctgagtaatcttatcactgaactgataactgctaaggaggcatagcatgtcaggctcataacattttcatattactggacacaagctagttaagtatagtcatcaatagtggtataattgagaaaaactgaaatccaaaagca

SEQ ID NO: 24919 - DNA, 3111 bp, Oryza sativa
  unsure (1)..(3111): unsure at all n locations
tgttgagattatgggcatataatgatttaatttattccataaataaatcatgacattacagatgaaaactagcatgaacgcatcattagatctacacatgtaaactacgcagaataacatgaacagatcaaatatgcgcaacatattgaacacgtaccgaggtgacgaaaagaccggctgcttggtcgaaacttttcgcaggtgtctacgaaggcacgaaacacgcgagcgaagaggaaggcgagccgtcacgaacgaacagggagcagtcgcgcgaagcgcttcccaaaaaccttattgccgccttctcccggtgcaggacgtcaaaggcagaggttccggagacctgctctcccgatcgctggtgcacgccggcgagcgggatggagtagtctacgagcgacggcgcagtacagagtaggaggcaaaccctagattgattttcgcatatatcgcgtgaagacggcgggtcggtttatatagagaagggtcgcttgatcagggcgcccgcacgatctctactgcgcgtaaccgaaccggataagtcgcgcgtaacttatccggactccacgccgtttgcacgcaccggatttttcggaacgtttccaaaacaaaacgaatccgaatttgcagcaaaacaaaactgcaaaaggaggctgcatctgcgcaagggtgaggagccaatttttcggaccattcgacgcgtacgtcgtgcacgcgcgccgcctgccaggccaggcgaggcgagcgagcgcgcgcgtgtttcccctcttctctcccccatacatgcttcaagtggctaggagggcatcctcccttttaaggaggtccccctctcctagaataagcaaggtggtactaaactccacatgcatgccatcccatgaggtgggcttttgtgattttccaaagaattaatcttcgagtgggctaaggcccattcattaattccaacaggtaaaacatagaagcaatcaaacaaaaaaccaaacataaaacgagataaaatataatctaatacaacgaatctagacataataaagtatatcccatcttatcctagtttttttaagagagtaacaaatactacctccgtcccaaaatataacaacttttagctataaatcggacacacagttgtctagattcatagctaaaaatgcttgcattttaggacagacggagtagcaatatagtactccctccgtttcacaatgtaagtcattttagcacttcccatgtttatattaatattaatgaatctagatatatatattaaattaacatcattataaacgtggaaagtgctagaatgaattacattgtgaatcggagtgagtactactcaactatacgtcggctaggagcctaatggatttcttaaaaaaaaaggggagcctaatggattcttcttttgcaattttatactactaccagctgatgatgattcagcagctcacgccgtgatcacatagaaaaggatcaaagaaggaagagacaacaaatctcatgcttccacgtagcacactctacttctgaaaaaaaaataattttacgcgggaaaagctacatctgaagctgtgattgtgtgaatacgcgttaaagatgattcctttatcgatttctgaattttctttacgtccattcagactgcctatgcctgaagaattcttttccttttcgttaatactgatctcaagaagaatcctgcttagtacaggagccatagtagcgaaacgatatatttacaaataaaaagtatttgtgaataaaatttttatttacgtatttctagcgatctaaaagcaaatgctgaaaaataaactttaataaaaaaaatcttaaaatcagctttaaatttaaggttaaaaatttaaattttagttaataattagtataagcataagcataaaactgaaagcgtcagtttgtttttgtcaaatctgatcacggtcaccgaccttcctgccattgtagtggtcaaatctttcagcgtgggcgtggacgccagaggaggaagacgcgtcgccgcgcggccaagccatccccgatcgatccccacccgcagcggcggcgaggcggccggagaggagggagatggagatggaggcggtgccggcgctggcggtggtggacgcgcggttcgtcgcgggggacgcggcggcgctgtccgtggcgaagacgctgagcctgtccgggagtgacttcaccgtcacggacgccgccacgggcgccgtcgtgctgcgcgtagacggcgtgctcttcagcctccgccgccgctgcctcctcgcggacgccgaccgccgccccgtcctcaccgtccaagaatcggtgcgcgcgacactcgactcccctcccatactctcttctcttcttccccaccgtgccaatctgatcggtggtggtgagctccggtgggtgnnnnnnnnnnnnnnnnnnnnnnggtggaaggtgttccggggggagagcacgagccggcgtgacctgctcttcaccgtggtgaagccgtcgggatccagctatggggttcgaccaaggtgagcgtgttcctcgccagcaacgacgccgagcaggccagcgacttccgcgtcaccggcagctaccacgacggcgcctgcgccgtctccctacggcgactctgacaccgtcatcgcaaaggcaagcaaagcaacccctctctctcccccttgctcgagccacttctgtcatttcatcgaacacctggtgggcgtgctgctcgacctgacgcaaaaagtgtttcgcgcgcagatcgaccggcggttcagcgtggcgagcgcgctgctggggaagaacgcatacagcgtcaccgtcaacgccggcatcgagtacgccttcatcgtcgcgctcgtcgtcgtcctcgacgagatgcatttccagccatgacaagatggaaaccaaagctctccctgctcccatcgattcaaaaagacacgatttttttacccttcagttttgctagctctgtatacaggcttgatagacgagaggaaggttgtaattggttgagaagtgaaaacaattcagaaaattatacggtggatgattgcaattgattattgttgatgaaagttgttatattttgtgataaat

SEQ ID NO: 24920 - DNA, 1043 bp, Oryza sativa
gtcaacatacaagcacaaaataactccctcacccccaccatggcgatagtacacacatttatctgcctcattgactgcaaagcctgcagatgtcaatattgggtcaaatttctcatgccattgcttaggagcttgtttcagaccatacaaagacttcaacaatttgcacactttgccttcttgaccttcaactacaaacccatcaggttgatccatatagatctcctcatccagctctccattaagaaaagctgtcttaacgtccatttgatgaacgagaagaccatgtgaggctgctagggaaagtagcacacgaattgtggtcaatctagcaacaggtgagtaagtgtcaaagaaatcttcgccttctttctgagtatagcccttagcaacaagccgagccttgtacttttcaatagtaccgtcaggcctaagcttcttcttgaacacccacttgcaccccacaggttgacacccatagggtcgctctgtcacctcccaagtcccgttagcgataatggaatccatttcactacggacagcctccttccagtagtctgcatcaggagatgcatatgcttctgaaattgacttaggagtgtcatccacgaggtacacagtgaaatcatcaccaaaagacttaccggtcctttgtctcttactccttggaggagcttcactgacatcctcctcagagacaagttcatgtgtatgttcagtttgttctggtggtgtgattgaactgggaattatttcacagggttggttccaaccactatgtgtatccttcattgggaaaaagctctcaaagaaggtagcatcaccagactccataattgtaccaacatgcatgtccggtccctccgatttaactattataaatctataggcaatgatatgatgagcctatcccagaaaaacacagtccacagtcttaggtccaagtttgcgcttcttcgttattgggaccttgactttcgccaagcacccccatgtgccccaataagaaagtgatggttctctaccaatccatatcttatatg

SEQ ID NO: 24921 - DNA, 699 bp, Oryza sativa
cagaagcatgtgacccattccccattaggacggtggaaccccgtgcgacttgataagaagaaaacaatgagatgtcagcacaaacatgtacattggccccagtatcaacccaccaattagtagattgattaactgaaaaaacagtaggtaaattaccatacctgcttccatctccagtgttgccaatggtcacattagcagacttagaagtctaccctgcaggtgccttcatccccttgcgttgtggacacttcctagccagatgaccaacttggccacacacaaagcaagtcctctcatcctgattaggattgttgttgttcttcttctgcttcttgaagttggtggtctgctgagctttgtatttccccttgctcttgttctgggccttgtgcacaacattggcactggactgcccaccatcgcccttagacgcggcatctttttcccgagctttctcctcaacatcaagagacgcaatcaacccctcaacggagtattcctgtctcttgtgtttgagtgcagtaccgaaactcctccaagatggaggtagttttgcaataatgcacccggccacaaatttgtcgggtaagacacacttaaggagttcgagttccttagccatggtttgtatctcatgagcctgttcgactacagaacggccgtcacccattttgtagtcatgaaactgctccatga

SEQ ID NO: 24922 - DNA, 4813 bp, Oryza sativa
tactagatccatccaaaggcaatggatcctgttctagaacgtatgaaaatttcgtaataacagtgtaaaattcttcctcgcaaaaaaaaaggtaaaaaatctcccaatgaaatcgtgaaaatctcatgcatccaaaatgaagcaagacaaaattgtccactgagatagggtacaattttgatacctctcgatgccttagggtattatgatatatcaaactttatattagaaaatgttatacacgtatctttttaatggcagtaaaatttgtaatgaaaagaagtgcatcgagtctgtatgttgcctcttctcaaagatgataaaatcactcgtggttaggtggtgtagcaggtgacaccacccgattcttggaaagatgagataagatcagctcgatctggacctcgagcactccattgtcaaaaggagaatgaataaaccaagacagtttttgccatttcgtccctaccctacgtacggccggtggcgagtgacagcgtaacgcccgcatgcactcaccctcaccggcggtcatgtgtgtctctccggccgggccgtgctacctaacttcttctgctgtttctgcaggtctcaaagtgtggctgttagctatagctactagtcggcaagcatcttgcagtgtagtacatgtgtgtgtgttttttcaagtgcttttgacctgcacagtctgggtgatctggtgagagatgttcgttcatcaacgttgctaaatctgcacgttttggggtggagcctgatcctgatattaataaaaggagaggatgcacctgcaggctgcagatcatgtctgaatgttttttttccttgggattgaatgcttgatctgatggcacatttcagaagcaacatgtaacctacttaagtacgacagaaattcagaagcattttttcagataattgcctgaaatcaacttattacgaagaggaaaaaaagctgtatgtatttggtgaccaagatacaggcaaactaaagaataatcttccatttataatccagctgcacttcttcagaggtgcatgaagctgaattcccattttggctttcttattaaccgaggtaaggggggtcggagttttagtctccaaaccctcaaaggtagtgtattttgcttccgtctctctccaagcgaggtcagggggttcggagttataatctccaacccccatgagacggcaatttaatttaatccccgactcacttgaacttgatctggttgccaagaagagatgcatgcgattaccgctgtcaatgaccaaaaatttcagaaacaaaccttccttttttagataatcagaaacaaatcatctgaaccaaagcctgttagaaatgcatgaggccatggtgtctactatattaacatttcagaaacaacttatctgaagtctgaaccaaagcctgaattatctttgtgcttcttaacagaggtcatggaggttcggagttttaatctccgagcccctttgcatttggtctcgtcgccaagaagagataacggccaaaatggtaattcagtttcagataaatttctgaaccggcctttatttacgaaattcataagcgttttcaggtaatggtctgaaatcaacttattacgaagaaaaaataagttggatatattttcttcccgcttgattccggctagcaagatacaggcaacctcaattataatcttccagtaattcagctgcacttcttcagaagcgcatgaagctgaattaccaattctgttttgttctgaaccgaggtcaaggggggtcggagttgtagtctccgaaggtagtgtattttcctttcagtctgctcccgagcgaggtaggttcggaacccgttgcactcgatctggtggcaagaagagatgcatgcaattcccgctgtcatctgtccaaagatctcagaaacaacagatgtttaccccgaatattttcccctagggcttgatctgattagacacttcttattatcatcacggccatggtttcccacgggcttgatctgaagtctgaaccaaaggctgaattatctttgtagaggtcagggggttcggagttttaatctccggacccctttgaatttgatccgagatgcatgcttgtaaatttctgaaccaaggcctgtcagaaattcagaagcagttcagataacggcctgaaatcaacttattatgaagaaacaaagaaaagctagttgtatttacgaatttgagagccttttctatttgttttttcagccgattttcagtagcgtcggctgctctatctacttgcattgcctgtttcagaaacaccaaacctcaccaaacggcaagcactacgtaccgtccctgttcactggccacctgctccttttgcctgtccaaatcctcattctttccctttagcctttgcttagactctacagaaaaaaaaacgtctccttttcaatttgttggtagtacatgttttctgctttacgatattgctttcagtacaccatgtcctacaatattgtaaaacaaaaaacgatttgctgtatgtttggtctatcacttttagagaacatgcttgaaagtgatgatttaattagtggatagaatttaggtgcaccaaatgctggcaatatgaaccgtggagtaaacgagtaaacgaccctcacctaaaagaagtttaaaggtagtcacaagtaacaacagctaaaaaattctctccagattttcaggcatgacgtgaaaaagatggattaatcgtcctggcttacaaaattaatccacacaaaaacagaattccaaccaagagaatcctgtctagctaactctaaccaaatcttcagtctagcagcagtaaaacgtaaaagttgtcaagaaaaaaagacgcatctgccgtacggtgctagcacagtgaacagtgatgaacactgcaggtctgcagcagtaaattgtggaggaaaaaaaaatgttgtttgttttgtaaaagttttggatttgaaattaaaaatggtggcctgaattcgtagggcaggagaaggtgtgtccaatgtcgtcgtccctacggtgcggttgttgggggatagacatagttagagccgctgtccctgcgttatatctgaaccaaccctccatctccttcactagccttctctaccaccctcactcgcgagctcggctcagctcagctcacctcgcacccagatcccaatgcaccaaccagccataatgcagcgggctctcgccgtcgtcgccctcctcgccgccgcagccgccatcgccgccgcccaggtacgcacgcgtagtgtcaacttcgtgtacgttcttttcccggacgcatgcatgctgatgctttgggcaacaatgcagggggagtcgccggagttgctgccgttcgcggtgggggcggcgccggaggggtgcgacgtcggggaaggggagtgggtgttcgacgaggcggcgcggccgtggtacgccgaggaggagtgcccctacatccagcccgacctcacctgccaggctcacggccgccccgacgccgcctaccagcgctggcgctggcagccgcgcgactgctccctcccaaggtaagctcatccacctcctcctcctccggccagccattgtcgccgccggcgaccaccacctcgcttgctccgtgaacaaggatagaatccaatgcgcggctttacccaaagaagcaggccgtgactgtgactttgctttgctcaactgcaacgagctgcaggggggaaggggcagttattactgggatctaattatgcttttttttttttacaaaggggttaaaaagagaacgggtttaaccgtggtatacgaaaggagatgggctgcatctcaactgccgtgctagtttgtgatgacatccaggaaggacgccaataatgcattgtgcagtagtagggcattgcatggaaggacagctggtaggttaggtcatgtccatgacaattgtaaaagtaaatttacttcctcctagtactagcagtaacaacaggaggaggagtacaattttcagttcatataggtgtgagcattccaagatccatgcactcactgcactcactcaatgatcagtgcacatttgcagtacctgatactccctccatcccttaaataatttaaaaattattatttattttatttatgacttactttattatccaaagtattttaagtataactttttgtttttcatatttgcacaaattttattgaataagacgagtggttaaaccatataagtaaaatatcaaaatcccttatattggggggacggagggagtaatagaatcacataaatgaaatgagtttcattagctctagcagattaggcagatgacccatgctaccaactctccccgtggtgattattttatctgcatgtcttggcgtctgcacatcgtatgcctctctttagaggaaagatttcattttgtgatgattcactcttggaaagtttggtttcaaaatggaggtttcagtgaaggaagtagacaaacatgcaccgtgtggtcctcatacgtgccagatattggttgttttggtgggtcagccggtcaggtatccatcatgcagtggactccagccttgtcgagtcagaacactaaaaaaaaggactaaaaattgaccacaaattttgtataatcatctttaaaaaagacgtaaacatgttaccagatgcaaaattccaatgcaaagatttgtttttttgattgttttccttttgtctttctcaaccgctatgtggactgctagtacaaacaaatttcattataaaaaagtattcattccgtcttaaaataaattta

SEQ ID NO: 24923 - DNA, 3846 bp, Oryza sativa
tcaataaagctcccgtcgtcgtcgtcgtccggcggcggcgagtgcgacctcttctccgggaggtgggtgtacgacgaggcggcgtacccgctgtacagggagagcgcgtgcagggtgatgtcggagcagtcggcgtgcgagaagtacgggaggacggacctccggtaccagcattggaggtggcaaccccatggctgcgaccttcctaggtacgtatacgtatactatacgttgcacacatcgtacgtatacgtacgtagtgtgtacattgtagtagatcttggcgtgatgaacaaaaatagtctgccggttgttcatcaactggatcatgtagatgcatgttggtagctagaagcacactgcagtttcctaacaactcaaatttaattaagtacgtagagatcgagatgatgctcatttggggtaaattaaaatacacgtaacttaaaatatacttcccagaatacttgtaactttaagttttttttataattttgatctttcgtcttattcaagaaattatgaaattatttttttttatgatttgctttattataaaaagtactttaagtatcacttctccatttttatatttgcactaatttttcaaataaaatgaatggtcaaacgctacaagaaaaaagtcaaagcgactattaatctggaacggagatagtatgagtactagtttaattggttgtgtagtgactagtgagtcagtagaaataatctgaaacccctacagtcctagtactactcaagaactgtcattttcatgtttggataattatggccgaattcatttttttactactgtgtgtgtgtccaaatataaatcttaaacagactggacttaaactgcattatacgtactcaacttataggtttgacgcggagaagtttctggggaagctaaggaacaagcggctggtgttcgtgggcgactcgctgaaccgcaaccagtgggcttccatgctctgcctcatcgacaccggcgcccctgaactccacacctcaatcaactcctcccgatctctcaccaccttcaaaattcacgtaaatataactgaacgattccaaaatactactgaattttgcccatattatgtacgagtttcatatgcgtgatttgagacgataaaatacaatggcgcgcgtgcaggagtacaacgcgtcggtggatttctactggtcgccgttgctggtggagtccaactccgaccacccgctgcgccaccgcgtcgccgaccggaccgtccgcgccgcctccatcaacaagcacgccgcccactggaccaacgccgacgtcctcgtcttcaactcctacctctggtggcagcgtcccgccatgaaagtcctgtgagttttagctactctctccgtcttaaattataagacgttttgtctttggtcaaagttaaactactataattttaactaattttgtagaaaaaactagtaataattttaacataaaactaatatattatgaaaattatttaattatagatttaatgaaactattctgatgttgtaaatattactccatccgttctataatataagagattttgacattttatttgtactgtttgaccactcgtatggttaaaaaaattgtataaatataaaaaataaaaaattgtgcttaaagcactttagataataaaataagtcaaaaaaataaataataattctaaattttttaataagatgaatggtcaaacagtacaatcaagagcagagagaggactactttttttatatagagttagtcaaactttacagacacgaaagagagagagtagccagtagcaagcttgcatcgatccatggatgcagttgatcacctcgctctcgctgacggacgcgttcttgctgcaggtgggggtcgtttgacaatccggcggcggtggtggcggcggcggcggaggaagggaacgagtacgcggtgtccaaggtgattgacagcctgcgcgcgtacgagctggcggtgaggacgtgggccgactggatggagttccacgtcgaccgcgcccgcacccagctcttcttcatgaccatgtcgccgacgcacctccgctccgacgagtgggaggacgccgccgccgccgccgccggcggaaaccacgggtgctacggcgagacggagccgatcgcggcggaggagtacagggggacaagcgggacggacatggcgttcgcgagggcggtggaggcggaggcgcggcggctcggggagcgcagcgtggcggtgcggctgatcaacgtgacgcggctgtcggagcggcgcaaggacgcgcacccgtcggtgcaccgccggtactgggaccccgtcaccgacgagcagcggcgcaaccccagcagctacgccgactgcatccactggtgcctccccggcgtccccgacgtctggaaccagctcctctacgcacacatcgtctcatgagccatgagacctcatatcgcatctcctttttgatatatttttttctcttcttgtatgctttcaaaaaaacaaatgtaaatcctccaacaattgataagtattccgtcactttcaaaacacaaacatttgtagattgtttagtatagtactactaaggttaagaaaaaataattaatagtaatctctttgccctgaaaaaaaaacaacttttagtcacgaaatctggaaatagatatatctagacgaaggtggattctaaacactcaagtggatgtccactcattaagtgcatgtcaactaaatgatcatgaaaaaaattcaaaaaaatttacaagataaattgatatataatatatcactacacaaacatgcaacttaaaattcaacttttataagttgtaacgaaaataacaaaattaattgcgaatatacgtatgctaatcagagtttgattttttatttttgttacaacttgtagaagtcaaatttgaacttgcatgtttgtgggggtgatatattacatatgattctatcttgtcaaattttttgaatttttttcatacacatttagttgacatgcaacaaatgggtggatgtccacctaggcgattagaagtgtttcccatatctagatttataatcagaagttattttttttctagcgcggagagccttaggcttgacttgaaaattcaccaacattcgcatttctttcctttgtgcaaaatgtagtttgtataaaagggttaacctttttgcaaagtggtcaaacattatttgaattctgaattgcttacattttcctcccaagcatccggttggttggaaaatgtatagatttatgtgtattgaaatcaatgtcctacaaatgcttatattctgatacaattttgaattctagatcgaaatgtttatattttgaaactgaggtagtaccacgtacatacccaaaattcactgaatcattctgcatttgtgtgaccggagtagtaataagcactgacaaaactgaaggtttcagtcttgaatgggcctgaggcccgaatggaggtcacacgcttggaccaggtaggtgatctgccacaaagcagatcgccactcaatataggaataagttcatctaaggtcccttaactttacactgagttcgatattcatccctgaatcacaataccagatataatgggtccctcaactatcaaaaccggtgtagatgagatccctcagtggtttagatggcggttttaactgatgtggcgctgacgtggctagtttgacttactcctactcctatgtgacggtgacgtggtacttggaagcaaaataaaaggtgggacccatgtgtcaatctaaaaaatactggacccacatgtcagtcggcccaccctgctctctat

SEQ ID NO: 24924 - DNA, 1117 bp, Oryza sativa
tgtatttggccacctttccggccagagccaactcggcctgctgtttgttgccccagaggaggacaacagggagacgatcgtcgcgcaggatgcgcttgtaatcacgtggaactcgtcgccagacaccgcagatcttgcccgtggcattctgatagacactgagagtgcccgccaaggtggtctccagttgatgctcctccaggattacacccgcatcatcaacgaattgaatggcacgcggacgaccgattcgcgatgaggtgtagaaggagtagtatagattcttcttgtggaacaggaaacgggcggtggccaccacattctgcggattgtaggtggtgtacatggacttcatttcctcacccttgaggaaataggaggtgcggcccgttagcaacgcagcgtaatctataaatagggatcaaatgaaaggtggagataatccaggtgttagataaatacaatagttctcttgttaattaaatgtaggagctggtgaatgggattacaatttcccgcaggatttggcggattctattgggatctgggtgggtgtccggtacttttgtacttacgtttcatgttgcgctcttcctcttcattgggcacgggcacatccaaggctacatccgtatctgaaagatggagggaatacaaatagagaataagatgatgctgggcgataaggtacgaccttaaatggaatttagatagcaacaaatgcttcaaagcaaccgaaccgccgccagccattcaccatccatccagccagccatccagccagccatccagccagccaaccaactatccatccacaatttgtggacacaattccggcattcaaccaaaattccagttgaatgggtgaatggtgaatggctgaatggacgaatgccaggggatcatcatgaatggcaatgcaactatcaggtagagatcccacctccgaactaagaccttccatttccacctctcgcttccacccaggtggcattcattaatcgtgcataaattgagggcaggtagaaggtagagtttctcgaacgggaagtctaacctacatctaactagggaagtgctttgtatttgaggatgtgcggactctagggttctgaat

SEQ ID NO: 24925 - DNA, 1606 bp, Oryza sativa
taatcctataactagtggaatatttattattctaacacaaatatgcattgcaagcataacttgttcttctttattttgatagtattggcggtcgaaactgtttgctaacgaccgtcaacaaaaccccccaagcttgaacctttactcatcccgagtaaaagacgaaaggaaacaaaaacttggttgttgatcaagagttgctactatgctatatatctcaagtgtacaggtgcaaggtatatgtattctctctcaaattgaataatctttggcacggtggcttacccttacccctgattcccatgagacactgcctctccttgccttgagctgttgaaagacagaacagcaatagaggcgggtttaaaaagggaaaaacaaatatttcacaatatttatgtagggtttattttggtcttacagataaattactctcttggtgtgactgtcacatctaacatccttccaattgcaaggatccacatcttgttcacgccagttgaggaatatcccatcaaaagttgtaactgccttcttgaaagcaagaagtgcttcatctgtagaaaaccgtcaaaagaatcatagcaaatgatcacagattgtcaaatgtaccacacaaataccaaccataactatggactgttacataccatctgaacttagtgctcttacttcacgagcaccaaggtgcaaaattaacaaaattaagaggaatctgggctattttctcagaaaagagcccattggtcaccagttggtgaagcatataaagatcaccatagcttattacagagttcatgtgtgaggtatactatgtgcatcctcttttatgggagatgaactccacatgtagatgtggccctgatgagggaggcaaattgctggcactgtaagtaaaaacaggaacatatcagcaatcatgcaaagttatcaaataaacagagcagcaatcagaaatgcagatcaaatgcagtacattgtgacacacttatagctccaccttaccaaaatggatgaccataaggaccaggaatgacaatttattaataaaagaatttcgatgtgcttccacaaaattgttttagggtaattgaattacctagaacatgcaatttgaagtttccccaaaaattctaacaaaaacaatttagacagcgtttaatttcgaaaaacaatttagtcacccccattactgtaaatcaacatctttcagttacctctgaaaaagaaaaaaagggaccaacttagttagccgaagaaacaacaaagcagttactgccggcgccaacaccaccaagcaaaaatagggtacagccacaacccaacccacaagcctcagggacgctaccgacactaaaccaagcacaccagatgagccgcccaaaattgcaagctcgatcgcgcacaacacaactcattgcatccaccaccagcagtaatcggcaatgcagcaaagcagaaacggcttaaggcaaggagcgagttataaccttgacgtagaggacaccgtcgatctggatgagatgttgcccttggtgatggcggactggtcggggatggggatggcctcctccttgagtgagtggacgtacgcgatgtgggcgac

SEQ ID NO: 24926 - DNA, 8838 bp, Oryza sativa
  unsure (1)..(8838): unsure at all n locations
ccggtaacaaatgccaagtcaggtcgtgtgcacacttgcccgtactgtaggcttcctacaggtgacgcatatggctttgttttcatttcattgagctcatactgatttctgggacattgcaatgccccatacttttcgcctttcattataggagcaggtgtagcactgcatctgtacatgttgaatttcttcaacaccttttctatatatgtcttttgagaaagtcccaatgcatactttgttctatctcggtgaatctctatgcccaaaacatatgaagcctcaccgaggtctttcatgtcaaagtttgaggacaagaatttctttgtttcctgcagtagactgacatcactactagccagtagaatgtcatccacatacagaattaggaaaataaatctcccatttttaaactttgaataaatacagttgtcctcgacattctcttgaaacccaaatttctttattgtcccatcaaacttcaagtaccactgtctcgaagcttgctttaatccataaatggatctctttagacgacatcccatattttcgtttcctttcatgacaaaacctttcggttgcgccatgtatactttttcctccaaatctccatttagaaatgccgtttttacatccatctgatgtaattccaaatcataatgtgccactagtgccattataatcctgaaggaatctttacaagagactggagaaaatgtctcattgtaatcaatcccttctcgttgtgtgaagccttttgccacaagtcgcgctttaaacttttctatattccctctggagtcatatttggttttgtagacccatttacagcctactgttttggctcctttaggaatttcttctaaatcccaaacatcgtttagtttcattgattccatttcatctttcatggattccaaccattcagatgagcgagcgcttctcatggcctcttcatatgaggtgggatcatcctccatatgcgactcttctatattataaactttatagtcatcacggatagccgatcttctgactctttcagaccttctaggggcctgcacatttggcacatcctgtacctgaggctcttgatgagtctcctgtactggcacattatctatttgagactgttgtagctcctcctctggtgtggcaaccatttctgttgaatcctgtataacaggttcctcactctcattcattgttgccacaggaagggtaacaacaggtgctggtacctcaatgacaggcattgcaggcacaacatcagcaggtagagagaagaaaggttcctgagtcgacggagcgggtacagacacccgcctctcctcaagatcaatttctcgaactaccgagctccccctaatcatttcgtcttccaagaagacggcgtgtctcgtttctacaaactttgtataactgtttggacagtagaaacgatagccttttgatctttcaggatagccaataaaatggcagctgactgttttggggtccaactttcccaatatttgggttaaatactttggcctctgcaggactcccccacacacggaggtgagttagcgagggtactcttcctgtccatagctcatacggtgttttgggcaccgatttgcttggaactctgttgagaatatgaatggcggtttttaacgcctccatccataaaccgagtggagtgtggagtagctcatcatgctgcgcaccatatccatgagggtacggttgcgcctttcagctaccccattctgttgaggttcgcccggtgttgaatactgggctactattccattctctagcaagaaccttgcaaaaggtccagggacttgcccataaggcgtatgtcgaccatagtactcccccccacggtcagatcttactactttaatctttatatcatgctgattttcaacttcagctttgaatatcttaaatttatccaatgcttctgatcgctctttaattggataaatataaccatagcgggagtaatcatctgtgaatgttatgaacgagtcatagccatccacacttttcacaggaaatggaccacaaatatctgtatgaatgatctctaaaattcctgcgcttcgttttgcaccctttttgatgctctttacaaattttcctttaatgcattctatgcattgttctaagtctgagaactccaatggaggaagaatttcattcttaactagtctctcaattctccccctcgaaatatggcccaaacgacagtgccataatttcgatgagacatcgggagttcactttcttttcttgttttcttttgtcaacgaggacacaacattcacattctcagaaagagataacaaataaagctcgtctcgcaacacagcaagaccaatacatgcattattatgccatagttcacatttgccacttccaaagcggcaatcatatccatcaaaatccaactttgatacacttattaagtttctttgcaaagaaggaacataaaagacatctcgaagtaaaagtatgaagccattcgcgagctctagaggaaaatctccaacagcttcaactttttcttcaactccattggcaactctaatggtgctttctcttctttgcgtagtcctcgtcgaacggaatgcctttaaacaattacaagcatgaatagttgctccagaatcaatccaccatgtggatctagagtaaccaacataatgagattcatttacaaatgtaataatgttctcacctttctttgccatgatcattttcaaaaagtaggacaatctctcttgtagtgtcctgtcttcttgcagtggagacattgatctttctcaacagcgaactgttgttgttgaggcagatgctgagactgtttaccttttgaggtgggagacttgtggttctttttcttatctttaacatagtttattgaaccaccatttgattctttgattctctcctcctcttgcacacaattagcaatgagcttctcaaagttccatttctctggacttatgttgtagttgacaataaaattgtcaaactgctttggcaatgaggccataaccagatggaccagaaagtcatctgttatgcccaaatccattggcttcaatttggaagccatgttgctcattctaagtatgtggtctctaacaccacctccatggtacctttctgtcacaagctgcttgatcagctgtgtagcataagtctttgaagagccagtaaactgactctttattctttcaaggtactctgagacagcgtcacactctgggatcgagcccaatatggtaggctcaatcgtattctttaccacagccaaacatttcttgttggctaaggaccatttcttttgttcaatgtcatacgacatgacgagaggagcattgtccctctgtctcttttgccagtcagcatctgactcattttcacctctgacaagttcagtaggttctataggacatggggtagtcaacacccagtccacctctcccaagataaaagcaaggtcgagttttcttttccattctgcgtagttatctccttttagggtcggaatatctttaatgcaacccatcaaggagtagccacctgaaataatcatgtgcggtgagaacaaaattaacattaaaatattatgcattaagcctacatcaccgttgggcagaaatagacataacacatataaccataactataatattgcaattatcaacgttggtcagaaaaattacaacatcatagcacataattaatgttcctaaaattaaattctcccgttggttcgaaatttaattttagaaacactaattttcatcaattacatctatttgcagcggaaaactatataaaatcatatgaacagtagcaaaatctctgtaattctctctctgtgaaaattctcccgttggttcaaatttaaacagaggtaaaacatgcaaaaatctattcaaaattctattgaaatttgcatgaaaaattgacaaaaataaaatggaaaaattgctactgttctcttttattcattttcggccccggagggaccttatatggactttttccggcctttgccggtcggcccatggccaccttgcgcgcgggcgagcgccccctcccctcccccaggccgcaacctgggcctgggccgggaaagccgccgccgcgcgctccccacttgggccgatttcggtccggccgccgccggccgtcgatcttagggtttgcgatcggacggccgggcgccgaaaacggggatcaaaacccctcgcgccccggccggccgccgaaaccctagcttctcctctctttctctctctcgggcgggcgcggtcgcgccgagcggcgtcgcgacgccggcggccctcgcgccgccgcgccatggccggcgctcctttcttttctcttctccgctccccccaccgtctctaacccccaccgtgtgagagagagatggcgacgacggagatggcggcgccggcgcgggccccctccccggcgcgcgcgtgcaggtgcgcgcgcggccgtcgagtggctcctaggcggcgcctctttgcccctccccccctccgttgccggcgtcgacgacggccggcgacgaggtaagattagggttagggtttttggttcttttgatccgtgcggatctgtgcttttctctctttggatttcttttcccgaaccgatctaagccctagggttgctctgataccaatgttatactttgcactaggatcacctaggttagatctagtcgggtggttctatttgggcttgaggtttgaactatagagattgaaaacgggagagggtttaaatagaccgaccggttgaggtgttggaggatgaagaagtgccggccatcgtctccgttggcgctcgttgtcgtggatgcggcgccggtgaggtcgacgacgatgacggctgcggaagtgacggttgtagatgtcccggcgatgaggtgtggcgcggcggtggcgcttcccgtcactggctgcgccccctcttgatcggattagggtttgtagggtggagttggcggcggcggtgaatctcgaaccttgtgccgtgccggcctccacccctcttttattatggcgcagtgtgacgggggcccaccagccattgggctgggcgcccccgatcagggcgcggtcaaggcccccttgagccgttgggctcaaggggagagagatctatctaacagtgggatgagagggagcgggcggcagcggctagggtttggggggccgacgatggtggcgggggcggtcgacggcgacgcgaggcgacggcgacgacggcgcgaggcggaggtggcggcgcgaggcagaggcggtgggagagggagagggagagagtgggggacgagggggagcaggtgcggtggcggctaaggtttaaggggccggtgatggtggcggggacgatcgacggcgacgacgacacgaagcgaccgggaagccggaggcggcggcggcgggagagggagaggaagagagtaggggatgagggagaacgtgcggcggcggctagggttctgggtggtagggttagtagcgtcttctttccaaaaagcccttcggcttcaactttttagagcgtggtcttaattcgcaatttttctctccttcacatgaaatatccggattttataatgtcctccgcatgaaaaacgtctcataggtactatttgcttgggacctatatcgaattacagaaaaatcaatggactttttcgcaaaatcgccaacccacgtgcattgctatcctacgtggcatcgcccagcgccgctcttctacggctgtttacaattctctgatagcatgctgtgccactgccatccacttcttttttgtgccatgacaaattttagatatccatactgattttaatataaagtcatgattcacattggttgcaattgtaaaacacacgggaaagtgcttgttcaagaaaaccaatttcatactccctgtggaacttctaggagcctatgagatctacccatttcttcctactgcagatgggagagcaaagagatgaagcaggcaaagctatctttgatttgttattgtctattgagccgctatgtaaagtagcccttgtgagttgtgatctaattgtgcttatgcgcttcgcaaagcttcatgacaaggaaaacatcagtttcatgaaatttgacacatgtgcgtggatgtagcaaaaaccgatgatttacatgacaaataaagatgtactatggtaaacctttttgtgaagtttgttttcctagagttgaataaataggaattgtttctaagattgatgattttttggaaaattaacttagaaatgtaattcaagttttattccctttgtactaagaacttagccatattatcttttacctcctgatttcttggatgtaattattttctaatacatatctcttctttctataaagttaagacccaaagctgcctcctcaattcgccacatcatcaacattatattagttgttcgatcaaatatgtacatcagatatacgcagatatacgccattggatccatcatcctcttgcccaacatgcatggtaatcacttgctccttcccattcccctcccttaatcacatgcattaatttacagtagaaaccgccaaatcaattgggatatgaggtgcgatggttaatacgatttatgtgcctcttgcgattctcttccaaaccttttaataagccactttgcaatcccctctataactaagtctcttttctcttccccctttgcatgaatcttttcatcgtacgttggattctacttcttctgtcccaaaaaaaaaacccaatcctagatttgaagtatttggtaagcctgaatttaacatttattttggccggattctctttgagtatatataatgatttgaactaagcaggagcactatgaaagctttgttgattagtttctctaaaattgaagaaagaatccctatcctatgcatttactgttgttttagtttcttaagaaaagattcgtcatacttacaatcaatacttatatgtcttatcactttaatttatttgagcagttgggaaggatacagaggattgcaatatagctgtcctgacatagcgagaagcagcttaacctactcggaatgtattttgttttcaggttcaatcaatacaatctaattgtttatactaatatgcatatttacatgttctcaaatgtgcccgcagcaaagcgtggggtttcatctaggtataaataatgtgcatagcacttgtatggttactgtaaattttttattgtttatttcattctatgtttacaaaacatatattctttcggttgtttgatttttacttctaaacattgccgtagcgttagcacgggcgaattactagtttgcttggttaaaatactttagctttcaatataatttctaaaaatgcattatttgatgatttttattcccgaaggaaaatcggggcatgacaaactctcagcgtttgcattgtaatcggacggcaagccactcacgatgggtgccttgggtcaatttgggtcgcgtcccttcacctgcagcctatcaaaatcctcatttgtttgggctagaatatacgcacgcaaaaatatattctggcccattcagccattttgctccctttctcgagaaggagttcggcacttgcatttccatggcttcttttatgattccaacggtaccgtacgnnnnngnacatcaagtttaatcgacatctctaaatcataatactagaaatttcacatctcattttatcaaaaccgtccagacagatcctagggcagtatcgctagctagtttcgctaacgcggcatcctaatcagcaaaagaaaataaaaaacacatgggcccatatgtaaagtgagaagaaaaaagttgcatatttaatgcctgggctatggtgaacagagagtggcgccgatcggttcattcgagagcgggtgttatgaatccatcaacgttgctaggacttagatctggtggagagcgcaaaaactctccaccgaagagtcttactatcgagagagaagaaaatggtgagaaaatctaggctgagagggactcaacccagaccagtgacttgctcctggtagctccctaccagctgagctatccactgttctctccaccaattacttttaggctctttagttacaccctgatcgaccaatcgaccgggcaacatccacggaatttgatttgatctcagcggcggccatcgatcacctcatcggcggcggcgtgattccgagcacagagcagaggcctagctagttgttcatgtaatttagcaattgctttcgtcactcgtccacttggagcacgaggacgacgatctcggccgccacagttgatgggcagagaccttgttgggaacatctcttggggctgagggggtgacggaagcgtggtgcttttgctccttctcttcttggaactcgtcgctgacgatggcgtggtaccggcactccatgctatagaaggccctcttagggccggtcctaagtttttagggccccagtgcgaaactaaatgtaggcccttaacatactactacataacaataatcaacaatttctagatgagaaattatcgatgacatggcttgataatgaaaaaaattaacactattatgattgtttaactcatataaattacacaacaaaattacaaatctaaatttaaaattttaccaattggttgatcgcaagcgtctagatgtgatgcgtaatgcatgaggacgattctatcgagtgaaaagaaacaaacaattaaacgctaatgcccgcgacgccgtgcgtcgggatggcct

SEQ ID NO: 24927 - DNA, 2061 bp, Oryza sativa
  unsure (1)..(2061): unsure at all n locations
gggccggccctgggccctctctcctctatacatgaagatgtccttgctgtgatgttgtcgagctactgccggcaaaggtcacggcaatgccagaaactccaccacccagaacgccgtcgtgccgacgccgaagcaacacaggatggtggtgcaccgcagctgcacccaagctccgaaacatccagtggtacggactcaacatataagtacggaagagatacaaagaagcgactgaggcttacccaagtggttgttttctgaggcatgaacgtttgtggacgcgggttcgaatccttctctacatgtttttccaattagttccaaacgtgctcttttaattttcttttgaaaattcaagtgtattttaaattcgttttatttttaaattaataccgaaaatatgcaaatttattattatcaaacttattattattattattaaattgaggcaaatgttatataatcgaaatagtcaaattggtccttccatgttaaaaattgcaaaattttaatttttcttgttaaagttcaagtgcattttaaattcgttttatttttaaattaagaccgaaaagatgcaaaattattattattaaactaaatattattattttttaaaaaataaaggcaaatgtgtggtccttccaagttaaaaaaaatcgcaaatttttagctattgagctaaattatatgattaatatcataatataagttctcaaattttttgtccaaatttaaagtaaataacaaaacatgtgatattttaaaagaaaaacaacaaggtagagtcagaggataaaaaacggaagaaagtatcgtactggtgtgggaacatatggagaaaaaacatatgctaccaacaggctagcgctccttttgttgtttactatttctatgcattatggctgtgtttagatctaaagtttgatccaaacttcagtcattttccatcacatcaacctgtcatacacacgcaacttttcagtcatatcatctccaatttcaaccaaaatccaaactttgcgctgaactaaacacagcctatactcagaaaagaggtcagcgccagctactacggtgccgcgctcccctcacgtggcggcaattgatttcgtgccaccttggacatggtacgttatatcctggtgccatcggggttgacgttgaggtcatagtttatttttggaattagttttttatatgggttattttttaaataagttttggaaaagtgtcaatttatcaaaacctacctcgtcgcgtttagctcaccgtgagcagtcgagagctcaccgtgtaccaatccggcagatcgccaaaccagttccgagcgcgagccgaggcggaaacacttccatttcgggcgcgagaacagcgacacgctgccagagtggctgcctggctggagacacgtgaggcgagacgcgcgagtgatcagctaacgtgcacgtggcttacagctgtgcccttgttcactgtcaagtgtagctggcanaagaagaggaggtaaaatatgatgcggcttattgctgggcagcctggggccctgggcttgatgagaataatccgctaggaaaaagtacacgcaatgtccctcaaatttgttagccagatacaaaatcgtccccaaccataaaacaggatatctggcgtcccccaacttataagaccgatcacaatagcttcctcggcggttttgaccacggttttatcccacgtggcggctgactcagcatgggacccacgtgggccccacatgtcatggagactatgtcagcaccctctctctttctctatttctctccttcctttcgctctctgctctcgcacaggcggcggcgcgcgcggccagagggtggtgcggccggcgacggcggctcctgggtggcggcgcgcgggcttagggtagcgcgagctcgctggcctcccaatccccctcgtgcggtcggcaatggcggcgcgcggctgcagccatcatcaccgatgcggagaggagggccgatgcggcggcaacggcgtcaccaacacggtgggaaagaaggtcggcgttcttaagtgctt

SEQ ID NO: 24928 - DNA, 3160 bp, Oryza sativa
gtgttgcatgagctagtggagcaaatctatcggttggttagctttgtgcatgcagctggtagtggatcgagtggagcatggatgtgtggcatgacctccgccgccagctccaagccaaggagaagctcgcgccgtcgcaagcaagtgccgaaactcatgccgccacccctccagcccagacgaaactcactgccgaaactcgccgggcacctcctccagctcatgcacgcgcggggacggcggccggagatcgaactcatcgccatggtcatcgcgaggcggcggtgaaggcgtggctctatttgttcgcggctgcgcaagttgaccagggagccgtcgcgcgtgtggctccagctctgccgcggcggtctcccgccgctccgccccaccaaacggcagccacatcggcggcgccgtcatgttcgatctccccttcctctgccgcctcaccccgacgatgaccgccgcgctcctccccgcgcgacggcagccatcggcggcgccgctcgtcccatcggccctcctgtcgcgccgctccttccccgtcagccgccggccacgccggccctcctccacgccgcgtcgaagacgctgccgccatccacgcccagaggaaaaaggagagaggaagagagagaagacgggaaaaagagaaagggtggtgacgtggtctatctgacatgtggggcccacatgggtcccacgctgagtaagccgccacgtaggacaaaaccggggtcaaaaccgccgagggatctattatgactggttttgtaagttgggggacgtcggatgtccggttttgcggttgggggacgattttgtatctggttataaagttgagggacctttggtgtactttttcctaatccgctatagctatacatggccatcaggcccgaggcccgacggcccggcccacagcacagtattttggccgaccctaccactgggccgtgcctgggcctccccaccggcatgttgggtcggcccggcatgaccgacccggcacggcacgatgggtcggtatgccaggcccaacgcataaagtatagggagtaaatatagacattatcgccacagtccaaagaatagggacgtaaaatagacttatttcagcccaaagaggagggagggaaactagacttattttgctggaccaagagaagggtggaaaaatagacttatttaggtagccctaaggaaggcctgatgggccacccgtgcctacaggccggcacgacacgggcccgactgctggtgggccgtgcctgagccggaggtgcagcccatgggccagcacggcacggcatggtgtgttggtcgggccgtgccggcccgacagattttggcccgagcacggccgtgccgggccgggccgttcgtttgaccatctatagctatagctagctaattacttaaacagcatgcaaagattaagactgcactgtgttttaattttgtcaagctaggcaaggactttgtgacgagttaactagagtgagtaatatattttgaggtggcgagtgtacggttgagcttgcagtatgcatgcgcttgctatgcatatgcactactaacttttaacatatcagtgaaaggccaatggataacttcagttattatacatatgccctcctgagtacttgtatttgggaataaactaggcattcaagataggaataaaaaactccactacttatactttgcagataagctgagaatcttgttttgatgagcatttgtcattttgtttataaaagaaacgaaggaaatttccaactaattttatcactggacaagttcaaaaatccacaaacttgacacagttaattagtggaacacaaaacatgatgatgttaagtgatgtgtttattttgtagctggatggaacaattgtagccccaaccagtgctaaagcttgggattctggtttgcttcaatggattgagtttacaaaactaaatggagtatcaattcaaggcaatggcatcataaatggtagaggacaacaatggtggacctattcagacacagatgacgacgaaaatgatgacacagtaagttctcccatcccttttagcatatccttataaaccaaccattccaaagatgggtcatttagtacttaccttggatacttccacagtacgatgtggagtttgaaaggatgccacaagttaaacctacagtaagaagatcactatatcaaatcacatttgtaattgtctgggtgcacacgaaaaccaagtcataagaactttactctgatgcaggcactgagattctatggtagtttcaacgttgtagtagctggtatcactattgtcaacagctcgcagtgtcatctcaagtttgacagctgtcaaggagtgatggtccatgacgtaacaatatcctccccagaaaacagcctcaacactgatggaatacacctgcagaactctaaagatgtcagcattcatcataccaacctggcttgtggtactacctccataactgaactgaagcagaacttagagcctatatgaatctaaagtacatcaaaatgcttagcgattttcttttataaaatcctccatacatgaaacaagggcaagagacatgtgtatgctcaataaggcctagaaacaactgaaatcctgtctccctgtcctgcaaattctgcagtgtataggacaggagggtaccaggaaaaacttcaagagtactgaactatgaagctatcttttgcagttactcaacaaaagcagaaaaacatagttaacatgtaatttttggtcgaatatgatgcaggtgatgactgcgtctccattcaaacaggatgcagcaatataaatatacacaatgtgaattgtggacctggccatggaatcagcattggaggcctaggccgggacaacacaaaagcatgtgtctccaatgttactgtaagagatgtcaacatgttcagaaccatgactggtgtcagaatcaagacctggcaggtaagcacatccctttataggtacaaacaaatcctacttaataggacagtcattacattgtcaccaaagaaaaggataaatatatcatgttcataaacttggacaatcagatgtggtaagagatatatatgagaaaagaaatgatgatcctaagtgaagacttaatacttact

SEQ ID NO: 24929 - DNA, 5992 bp, Oryza sativa
  unsure (1)..(5992): unsure at all n locations
agaatattccaacttaaaagccaggtattggggtgaaaattaaagatagttccaatcttatgtatggacaaatttaattcatttaccctatgctgtgattcattccatgttaactccatgcaactttttattaaagcaaatttgtgtgttggcggtgcatccatctaggtgcgttcagtctagtgcaatatcttgcaaaaaaaaaagaagctcaaactagtgtgctatcttgtttgatggatgcaaaacttgccaacatgggtaaccaggctctcttttgcattcattaaacaagttcttgtaccagttccgagtattttgcaaggtgttgcactagattgcatccaactcacatgtttttgtacccttagctacttcccacaaattctacttagtttctcaataaatttagattgaataacaaacctttagcacctgcgctagagaatcatgccttgtcttggcacaccagaagctacaaccgagtaaaaaaggaatattaagctgagcttatctccttcaactaaaaggcaagagagaaataagacaaatgcatacctatgtataagatcttcattaaaaccaacttttgttaattcagcaatccactgatgcaagattgtgcccggggcaacaatcaataccctttgtgtcaaatcggaataaaaaaggccagctagaaaggctgaagcctgaatagcaaaaaaaaaaactagattagaagcctatatgaaaagaacacatcatacaagaattcaagggaaggataaaggaaatttcaactaaacctggcgggttttgcctaggcccatatcatccgcaagaattcccccaccggatttttcacagtggagcctccagagccattcaagcccatccttttgatgagggaagagactagaaaatatctcactaggaaggagaaaggggtgttttatatggtgtccagttgctgcgataacaaaagcacctgatctattaatagacacctgcaacacaaatgaccgaaattctattaaaacaaacttataaatcctctgtcaattatttgtatagcatcacatattcatgttgtatagcaataacactattgtgagttgtcaatttctgccgaacagtcaacacattttgcactatagaatatcgcagataggacaaaaattgatgatctttgtaattaactgcttatgactcaccttttcaccaccaagattaacagtgttgccatttgagagaattttaattacagctagctcagaactgaagagcacaaaccctgatccttcagaaagtttattttcatccttctgagtgatctgatggtcaactactgttccatatggagagaagaagtgcacaatatcatctgagaaatcaaaataaccatcaggttaacactataaggaagcagatgactatcttctgtattaataataccattggacactgtccagggaaggccatccagagttatcctccggtttgtcttcttgtccttatactgaatggtgtcttccattaatgttctatcaactacaacctggaaatatcaatagacaaaccaataagtacctttcagttgggacattatggaactgaaaaatatgtgataattctagaggaacaaaaatccatatggtttttacttgcaggtagctgggaattaggatgagtaaggaagtgcatttggatatgtcgaggattaaaatcctccttttgaaaaataacttagaatatttttaaccaagttatttagattgggaatattagaatacaaaaaatttcaaatgagcacataacagacattgaatgatgagccatgttgtttaggtaggaatatggaaattgggagaatgacttacatgttttcctttgataatatgcctgcacttgattattttatcagaaatggcagcatcggcataagtaattttagcagaatcccctgcctgggctgtgcccttggccctgataataatcaaatcaactatctttccatatttaatgaaatagtctgctaggtcagctgtcataaaaaatgacagaaaccaaattagtattacaaaaagttagtatgccatggaaaatctgtttaccaggtagctgactgtaaatattataactatggaattcagattagttaatgagaaaatcgtaatcattgaaccggtgcaatagatgttataatccatcatcctccattataggaattattcactgttgttcttaccagtttcaactcataaagtacaaacatctcttaaatcgcatgatggagttatgcctttgagtcaattgaactgtatatatttataaggaaacataaataccaaccagggcagacgaatgggctcatgaaataggtgcgcaccatttgctacttgcatagaatatagaaacaaaaacccagaaactgagcacacagattgaagaatttgcctcagcaacctagtgtgtcattccagtcagatatttattgtcaagtacagtacttaacggaatctatgaatatctatcttccaggacttgctttgagctgttagaaacttttatttggagcagaaaaaataacggaataatatccccaaaaaatacctgcaataatatggaaatttaaaccaccctacttaacagaatatgatgtggtttcattaactagggtataaaggagcaaattaccatatgacaattcgctaggcagccctcttataacaacttgcctgcagcaccaaccagaccacactgatgttaattaagatcaataaataactggtgaaatggtgggaaggggtggggatagtgtcttacccagcatggctgctgccctcgccaagttccttaatctgtaccatcgctgcagtttttcctttcttttttcctggaggccggaaacaccaaaaatcaaaaaaaaaaaggggaaatagtcaaattgcaagagagagagagtgtgtgtgtaaaaattagggttagggggagaggctctagagagagatagccacagtttgccggcggattggcggtgatggcggcgacgattccgcgtatcgggaggggttgagcacggggagggcggtggatgtgggaagcaacgcggccggaagtgtggagcacggcggggagagggatagtgttgggggttttggaggaggggggggggtggggggccnnngggtggtnangngacctgcgccggccggggtagtggagcacggcgccgaccacccggaggggagggagggcggcggcgggatctttacctcctccgagacggcgaccggcggcgagcacgatggcggcgcggcgacttcccggtcggcttccgagttctgattgctgtcgacgagcacggcaggagagagcacgggtgggttggtagagtcaattggagcggatttacaacggtgggctaatggaaataggaaaatgtccactttgcatctctcgaccgcaaagcacggggaaaatggacaagtggctacgtttaaaacgtgattttaccggaatgccatcttaaaaacgattcgttaaaatgccaagatgaagcgcgtgacactcgccgctttaccattttcaccattttatgcattttcgataggaatttcgcttctctgccaagtgaccagacgaaattgccctgcagttacatagaaaggggatcgagatccagagggggtgcttggctgtctctctcttcctccactctccagcatgtttgctcatcagcgaagaaatcaatttggtcatggagacagctcgttgcggaaggagctcaccgtcggcacaccgcatgtaggcgccgccgtcgcactgcatcccacttgggtgaggatggcgaatatggagtgtacatggcaagaactcgtagccaagtaagtgaatccattctcaatcctttggcgatttgaatgttgttgatgttgcgattgtgggcgagttcgttgtagtttgtgcatcgtttaacttgcttccatttttctatctcaccaggctcgaggaggagcctgagcgtagtttagctgcggtagttggtgatgcaggagcggtagatgctgacgcaggagttaaaaccgttttctatgccgcacctaatggggttgtcgaacttgtgccacctccggccgatcaaggcccagctgttgatgcacctcctgatgtgatattgcctgtatggtacctctaattactaattctgctttttggatctataaataatatcatgactgaataaaaaataatttgtttatcatcataacttaggtcttgtttagatcccaaaaatttttggccaaaaacgtcatatcaaatgtttggacatatgcatggggcattaaatatgggaaaaaaaccaattgcacaatttgtatgtaaattacgagataaatcttttgagcctaattacgccatgacttgacaatgtgatcctatagtaaatatttgctaatggcggattaattagtcttaataaattcatctcacagtttacaggtggaatctgtaatttgtttttgttattagtctactttttttgcggggagttattagtctacgtttaatactttaaatgtgcgtccgtatacttcaaaaacattacaaccaaataactaaacacacccttaaaaaatatttacagtaacaacatatttaagatgtatcatgaatttaattatggatttcagaacctcctgaatctctaggcaatcggaattttcttaggacagtcctaaccctccacctaggatggtgtctatagcattaactacattgccatgtaggacttttagcttatgtggcactatattaattaagagagaaagagtgaagagaggaagaaactgagtctcatgcaagacacagcttcaacacgagaacctatgcactagacactatcaagtttagacactatcaagttttgcattgggagagaataatatcttcataatagatgaagaataaatatgattggtagagaaaagagatgatgtatttattaatggcccactttaagaaaccatgggttgtagagtgtagtttctattgtgatgtcttattgacatggcaccatagacactgcttatggacactatgggttgggactgcccttagcatgcgtccaatacgtcaacccaacacaggaccaaaaaggaaggtgatcccaaagctcgaggtgtctctttgcctcctcttcggctggaagcaggcaaactggcaaaggtttctgtttcctccaactcctaggaaaactcacggtccctgaggcctttcacagttcaccagccgacgagttacttcatacctccacgcaggatgcgtgatgatgtggaggagagagggtgtgggccctcgtatgttggaaatatggtcataaatcggtatattttaatccaaaatattaagacaataaacatgacatttacaatgtgaagcgatctagtgataaaactaaacataaccatgagtatgcttaaggtaaaataagcatcaacattgagacaacgcaataatattgcaactggcagttttaacaaaaggaacggtaacagaaggatgttataccctgtgaaagttccttcgctagattgtgaggcagaattggctccgttggtgttgtcgatcggtgcgccacctcctaattcgggcgcgccacctcctgccgcaccgggtgcgccacctccagtagacatcacgcgatgcagacggaaccgaacgacgacgaagaagcgaacagtcgtgcggaagcactccccaaaaacttgatcaccctcctacctgtgcaaatctcagacgagggtgtggttccggaggccctactagttccaatcacttgtgcgcgcaagcgatcagaaccggggaagaacagaacctaatcacccgcctacccgtgcagatctcaggggagtgtgtggttccggaggccctgctcgtcccaatcacttgtgcgcgcaagcgatcagaaccggggaagaacagaagcagcgcaggcacatgcacagag

SEQ ID NO: 24930 - DNA, 2685 bp, Oryza sativa
ggcagtgttcattggtctgcatttgccaagattgagagcgagttgactttgcgggtttgtggcacgcgactcggttcaccagacggctgacgtgtgcgcacgtatttgtgcatgcatatggttcgtccaatgtgcggccaagcaaggccaggtgtaaatttgaacatttttgtttttgatttttaggcctcaattttggtatccgagatatccgaactgtggaggcgatcgctcttgcattgttgatgatgttctttcttttttatatactagcaaaaatgcccgtgcgttgcaacgggtgaagactattttaatcttattattgttatatggtttagttagatgaaattcactgtattaaattcacttggatatatatatttggttagaaaatcatgagttgcaattaggagtccgatcgtctcaaattagcatacgggttttaaagagatttcttatatgattccttctgtatttttaaaagtgaacaaacttaaaaaaatgactcaaatacggatttatatttccaaaagcgaacgaatttaaaaaccgacccatacaccgatacacggatgacgtaccaaagtactggcaaaaacatcttcaatttttatatatatattttttaaaaagtagtataagtagaagagaagattactgacgagaagtctttttcgagagagtcggacatttttttctttttttatggtagaagttttttgtttttttttctcggcttttttttctccacagggagtccgactttttcttttaagtcggacgttattttttttgcgattgaagtttttttttctcttttttttgttttttctctctttttttttaccgctggatgagtcggaccttttttttttccgagtgaagtttttctcccttttttttgttttttgtcgctctttttttcccaacggacaacggaaacatgttttacttttttaagtagtagtagatatatacatgtctcgtgtaaattgctatctgcagagtcttccatttgaagatgtttataccgtgtgcacttgctaaatggtatcacactacttagaaaactgtgtcgatttaaaaaccaggcgcgttttacactaaaatggaactttgaccatggatttgtgacaatataagccattgttgacataaatttgcaacacacaatagtgacataaccattctaaacatttaaatatataatatgaccaacatttgaaaatttgaacttatgtatatcggtatgacattatccacgagaaaagactagcaccattcagagtgacagccatggcacattcaaaaaaaaaaaatcaagcgtcacgagaaagtcccaggcgtaggccctagttgaatataaagcaaaggcatgggccggcccattccatgtcagcaatgaggttggaatttttttcatttatagattttttttaatatttgcagaaataatctatcggccaaaaaaattgcaaaaatagaccctgccgccccagaggtgggcggcaagatgacgtggcagatggagggttgaccgcgccgtttgccgccgtcggccaaaattgcaattagccccttgccgcccatacaaagggcggcaagaggctaattgcaattttggccgcccataaagaggttgcgctcgtacttttttcatttaggccccttgccgccccagtagagggcgtcaagggacccagatgcaaaaagtaccgccaaacgatttttctatgttatgttaataataaataaagaagtatttattggtaaaacttgttaatattgttataaaaatgtattgaagttggttgtttcgcaatttcatatgttaaggtattattttgtaacttattcgacgtattagtactcggataattaatataggcctatcgcagtctcggtcgtagaaacattatatggacttaaacaaggagaattagtaacatgaagaaatagtagtacaatttgaacatgatacaactatttccattgcggttacatagatgatattagattcgaactaggagggaggtagtgcaatagttgaacacaacgacgatgtagtaatgggacaaggaagcatgacagtagaaatttcaatatgccaagttgtccgataatagctaaccgctacgtgaggatccctctcctctctcaaaccgcgctttagtaaccctgtattgctctggtagttcaagctgcacaacacggctaggtggagttagaacccttctggtgtctatccattctctgtattgacatctccttggtggttcctgggaggaaagaatagatgtaaagcgagcaaagttagtaaatgttgtgagaaaataaggattcatgtaatcaaaatattcttaccatgaaatcgtcgtcaagaatatttggacaaacaaagaaccttcgacccaatattgtaggctttatggaacgaagaacctaacaacgatcaccacacctgcatcttggacgggcttcccatggagggagtgccatagttagcacccgccagtcattctgttgttcacgacattgtcgttcataagccgcttttctctgtaagtattgctcaatactttcggatgcgaaatactaacgaccttcttgtaaacaagtggttaggtcgagaacgggattttctgtattgacccactcaatgtatgcgcaagccgtagtgcgggt

SEQ ID NO: 24931 - DNA, 4732 bp, Oryza sativa
aaggatggacgagaaagagtatgatgctcctcattaattgaggggtatatgtagggagtgaaaaagggtagttggggggtaagatggggaaaattttgaatgagaggtggttggagggaaaagtagtactctaggataccttatatccgaggacaaattttgaatgcttggatcccttgtatctggggatgggaggaagtaaatatcatgatgcatcaatagaagtgaatggaaaaaatatagtcatgtgtcaaatgtcctaccaaagatatactagcatatgatgcgtatataatattaataaatgttctggtcaatgagaaaaatgcatatgcgagtttttgttaccaaccatccacctatctcattgtaaaatacatatctgtgtcactgccatagtgttatttgttttgctcaattaggatttttttccctaaatatagtttgagagaagaggccattacatgaacaattttgtgaaaaatgataaagtacagtatcttctaaaaaatcatatatatgcaaacactaatattgttcacatattccttcttaggaaatacagctcattcatcactagcataatttctggttgtaatatcactggtgttgcacaaaactagatacagcaagactggcaaaaagtagaatgacagaagaatatgtgatactggcaactgttctaatacacaatcttcaatgtgaagctcagcaggatgttttgaaaaactgccagaacctgttcaagaagtaccagagatagaattttcagcattgcctattacaagatgggaagtcaatcaaattgaaaggtattaggatgaaacagagtaacaaacctaccgaaagctattcatcttgagaaactaatgagatcctttcttcctttgtagttctcaatactttcagggcttactagccctgtactttcctcatatttcttctctaggtcctattgtaaaagtggagttttgacttcatgtgagcaaaacaagtttgtcgtaaaatgtgttgtaaaaaatatatatacaggcacgccagcctacagaaatacttatgcacagttattagttgaagtcacatgagaggtgccttagctgggaggatgttgaaatataaaattttgagttaaaaggcaaaagatatagcaaactcttgatacactaaaaactcaatatttgtaactctggtagaaaaagtgaagaatacattcaaaacaaaggaataatatgttattaaacagttctagcattaacaactgctatcagatagaatttcgatgcaatctcattattttgcactataatgacgtttttacaaaccttcagtccctcacgcacgctctcaagaacatcaagagacatcctgtcaaagaaaagaatcccctgcacatccacaattaaatggttagaaataatatgttgaaccgttgttaggttgcttgagggaaaaacagcaagggtatatatgctccaatatgtcttaaataattggagaaattgatctctagattatggtgttgaatagtatatgctttatacgcacccatcccacattgaaaattgagttatccctaatttgggttctttatcaaaagtagcctggacaggtaagtataagcatgagcttgatttggtggacccttgcatatgttcgctacagaaggaaactgaagcgaaagagtagctgctggcaaacctttacagacagtcttgacaatttatttaacttttaccatggttaagcacgtacctgtaaatgatcaaattcatgttggaaaactcttgcagacagacctgacaatttaactttaatctttgcccctgtaacatcctgagcatcaattttgacattgtctggtctctgcatgaataaagtgatcataattcataagtcattcacccaaaggacacacagctgcagtatgatggaaattttgtttgcctatttcacatctatatgttgctaaacttttgggtatttcagtctctaaattatatagtgcttttgtgttaaatctagttaatatgtgcatattagtagtaggcttaaaacgagtaaccaactcttgaattctcatattgttacaaggtcagaatttgaaggatggttcatttgttataatcatgttaatacgttatcactgctttaactcaaatgcatagttaaaaatatagttcagtaaaacgtgcagggttaatctcagcaggcaacttcactgattgttcactgaatgcatataacagtccgcagaatgaagaattcagcagcacagtgcaaacacacaagcttaataaattattttccaatgtactacctttgtttttttaaacacaagcttaatcaattattttccaatgtactaccttcgttttttaatagatgatgccgttgactttttatcacacgtttgaccattcttcttattaaaaaaaattacgtatttataatttattttgttgtgagttattttatcactcatagtactttaagcatgatttataccttatacatttgcataaaatttttgaataagacgaatggtcaaacagatgttcaaaagccaacagcgtcatctattaaaaaaggagggaatatcatgtagactttcaagagtcatcaaataacaatatggcttgtacacaaagtatcctcaccaccacattggcatatatcccagggaatgataagcagccttcctcatacactaacaatctcttcgacattttgtatacaaccgggttgacaaggacaatctcctctccttctcccttcacaccagctggattaaataccataagctgtacattcaccccaacttgtggtgcagagagaccaattccatcagtcctgtagcaagaaaccaatggttcaattggaggaatatcttctcgagcaatagtagatagcaagcctttctaaaaatgatagcaagatatatgattggatatttcccccacttaacaaggcatttcacatactctgagaaataactagtatgccacacaatttcgaccacttcaaatcacgccgtagtagtcttggagatctgttaaacactagacctctctaaagcccagggagcctcgtaagcacaaatggtaccttaatttggttatttaacaaagtaacacatattgaatctgaagcgctagaaaaaaaatcaccatggcaggatcaacttaacattttcatgcataattcgtcaaaagagtggcacggtaccctcacgcgcatttcatcaaacaggtcggcgcacgcaaacagaaaaccccagcaacgaaaggcacatatgactcaaacgccagactcacttgtacataacgtcgaacatctcatcagtgaggctgcggaggttgtcatcgaaggtgttgatgcgcttgttgcgagcccgtaggattgggtcggggtacttcacgaccttgagcggcggctcgaactggaggtcagcagctgcatcgtgcacacacgccaccagaagcagaagaagaacaaaccgcgtgagaagcaccacagaggaacccctgagcagaggaacgcgccgtgaaggcggcggctaacctgtggcgaagtcctcgtcctccgccggcggcgcggtggcgacggcggaaccgaagccgcggcgggcgcgtgccgccgcgagaggcgccaccgagcccatgcgggagaggggcagcgctctggggtgcgcggcgaggaggggggcgaaggaggacgcgaacccgcggaggcgggggccgaggcggaggtgaaggcgcgcggccatggtggtgggggagtcgacgattttttcccccgcacgcggcagcgattgggcggtgcccgctacagatgcctcgggggtttttttttttttttttttttttttgggcgtgcgggagcagtttggccgttggcggtgcggagcggttgcacgaggagcaactctcagcgtttggattgtaatcggacggcaaagccactcgcgatgggtgccttgggtcgatctgggtcgcgtcccttcacctggctcctggcactatgcagcctaccaaaatcctcacttgttaaactctaaaaaaatatcctcacttgtttggagataaaaaaaaatcctcacttttttgggcattcggccatttttctcgggaaggatttcggcactttcatttccattgcttctggtacgattccaacggtaccctatctaatatctgaaccgtaatacgagaaatcttcacctcttatcacaaccattcaagacagattccaggatggtatcgacgacgggtttcactgacgtggcgctctagtcagcaaaaaaacacatagacccatgtgtaagtgagaagaaaaaacttctatctttaatgcctgagccgtggtgaacagagagtggtgccgatcggttcatgcaagagcgggtgttgtgaatccatcaatgtggttaggacttggtttggtggagaccgcaaaaactcttcaccaattacttttatgctatcgaccaatcaattgagcggcatctacagaatttgatctgatcggcggtggtgtgatcccgaggaggaagcggatgtctagctagttgttcatgtaatttaaccattgctctcgacgctcgtccgcttggagcacgacgacccgatgatcttcgccgccataattgatgggcggcgaagaccttgctggggacatctcttggggctgagggggcggttgtagcgtgacgcttctgctcctctttttagaa

SEQ ID NO: 24932 - DNA, 3545 bp, Oryza sativa
caaaagaagagaagaaaggtaaaggtgctgttcttttctcgaataagagttggataaaaattaaaattttcgtggcacgctttttaaactgctaaacagtgcgtttcgtgcgaaaattttctatatgaaagttgctctaaaatattataataatctattttcaagtttgtaataattaaaattcaatcaatcatacattaatatcacctcgttttgcgtaaaaacttcatcttcatcttcatctccatcttcaagagaaaataacaccaccaaaatatgatgcggcttagagcaggtacaatagtaggctataagtcagctacaaacatattttaaagagataaatgaagagagagaagaacatcgagctacatatctatagccagctgcagcacggactccaagacgtaatgcgtgtatgacagatgggaccaggtattaatagtataggtattaatagtatagtaagcaactattgtatgaattggctattacattgactatagatgatttggagttagtagtgggctatactattaaacttgctcttagccggctatttctgggcagcatgggcttgatgagaatataatctgctatagcttgctaattactcaaacagcatgcaaagattaagactgcactgtgttttaattttgtttggcaagctaggcaaggactttgtgacgagttaactagagtgactaatagatttttgaggtggccggcgagtgtatggttgagcttgcaggatgcatgtgcgcttgctatacatatgtaacttttaacatataagggccctctttagatcccgacaaaattttatatcctatcacatcgaatatttggacacatgcatcgagttttaaatataaatgaaaaataactaattacacaaattgcgtgtaaattgcgagacgaatcttttaagtctaattgcgccataatatgacaatgtggtgctacagtaaacgtttggtaatgacagattaattaggtttaataaattcgtctcgcggtttacatgcggattatgtaatttgttttgttattagactgttcaatactttaaatgtgtatccgtatatttgatatgacacgccaaaactttacccctctgatctaaacacagcccatgtgaaagaccaacggataactccagtttttgtttttttgaaaaaaaaagactagtttttcgattcaatcattctgtggactttatccacattgtggatgagcccgttccctcaaaagatgatccgtcaatacggacaggtttggacttgtacccgccgtcccgaaatggaagcgcctcaaaagaaagcatcccttttcttttgccaaactcggcaagtttgcagcatttcgcaagctagccacgacttcggagagcatgtggctccactcacaaacatgtgcgcaatgcgtaaagcactaaagcctcgtgacctcgtcgcgtctatataaacaccgacggcgccgggtgtccgatcaatcaggatccaagtgtgcggcagcaaatccaccgccccctcacccgtctctgctctgctctgctctctgttcctcgcggcacgctagctattcgatggccaccaggatgtgcggccgcgccggcgagccggcggtgcgcaagggcccgtggacgctggaggaggacctcatcctcgtcagctacatctcgcaaaacggcgaaggatcctgggacaacctcgcgcgctctgccggtgagctaagctatacgctcgatgttacgttccttcttcgttgctggaaattgttgggatttgatcgatcggagctttaattatctcgcgactatgtgatgtccgaactcagggctgaaccggaacgggaagagctgcaggctgcggtggctcaactacctgaggcccggtgtgcggcggggcagcatcacgccggaggaggacatggtcatccgggagctccactcccggtgggggaacaggtggtccaagatcgccaagcacctccccggccggaccgacaacgagatcaagaaactactggaggaccaagatacacaggaagccgcgcggcaggagccagctgctgcaggaccgtgcgaggacgccatgggcatgggcatgtccaccaccaccagcgaggcggcgtcgacgtcggcgtcgagcggccagagccaggccagccccggcgtctgggatgagtacatgcaggcgagcagcttccctcacccggagcttgtctccttcgccgccgaccaccacctcgaaatggccggcgtgggcgaggtcgccgccgccgccgccggcagtttgtcccgactgagttcggtttcaatgacggcttctggaacttcgtggacaacttttgggagacgatgccggtttcagacgtggtgtgacgcgcgccacgcaaaccaattaaccgcgcgcgcggcagcaactagctagcgaatataatagcactatagcctatagagagaagatacaagatacagaaatcgtcaacgatgtctctatacttgcttgtagaggcggatgtttcagatacttgatctcgctttttgttcgtgagagaacttttttggcgaggttaaaaagatgctcttctgcactctgtgaggttctgaattctgatacttcagaaagctacgacaatagtacaagctaagatttaatagtagcacatgcaaatgagtgaatctgtaattccgaatctttttgacaacacacgttgttgtatctgcgtcactgcatgtgcagtggccccggtactaatactactgagatttggttctatttatacgttcctggatgttgttctctgctaagtgaacgtacggctctagtctcaacgtggctagcgaatgcatgtgcactttaaattgctgacaagctcgaccgccggttcgttacgtcctaaaaatgagaccggcaaattggcgaccttctcgccatgcccttgtgtctaatttctcaggtcatgctaactgtcaatcggcagcacatgaccacatgcacatgatgacttcgtatttggataaaaagcagaggcaaaagagctatgtaaggccaccaatccagtcttaaaaatcagctggcacgccctcgagactagccttagatctatactggagttaaacaaatgtctcaggtcaccatgttttcacatcatcagtctcatgtgaaaaattatgcactcagtcaacgaaatcaagattatttctttgctcactgatgaccatgtgaccccagtagtgcactagacctagttgtcaactggttttatatttgtttgttggttatttacattgcattcctccataattattcctatgtttcttgcaaccatccaagcacccatcctataaaattcatgtattttcaaatcgtctgttttacttacgtgttcctatcaaatcccttagccttttctattcctctatttttactatttctatattttgaacaagccctaaaagtttctccaaaccaaataagccctcagcctttcttacgtatgtacaataccccaaagcaaatgggttttgtgttggcact

SEQ ID NO: 24933 - DNA, 6762 bp, Oryza sativa
  unsure (1)..(6762): unsure at all n locations
tactttacttgttaggcaagcgtggctcactgttcattgcttttctatccaaacttttgcctttgttaaatgcatcacctcgaacatagaagggtgcatcaaagattttgagagtaatgcttaaaatgggaaattggacacgaggttataaggacgactcatcaggaattgtgggttgtctgtctgtctcattgaatagaaaccacttacataatgcatttgttttcaaaagaatgcaacaaaagaatggctagttttcagtcaaaaaagaaaaggaatggctagttaccatgcatgttgattgaacccaaaccatgacaataagacatgccattttgtctcaagtaaactagcatagtagtccgcgctgatttcgcggctagcatcattatattttctcttatataatagcatatatacattcttattttaatattaaaataacaacataattttaaaatttgtactaaatttacaaaactactaatgtgtaaatattataccggtatggactctagtcttatctttctatattccttattgttaattccaaatttcagctattttaaaattgtattcctgtatgggctctattttttctcatattaatatgagaatttctaggccatgagagccaacatggaggcttttttttcggttactttaataagttaatagattttacgagcttatgtcatcaccacaacttttattagatgcacacaaaaatcagtaagcggttgtagcatgattttttttaggtttttcattgatcaataagacatatttaaaattccaacacatagcaaaaatatatagcaggccaaaaccttttttctttatggtagtatagatggtcctattctatacacttcccttctacctggtattatttccaccaattcaaacttttacaattatacaaaggtatactcatacaccggaacgggatcctcctgttgcaacatgcatgcaagtatgcaatggcagatggctacataaaggtgcagggatgtttgtgcacaatagcatagtaaccatagcgtatgacctgatacaccgtattttgattgaacggctatgagatggtcctaatttagaagacacaattatcctctatattagcacccatgttgtatatgtttaagtgacgaatctctctattaaaagaacattttatagatcgactggagttgagattactcgactcttctcaatttcatcgtttgaaaatcaatctctgactaacggaaggacccgagagcctagcgtccttctgaatcctaattctttgtgctctatcctcttgttctaccatcttatctcatgaaaaaaagcgctattacatccatcttaaaaatataactatctttaaacttaatttttatctcaaataagtcaacctaagacaagtataagggacttccccccctccaaaaaaaaaacaccccatgctacccctagtggccttatcaccccactagcccttaagacccaagccccacccatatcatccttaatctcatcaacccccttgtgtattactgggtaacattttagacatttcgtcgcaataacacaatccttaatttctccaaaacattcttagacagatatattttgggtaaggggagtacatgatagctccatataagtctaagagacgactcattatcgtctctctaagtgcccttctcactcaactatggacctatggatatggtgctatgttgtatacaggcaaccagaaccatgtggatggagtattatttattgtttcagatatcaacacaatctcagtgtatattttttatcactacttttaataactatacttaattacataatgctaccttcatattaaaatataaggagttaggtattattctgcagttccgttgtgtgaagactgatagtcacattgtttcgcttattcatacgcttatccaaatcgcttttcagcaaacaaaaaattatttgggagtaaaatttttatatatgcgtccttagcaactccaaagcaaatattgtaaaataaactatgatgaaaaaaataaaattaagttctaaaatttgaagtttatcttatttttttaatggaatcagcacgagagtgtgctttttcattgaatatagtaggagaaaaaatgcagcccctagagcaaagaaaaggcaagaacaaaaaactgtacactatacaagatgcaggataagctcgcgtagtctcttggcacccgctcacgcccacgtggcagcctcctcttttatttttgcaatgaggtactttgttgtggcctccttgtgctcaaagattctccgattgtgttccttccatatttcccaaacaacgaggaggatcagggtgcgcagccccttcttggggatgcctgctgaagcagcaagcgtttcccaccaatccttgatcgtctgagtcgtctcccaaagccgagggtcgaggtgaagatatcccacccagttcgctaccatgctccaaatccttttggaatatcgacattccgcaacaaggtgcaaggccgtttcatcctctctcctacagagggggcactgcccgttgttctgccattccctgtttgtgagacggtcagaggtccatactctattctggatgatgagccaggcgtgaagcttacatttcccatgcgcccaagctctccaaattaacgggtcataggtcgtgcctggcgcgccaatgcactgagctttgtaggctgacgaagccgagtactgcccatgagttgtgaacttccaagtgatttggtccggttcttcttcatccagctgcatgccacggactgcaatctatagtgccacgagttgttccacaagggtcactgagatttgcgggtttgtctccaaggccaaatctccgacccaggcatcatacgccaaacaatggctcttaaagaagtgaagagggccttctatttttggttttctgtcatcagtcatcacccttctcttttttgttttgtgtgatgctaatcgcgtcactgcgtcgttcaccacgagcgttccatgtgaagtttacgtaagcggtgacgaagcaagtgcccatgttccggggcggctcctctccaccagtatcagaagaactcaggagatagctgttcagtcgtctcgtcagcacgtacgcccatctttgtcagttttctcttggcaccaacgcgcggttatttatgttgaattattcataagctgaatattcttattcatacattcggatcaacgcaaagtgagaaaaactctacctcttacaaatttctgccaaaagtattcactacctgcgcaattattcagagcccgtgctaaacttggacggcaccccaagcaattggggagatgatcaccaagtcagatacgacttattacactagttttcctcgatggttccgctcgataatgagaactgaagtcatttcgattagaccctataaaatgggtggttccggtcttccgtagagcacaaagttttcaggcatctgaagttttggacttgcaacacactctgctttcaagttctgaactagcattctactctgttctagctgactaggtcacacatggctatcaaggatgagcagcagccactgcacatcctcttcttcccattcctcgcgcccggtcatctcatcccgatcgccgatatggccgctctgttcgccgctcgtggcgtcaggtgcaccatcctcaccacccctgtcaacgccgccgtgatccgctcggccgtggaccgtgccaacgactcgttccgtcgcaacaacggcggcctggcgatcgaactcaccgtcgtgccatttccggacgttgggctcccgccgggcttcgagagtggcacggcgcttacgacccaggacgaccgtgacaagttcttccttggcattaggctgctccatgagcccttcgaccggtacctgtcggagcaccacgtcgacgccgccgtggtggacagcttcttcaggtgggccgcggacgccgccgccgagcacggcgtcccgcggctggggttcctcggcaccagcgtgttcgcgagggcctgcaccaacagcatgctgcgcaacaacccgctggagaccgcccccgacgaccccgacgccgtcgtgcccctgccgggcttgcctcactgcgtcgagctgaggcggagccaaatgatggacccgaagaagcggccggaccactgggagaagttccagagcttagacgccgccgaccagaggagcttcggcgaggtgttcaacagcttccacgagctggagccggactacgtcgagcactaccgcacgacgctcggccgccgcgtgtggctcgtcgggccggtcgctcttgcgaacaaggacgtggcggtgcgaggtaccagcgagctctcgccggacgccgacggctacctgcggtggctcgacgcgaaccacgcggctcggtggtgtacgtctccnnnnnnnnnnnnnnnnnnnnnnnnnnngcggagatgcgggagctcgcccgaggactcgacctctccggcaagaacttcgtgtgggttatcaacggcgcggacgccgacgcgtcggagtggatgcccgagggcttcgccgagctgatcgcgccgcgcggcgaacgcggcctcaccatccggggctgggcgccgcagatgctcatcctgaaccacccggccgtcggcgggttcgtgacgcactgcgggtggaactcgacgctggaggccgtgaccgccggcgtgccgatggtgacgtggccacggtacgccgaccagttctacaacgagaagctcatcacggaggtgctcgaggtgggtgtcggcgtcggctccatggacttcgcgtcgaagctggagaaccgccgggtgatcatcggcggcgaggtggtcgcgggagccatagggagagtgatgggcgacggcgaggagggcgaggcgatacggaaaaaggcgacggagctgggcgtgaaggcgaggggcgcgctggagaagggtgggtcgtcgtacgatgatgttggaattctgatggacgagttgatggctcgccggggctccgtcaatgtgtgacagcactccctaacaaggtgattgacggcttgacgcatcaagaagatggtgatcggacattcggacatctccagagtccagactattgtctttttcctcagagttttttttttttggagtaactatatttatggcgccatatttttcatcaaaaaatagtcggtatatatttacattgtaaatttctaaattacatatgtaattttagtgtatttacaatataagtcataaaattacatatgtaagtctctaaattacatatgtaagtataatgtaattataatgtaagtgcaatgtaatttctatattttgcattgaaaattacatatattgattacttatgtgaaagaacgtgccaacgagctacggttaaagcagtgcttcgagccaatcaaatgcaattgatgagaccaatgccaccgaaaaaagcggcgctccagccaatcaaaggcttagaaaaatttcgactgagaattgagaaaaaatatgtcgccatatttatagcaataccgtttttttttctttttgactattctctcagattgtaagggttgtatgaaccgtcaacggtccaattttagtacaggcctccattgataagtttgttctggcaatctggcatgataacctttgtgcaattatcctagattgatcggcccagatattggtatcagccgtattggtcagcccagtccgaaatgtttaaaatttaggaaaaagtacactcaaggtccctcaacttatcatcgagatacaaaatcgtcccccaatagcaaaaccagataccaggtgtctctcagctagcaaaactgttttcttttggtccttcgatagttttgaccctggttttgtccgtcgtggtggctgagtcagcgtgagacccacgtgggccccacatgtcatactaatccatgacatcaccctctttctctcccttcctcctctctatcactcttcttctcctctccgggacttggggcaggcttgtcgacgggtcacgccacgcacgacggcgtcgagcccaggggcggaccagcgcgaggcgacaagcttgacctcggtgacggccacgaggtcgaccatggccaggaaggaccccggcatggcatcaccgagtgatgcgcttcaagctccacgctgcacgcgacaacgcgggagtagagcaggcccagctccaccctcagctcccgtggttccgccgccagccacggccgcagcgccgcctccgcgagcaccatttgtggcggggctagggggctcgtgctcctctctttagtgtcccatggactcgaagcggcggcggaggaaaacccggaggcgagcggtgaagagttctggcgacgctaccagcgccatcgagcgcacatgaagagggaagaggtggggaggctaaccgactccagcggttgggggccctcctccagcctatgctctggatcgatgccgtcctcctcatcacgctgcaccggtcgccatactcctcaccagcagctgcagcgcttcatggaggtgaggttctcgcggggcaggccgctggtcccagcggaggaagtcgacgatgtggaggcggtgaggtgggacactatgtcggagtcggattccatgacacagtccacctccgccgccggaggtcgaacgccgcgtccatgagggacgccactgccggagcactgcgaagagcgtgtggtacctgcgcgccactcctc

SEQ ID NO: 24934 - DNA, 2249 bp, Oryza sativa
ccccccacccgcagctcctccccctgctgccgccgccttgtgggcaccgtccgtctcgctttcgacgccagcgtcaccgccatcaccgctgtcgcgtcgccacctcgcactgccgaccttgctgagaagagagagagagagatgaggaagggagagaagaagggaaaagagagaggaagctggcgtggccacgctaacatgtggggcccatgtgggtcccacgctgacttagccgccacgtcggacaaaaccagggtcaaaaccaccgaagaacctaaagtgaacggttttgttagttgagggacgcctgatatctggttttttgcgattgtgggacgattttgtaactcgatgacaagttgagggaccttcggtgtactttttcctaaaatttaccccatacgttccaaaatactactgtaaatatatttaggttatttagcaaaaataatattaatattaatatatgaattttatattgcttaggacctttcccagcttttgattggttgaaaatgttttgctttctatggttggaatgtgccccggaaatatttatattatgtttaaattcaaatactacctccgttttttaatagatgacgccgttgactttttctcacatgtttgaccattcgtcttattcaaaaattttatacaaatgtataagatataaatcacacttaaagtactacgagtgataaaacaactcataacaaaataaattataattacgtaaatttttttgaataagacgaatggtcaaatatgtgagaaaaagtcaacggcgtcatctattaaaaaacggagggagtactataaatacttgtattttggaggatggggtactgctccaacttggataaattcagtgatgagcacaaaaccaaatacaaactcttattctaaacattctctcttgtacatacacgaaaccgagaatattactaaggattaataacacagaaattaggcgtccatgaagaaaaaaaggaacaactgaactcagatgttccaaatctcaacaccttcaaaaacgaaaagttcaagcacggaccaaaatataggcccgtgtcatggcctttttctcaatggatccagggccggacgcagcaaaacccaatatggatcgatgaagttggggagcggtgtcgtcactcagggcatgtttggcacagatcttttcttgctccagctccacctcttctggagttggagctcagcccaacaatttcagctccactaaaactgggagtggagctgggtggagctctctcacaaaatgaactagagttgtggatctgggtttagacagctccacaactccactccagacccaactcctggagctaaatttaggagttggagatgtaccaaacacaccctcaccgtcagcttctttctttatcgcatgcgtaggctagggccattcatagtgtttgtggcattcaatatcaacatgtcatgtaaaagattcttctccacgtatacaagtgccaaatccttggcgagcccctttatcccccataaggcccttcacggtgcagtgagttggagcgttacctagttctccagctaggccaaaatctgacgtggaggagaaaaagcagtgggccccgtgtctttgcaaggttttgcacatcctagctaggatccggtttccttacgccaaaaagagaaactgtgcgcctctgcgctctgcggtcccctccctaatcctccccattcttccccaaaccgattttcgttggtcgtcaccatccacgcgattcacacgggcttgtagctcaccggccgcgctaccgagtccagcctccggtgaggaaggggagaagccagaggatgggcggaagagaagtgcgacggtggtggcgggaagatgtcgtcggttgcggtctcggaagcgaggacgaccacgctgggcatgggaggagaggagagccggggtcgccgccgtgccgccgccgtcgtcgagtcatcgtcgtcgacgccctccagatcccactgccgtgctgccgtcgtcgagttgtcgtcgtcgacgccctccagatccatgtcgccgccgtcgtcgagtcggcctcctcgaccgccgccgcctccgccgccgctccggatccacgctgccgcctcggcctcctcgaccgccggcgctccggatccatgccaccgcgtcggtctcctcgctctccgggcggcgtcggtgttcatcgtcgaggtggggggagaggggagaggccgccggcggcgga

SEQ ID NO: 24935 - DNA, 6511 bp, Oryza sativa
  unsure (1)..(6511): unsure at all n locations
atcaattaccggtagccaattcggatttaattactaagaagatagccgaatattatatttaattatagaccaagttaagtcgtccaatattctaggatttcgttccgacgattagctcacaatagaaatttctaacctattaattgttacgattgctcgggtaggttagattaaaaacttatgaccacaaaatatttatacccgcaaaatagtttaaatcgaaattgggtttgccgtagttcgcagatagtaaagctaataaaaaggaatcgactttcgcattcgacttttactcggatttaagtgaaacttgaacctaaattcatctaacttcataagctttacaatgatatataattcactatttaacaagatataattatgattataacttaactaatatcaaataattagatgatagttaacctaaatagtgtgccaatgaataaaaaaaatggatattgtacagtagcgtaattatctttaacacgtcttgtcgctgtagcaactaaataaattagttataatcaatccttcaaattaatgggtgtataggaaaatattagtgccatttactagtctgtgtccaaatataactaaatccatgacttataaattatttacataaagtttagcctcatattttgtaactaaaatataaacacacttagatgaaccttcaacttgtctgaggagaataataacttagctagttgtaagtggaccacttaaagttagttggaataatgtcatatgaagtggaatatatatagttcggttgacatccattagttaacaaaacagagccatcttaatcacatatatcgtatagcttctagtaaatagcaactattcagtaaatgatccaatgattaaatattgttgcacccacatacattgtacatcccaatttagatgtatggtatatcaaaaacctacccttttgggtatagtaagctaatgagtctatgacaaacatctatagtggataaaatactaattatagatcttgacctaatataattgtaaattaggattattcattgaaaaattatgtgatgaaatagccgtaaccataatatgattgacctagacaattctaacatacaaagcaagggtaattgttaacctttataatttattttgacaagtaaaatatgtacataattaaaataaagcctccaccaataaaataataatacaaatgattcacagtaattatttgaccaatccaaatccatccggcaacagaacctctagtgtataaccgttctatttagatagatgcatgaataaccatttgctagactaaaccacatagtagccagatacgtatctcattcatactacgttggttagctcctatatagaccaccatgacaacagaaagattaagaaaccttaacccctagcgtgattggaatccattggtagacatgaatagtatattttgttatgcatatttggttgttattcgaatatttttcttgcgtgttatagaatttaattatcgggtagtcgtgaggcaacgtcagcaacttccaggaggtgaaggttgatcaggattatatcaataacaaggactattctgagcaggcaagtcatcactattccttgaacatattgatcccaattgcgaaattgttttgtttataaataaaaattgcatgcaatgatgaacaccctacttgtgattatgccatgccttgattattgtttacccttaaatctttgtaaccatgtttacgtatgagtccctagtcaattatgacaattgcttagaaatgctattctagattcgtgcatactcatatttatcaaatgctatatgcttgggcaattacctttgggaaggtaattgagatgcggcatgtggagacatgagcgccacattgccatgatattgatgacatgatttgtgaatagagaaataaaaactaaacaactgttttcgactggggcggatggaggatttgggtggtatccggaaaaggctagcaccgtccccggtcaattaaggaccgagccatgaagttaaacatgaaacgacccccgtacaaccgtacttctcgaatgggtatagacctagcggattaggtagctgagcggaggcagtatccctgcatagtagtttcttgatgtgtgaggtaggggctctacggtggggcagccattggtagaaccgcgaggcgggtgtctacagtggtgtcgtcatcagtaggactaccatgtgagaatttaaacataattacaacttaatgcaagtgtgagtttttccttcccgggtgcgccagaactcctctcactgctagaaactgtttacgcctagagtgcatgaggatgtaaagttcatggagcgggtactgccgatgcgaggttatcgaaaagctttgccgtgacgcgtctcatgtgttgggacgaggctcatgtgttgggcagtcgcggagtgcgggtaaagtgtacatccactgcagtgtgattaaaccaaatctattcgaatagccgtgctcgcggttaatgagcaccgggacatgtattacacttggctagactctaaattcttaacttgtgtgggatgggatattgcatgatgaattttatgctgatggagccacatcccgagaggagggaaggtggacatcctcagaaaaccatgacgaatcaatggcgggaagctatccttgggatcacaatggatggtggacagaaccgtcgttgtttaaagtgaacactggtactaaaatttgatcagtctatgctaggttttaggcttgtgaaaagaattgtaaaattagctttatgcaaaagaacctgaagccattccttgaaataccctctgtcatatgcattgttgttgtggtggcttgctgagtacggttggtactcacccttgctatttatataacttttaggagagtgttaagagagggggccccccccccccccctttttttggggtttttcccgggggggtttaaaaacccggggccccttttttttgggggncccggggtttaaattccccnccccaaccccaanaaggaatgnatcggnnaagtgcgnngtctttgttctaggtactcgttccccagtcgactgcctgtggcatgttaaccgggcccttatattattttgtcttccgctgttgttctctgatatttgttggcctacctggccctaatgtaagtatttaactcttttagcctaaattcattcgtgatatgtcgtgatccaactatgtatgtgtgtaccaactactgatccagggattggtacggataaacacagaagatttccgatttccaaaatcgggggtctacagagggtgcctgggtagggttgagatttgtattattttctccactgtaaggtgttcaatgtaaaatttatacttatttgtaaattaaccaaaatatgagggctgaaataaaaaatgataggggcttaaacgaaaaaatcaaagtcacccatgaggccatttgcactgtggggaatcaaaacttggacacggtgctttttagcctacgtggcattttaggttccgcaagtgagtagattgcactgctactggcctaagaactaataatagccttgtcagaacgtcaggaaaaacataagagagaagcaaaaagcataagcgagagggaagcaccgagggcaaccttggggaagtatatatcaccgctgccgagctctatgttcaccgccatttccccacatctagctgcatatggagagctcaagaccaaaccgtcgaacggaggagaggacgacagaggcaacttgcctcaatatgcactggtagtagcaccatcaaccaccttcgcaccgtgatacgccgtgccagattgaggagagacgaggttgaggtcgcacagcccctgttggcggtgacctccacgaggaagatgatgccactcggctaccgtctgattgctcgatctgcctgactacaccactgcagctagaggaggatctctgccttctttctcgtccaacccatgccgcctctaagctcaggggggaaggaggcagcgaggactggggaagggagagaccagcacaacgaggggataaggggataatgggtggcctcagttgaatattcgctatattttcaaataagggaaaagatcaaagtgctctttattaacaagaaaatatcattagggatttagggtagatttgtaaaggcagtgaaagaacaaaatttctcaatttacggatcgagtatacgtaagtggatacaaatttcaaaattgatttatttgaaaatagagcgaatattcctgtagtaacctgctttatagacactggactgcttgccagcatcaaaataagtgcggtttcgtctaccaaaagtccaaaatgctgacggatggaattcgatatcttctcgatctgtttggtggcctgttgttttcttgccctatcctatttttttgagaaaaattgtcttgccctatatgctgagatggcctacggtttgggcgacgtacgtcttcgtttaaaaaataaaaataaatgagcaacaatattatcctgataccaacatgcatgtattatttatatatgtgtgtgtttttaataggaacttataataccatagatttgctgttgttttcgtcgctacaggaaaaacatttgcacgtgcgtctgtgtatagtgtgcataactagtggtggatgcactgccctctccccagatttcttgctcctattctcacttcaccaaaacaagtaggaagcgtggtggatccgtgtttttttaatacttctttcattgcttcctattcgtcctgttcattcttcaaaaagaaaaattctggaaggttcctcgcatccgacggttgtatttcatcgtgccagtttttgtcttcatgtggatccaacggtcaatttttttagcttacgtggctcattatcgttccatcatgagattaatttttcacttagagagatgtgcggtccaatccaacctgatcccccagagtcgcagataacataagctgccggcagattctccaccggaactcactactgcacaaatgattttccagtcatggacttatttagattgtagacggaccataattggtcacgtctgtgaaaatatactcattttcgcgtgcggtgagagccgcacgcaaaaatacccaccctctctttcactcctacctactttaaattttccccactttctctcctctccttttctcctctcctctatcctttctcctctcctccccgttctatctcctctcctctcctctacggcggcggcgggcttaggcggcgatggcgatagcgcgcgacggcatcggtggcgcagcgacggccaacccccgcacggatccggcggcggcggccggacgccctctccctcgcgggatcccgctcccctcccttcccaacccagatccggcggaggggaggggcgtcgacggcggtgcggccggaggggagcgcggatccggcggccggccgccctccctcgcgggatccagctcccctcctctccccgtccttccctcccctgatccggcggaggggaggggcgtcagcggcggtgcggccgaaggggagcacagatgccgatggcggatggcgtgaaggccggcggcgcggaggccgccgtcgccgacgatgagggcgggagcagcgtcctcggtcgccgccgccgacgacgacgagaaggacgatgacgaggaggaggtggcggccaggagcaatggcggtgacggattcgttttttttttttgaaattttatttttttggatttttatttttctgaacaggcgacgtaagcacccagaatttattttttttttgtcatggagaaactgaaatgctactgatcccagaacaaatatataaagttttccaaagccaaaatatttaagtatttggagtaggactagcaaaagtgcccgtgcgttacaccgggtgattacggagtgtgtatattgaccataattgttgtttggtttagcaaaagtgcccgtgcgttgcaccgggaagcgcacagatcagaaaaaaaaatgcaattaattaaaatacaaattcgctgaaatatttggtatttttaagtaggtatgtgtataattaaataaatttacaagtaaagcaagtgtgagaaataaaatgacattgttaaatttaattttactaagttctccatgattagttatgctttttggaattttattagaattttcagagcttaattgctaattttaataatacaaacatcatttaataattatttaattggaaaaagaaagaaaatccttccttttaggtttgcttagaaataaacacattcaataacaattgtaaatgcttctaaaaaaatcactaaaaatgaacttctctttttttttcgcccgagggacctaatatagacttatttccggcctgagggacctaaaatagtcttatttccgtcccatgccggtcggcccacggccttatcaaaaccctaaccctaaccctaaccttccccacccct

SEQ ID NO: 24936 - DNA, 5766 bp, Oryza sativa
ccccccagccggccgcctctcccaccacggacgccgcttcccttcccttctccctcctttctcgccggcaggctgcggcggcggcgacagagggctgcggcggtggcggcggcggagggctgcggcggcggcggcggcttcccccacgctagcggcagcagcacctttccctacactagcggcggtggcggcggcggctctccttcccgtctcgccggcacggcgcaacgacggcggggtgcggcagagacggccgtccctccccctctccctctccctctccctctccctctccccgtcggcgtcgacggcgacggcggcgacggcgtcggcttcgtccgagggtggatcctccggcggcggtggtttttttttttttgcaattttttctatcgctattgcctattggtaactgaataggattgtgtattgacgaaaaatggacgaaaattagatgtgacgaccggaaaaatacgaatattagttatagatatataatgttcgaattcaatcaattctggagttgattactagagagtaatgatcaatgcatctttgatactaattccggtggataatctatttcatgagatgaattaattagcttatggaagcacagcaaaatcgaaattaaacaacaattagtttgatactaacaaaaaagcgatgacacaaaaccaaatgccatgcattattcctcctttcgtaactagaatgccgacatcaccatagctgactcacacctcaaatcataagctacttcactacaccactactaaatatgttactaaaataacaaataatctagttcccctatatcgccttttgaaattcgaatatcacccacttgtgcttggctgcgattccattcgattcatatgatgaaaccctgttaatttgaccagcctaattaaaaacattatgatcaggagagagaaaaaaagcagtggcaagaacgcaacattccttcgcgatatgagaatcttttgcagggcttaagttgaacatttttttttgtgtgtgtgtgcagcagcggccagtgggatcacctagatacaattatcaaatcacagccgagctagttgcacatatataagttgcacacagtgatgatagataaaatttagaatagaaaataaaatgaattctgataattggaaaaataaaaataaaagttcaagtaggaatataatttataaataaaaaatgagaatgaaaaatattgaatgttgaaagaaccatcagtataaaacacaatggtagtaaatgaaaataaagtggagagaagcagcgagctcataaaggagcaggcgagtagggtggcagtggttgatgggatatctaaaattataaataaaacctcaaaaagattatatttgatttttagaatacctatgatgaataagaggaggataacaaacatgtcgttgagaacctcagtcacggtggttggcgtcacggtggttggcgggacttttagaagtaaaaaatataaccaatgataatcatttcgatttttaaaatcccactaacattaaagagcggaggaaacgggtgggcattaaaggagtatatttgagacatttgataggacttctaaaaattataaaaacgaaacccgatgagataatgaactctataaactaaaaggtccaatttttaaatgttataaggagaaggaatataaatcgtggtaggttagggaaacaaataaataaaggagtaagggtagtcactgtgacttttaaaaaactataaaattagagactctaggatgacaagatctcataaagtcataagacaacacgatggctattttacatttttgaagtaaaatcatgtgaataaatagataatttagtggttgctagctgcgcaattgtgcggcccacctagctagaaagtaaaaaatgaattccaacaatagttatgttcgatttttataatcctaatgacaataagagtaggcggcagacgggtcatagaggagaatagtggcagcgtttgacaggatttataaaaattataaaaaaacctaatgagacaatgaactctaaaaactataaagtccaatttttaaaggttcgggcttataaaaagtaaaaaaataaactccaatgatgatcatgtttgattttaaaatctcaatggcaataaagaaggcagcagcgggcgagtcgtagagaagtatagtgacaaagttgctgacgttttggcggaacttctagaaagtaaaaaaaatgaacctaaatgataattatattcaatttttaaaatatcaatgactataaagagaatattcaacggatggctatagaggagtataatgatagcgtttgtcgggacttctagaaattataaaaacaaaaccgaacaggacaataaactctaaaaactataagatccaatttttaaaggtttcaaggagaatgaatagaaaatggtagattaaacaagtaaataaagaaggatatgacagaagtaacgggcagcaactggtgtgacttttaaaaactattaaattagaaatacgaggatggtaaggtttggtctttcaaagtcttaagacaacgagataactatttaataaattttaagtaaaacatatataaaatatataattttatatgggtactagccgtgcaattgcgcgggccaccccagctagttatagattaattaggcttaaaaattgtctcgcgaatttgctctcatttatacgattagtttattattaatctatatttaatatttcgaattagtgtcaaacatccgatataacataaaatttaatccttgatccaaataccacctgagaaggctttatagtctccgatgtgcagtccaatccagcgtgtaccccgcagggtcgcagagaacacaggctgccggtagatctagtaactctatgttggccaaaagatcagcagcacgggcacgcagctagccaaccatggctgtcggcgagggggagcagcagccgttgcacatcctcttcttcccgtttatcgcgcacggccacctcatcccggtggccgacatggccgcgcttttcgccgcccgcggcgttcggtgtaccatcctcaccacccccgtcaacgccgccgtcatccgttcagccgtggaccgtgccaacgatgcctcccgtggcaccggctcaccggagatcagcatcacgctcttccccttccccgacgtcgggctcccgccgggcgtcgagagcgttccgggcatctcctccaaagccgaacaagagaagatagccgaagcgttcctgcggtttcgcgagccgttcgaccggttcttggccgagcaccacaccgacgccgtcgtggtcgacagcttcttccactggtcctcggacgccgccgcggaccacggtgtcccgcgcctggcgttcctcggcagcagcctgttcgcgcgggcctgcagcgacagcatgctgcgccacaacccggtggaggcctcccccgacgaccccgacgccgtcgtgtccctgccggacctgccgcaccgcgtcgagctgaggcggagccagatgatggaccccagggagcgggagggcgagtgggccttcctccagctcgtgaacgccgcggaccagaggagcttcggcgagctgttcaacagcttccgcgagatggagccggactacgtcgagcactaccacacgaagctcggtcgccgcgcgtggctcctcgggccggtggcgctcgccgccggcaagggcatggcggagaggcaggacacggacaccggctccggccgccttcgccgacgaggaacgctgcctgcggtggctcgacgggaaggcggccggctctgtcgtctacatctccttcggcacgatcgcccgtctattggcggcggagctgacggagatcgcccgcgccctgcaactctccggcaagaacttcctgtggatcatcacccgcgaggacaccgacgcatcggagtggatgcccgaaggcttcgccgatctgatggcgcgcggcgagcgcggcctcgtcgtccggggctgggcgccgcaggtgctcgtcctgaaccaccccgccgtcggcgggttcgtcacgcactgcgggtggaactccgtgctggaagccgtgagcgctggcgtgccgatggtggcgtggccgcgttacaccgaccagttctacaacgagaagctcatcgttgagatgcttaaggtcggcgtcggggtcggcgccagggagttcgcgtcgttcattgaccatcggagccaggtgattgccggcgaggtgatcgcggaagccatcgggagagtgatgggtgaaggcgaggaaggcgaggcgatgaggaaaaaggtcaaggagctccgcgagaaggcgaggagcgcggtgaaggagggcggctcttcctacgacgatgccggacggctgttggatgagctgatggctcgccggagctccggcacgtcgtgagattgcatccgggcggtcgccggtcgatacatgatataatgaaataatgaccggacagctctgatggttagttggttactgaggcgatttcatcgtcttaggcctaacagcatgtattttctcccgtacaatacatttgtcatttggtgatgggcatgttaatgatggcttagactatactatactatactactctgaagcaaattctctagtacgttgtgactttgagagcctcatcttttcactcatgcttatgtttatttgaaaatttttgaatttttaactttaaatttagagctgagaacacgtatataaaagttttatttttgatttaaattttaattttaaggtttttttcatcgaagtttatttttcagcctttacttttagatcgctaagaacacgtatataaaagttttattcataaattatttttcgtttgcaaatatgttgtttcgcttattccgtgattacgtgagttattgagatgttgacctactttatagcggatccatgtatcaccgtcagtaagtaaattagagaatctcaatcccactttataatatatgagaattttaatgttagacatgacatctaataatttgtcattgaaaaaacttaatttgtcagcatcgtttattttattatgatatattttatcactagagttaatttaaattagactagcaactttgcatatttacatcaaattttctaatgagtggttaaacttatatagaaaaatcaacacatcatttttttaagaaaacataatatataacattatgtggactttggatcactctttcgctgtcatgcatctcaaaataaatataacccgtactagtttgatgatggactagattatgacgcgtctctttaaaacctcggtgtttttagtagacttcataccaccttttgctgtaattttctttaaaaaaaacactaccgaacacttcgtcatactctgtacactatatttctaggaacgttgtatccgtagtgatggaaaaaattcctaagagttttatttcaaaaatatgacatcacacaaaagtggtatgatgtatcacagtatcagctacgtcaaaactgacaggctaggcaaaagttagggtgtgtttagtttgtgaaaagaaaaggtttggttgtcacatcggatatttgaccggatgtcaaaaatggttttcagacacgactgtagcacttatggctaatcatgtaataattaggctcaaaagattcgtctcgcgattttcatgcaaactgtgcaattagtttttatttttatctatatttaatgctccatgcatgtgtccaaaga

SEQ ID NO: 24937 - DNA, 1269 bp, Oryza sativa
ttattctaactaaatctatcctctactttgtttgcgagttattcataacaagggaattttggttcaagttttgttggtactaacacatgtaccatggttttgctcaacacaattgcacattcgccaataatcatgttgataataatgaatcaaatgcttgcacatttgttttggcagtatatgacaaatcagagaacaagaattctgatttcatactgttcacacagaatgaaatattgaggagccgctacacttttttttttttgctaaagaatggcacgtggttaaaaattgttggcctatgacatgtgatgcattatgttagtgttttgtggcaagccaatcgtgtgataacaagccaaacactaggctaagttggtaaacctccttaccaaagatgtggtaaagtgtggctaccaaccaaacacctgtgtactccagtaaaccgaacagctgaccacatttatctagattctagaaacaactaaacaatatttactctgaattccaaatgttccgtgagattgaggaaaatgatttcgagacagatccatgtcctggcattagaaatcatttgattgggctgatgctaaagaccaaaaacattttccttgcatgatgtaggtgtggccatcaattttgtcaaaaaggaagacatccgtatcctgagagatatcgagcagtactacagcacgcagattgatgaaatgccaatgaatgttgctgatctaatttgagtgctggagtggcgctaccatgtttgatcatctggtctggcaacaactgagcttgtttgttgtgattttggttgacatgctttgccgtgactgtattgctatggactttaaagggttgcgagtctaatactagtgattggtttcgttcccctctcttgtgacatgatctgtatataattttagtgccagctcatgtaacactatgattgcatttctgctcagaacatgagacttgttcgttatatttattgccacaaggatttgatgatgattttctcgttgaaggtgtggtggtatttagatcttctgtgtgttgtgatctcaaatgtttttgtcaaagtgtttcatttgctccagttcttgaaagctttgtaatgtcatgctcgatgttgcgattatactggtaaatgggtttattgcacatttgcacccgtaggtaggtaggtaggtattcgttgaagtaagtaaacattattatgcgtttttacgagcttttgtatgaatcattagatagccaaaaaatggggctcga

SEQ ID NO: 24938 - DNA, 725 bp, Oryza sativa
aaatcaccccatagtaatcttggagatctgttaaacactagacctctctaaagcccagggagcctcgtaagcacaaatggtaccttaatttgcttatttaacaaagtaacacatattaatctgaagcgctagaaaaaaaaaatcaccagggcaggatcaacttaacatttccatgcatatttcgtcaaaagagtggcacagtaccctcacgcgcatttcatcaaacaggtcagcgcacgcaaacagaaaaccccagcaacgaaatgcacatatgactcaaacaccagactcacttgtacataacgtcgaacatctcgtcagtgaggctgcggaggttgtcatcgaaggtattgatgcgcttgttgcgagcccgtaggattgggtcggggtacttcacgaccttgagcggcggctcgaactggaggtcagcagctgcatcgtgcacacacaccaccagaagcagcagaacaaaccgggtgagaagcactacaaggcacctctgagcagaataacgcgccgtgaaggcggcggccacgacggcggctaacctgtggcgaagtcctcgtcctcggccggcggcgcggtgacgacggcggaaccgaagccgtggcggagaggcgcgaccgagcccgtgcgggagagtggcagacccgcggaggcgggggccgaggctgaagtgaaggcgagcggccatggtggtggaggactgggcgagtcgccgattt

SEQ ID NO: 24939 - DNA, 2802 bp, Oryza sativa
taattgcgccatgattgacaatgtggggctacagtaaacatttgctaatgacagattaaatagttttaataaatttgtcaaaaagtttcccaacagaatttgtaatttgttttattattagactacgtttaatacttcaaatctgtatccgtatatccaatgtgacaaccaattctaaaaattttccccaactaaacaaagaccttactttcagaatcaatgctatcgcaagttgacatctgtgtaacttaagagtgtttggataatgagaaatagagggtgggattgggattgggaaatgaatgaagggttaggattaaatgaaagagggagaatgaatggttaggatttaaagatgtcttttgatgggtgggaaatcatttccaatttccattagccaaacattgcctaagtgtttgatgcccaaactgtcctcaatacgaggttgtgtggttgaactgagctgtagtcattttcagtaccatgttcgatctccattgaacttaaccaaaaagcaaactgagacacagacacagagagtaaaaagtcaatcgaccaatgaactttgttgtttgcatcctggagcaccaatttctactggcacaaattctacatcatcgccagcttctacagcaatacaaacctgaaccccaaaaaaaagcaaaaggaagacaacaataaatgtctactggcagatttcacttggcgcgagttcttcagcagtttgaccatcgctaaccccctttccttttcttttcttctatctcttcttgtgatgttagttcagaaatctctttttcaatagccttcatttgtcgaagaacattggctccaaagtcatgagctgcttccttgatatgctgcaatgtataagcaatttgttatgtagcagctaatagaatggatcagggaaggcaagggaatgttgattagaacacaaaaccactcatctacaagcaataacatgcttagtgacattaaaaggtatagatgcccaatatgaaaagcaacgaatgtaaaaagcatttccaagttttcatttcagaaagcaacaatttcaatatactttgaaaagtcattacaaatatagctggaagcaactattggtttgaagagaaaaaactatgctgagtaatgttgcatgctctggtttgcatgtaaaaaggtctgaattacttacttcatacaacttaatcttgcattctagctcagcccttttagcttcaattttcacagtccggtctacttcaactttttcaactctgaatgatgtatttctaacaggttttgcttttggattcactgctaactcagacctgtaacaaagagaccattttaaatataatctagcgcaatcaaatgaaataagcttaaacatttttttttagttaccaatctatgcaactatctgaaagcgatcggcggtgctgagatcttgaatgcccaaccgtacttctattttcatcactatggaaagagttgaaataattagactgaattgctcatttcaacaattaattacgcatgaaaacacagcaattaccccatatcaatcttttgaggaggaagatacttcatatcaatcttttgaggaggaagattaattgttttctcaaacaatgtgttgtgaactgatacgcctactataccttgctgtctcaaaaatatcaaatgactcttcaatgttgccctactgagatttcatggaagaaatatatcagataaagtgctgacttactgaaattcatcacaatttattgagttaacttacatgttatctgtcatggtctctatctcaagccttttctgtaataaggatgttccgaaacccatctcaggaagttttaaaaattctttgtaaccctgtgaaacaattcaaacgaactgttagttcttcaagagttagttaaattgaaatttcaataaaatttatagcacaccagtttgttgatgtagcgcctgaaatcacgttcttctgttgcagctttgaaaatcccttctttggatacctaaaacacaacaggccatactcaaaaaaccagaacgcttcattttaacaaggaggcaaacaaaacaatctataacaaatcagatcttcatttagttagttgtgaggggaggaaaggaagctctgatgttttcatgcaagatactgacacaaaaagttatggaaacatagcatatacatggatattttttagggcccttgcccaacctaccagatgccttgagcttaagcaacacctttaacaaccattgatatttttaataaatgctggaaacggttctaacctgtttttcatatattctttcctcaatagtacacgaggttataagcctatagatgatgacattcttctcctgtccaattctgtacactctatcaacgcattgattatccaggctgtaaacaataaatatattaaataagtagtttcagcaaaaacaataatatggaatataaggataaaccgaatacctcggattccaagatggatcagcgatgataactctggaagcattagttaaatttagacctataccacccacttttgtggtcattaaaaatatgggaggcccatctttactttgaaagccctaaaaagattaaaaataaataaatagcatgcaacatataaagtaattttagtcacctgatttgttttaaaatttcagtcacatttgccatctcttccaaacatactcatatatgaaccaagcagaaagaaaagcaatacacttaagaagaaaatcaattctgcactggcagttgcataacaggctcgtttgcccctaatttgt

SEQ ID NO: 24940 - DNA, 3750 bp, Oryza sativa
accccgcacgtcgaagcaaccacttcatcttatgagcgattgatgaataccacaaattccttcgtgaacctcaccgattgcaaccttagcttgatcggcactcaagcacttaaacaacaccccatcaatcgtccgataatagagctcatcatccaacaaagtatacttcaacactttgtaacgcaatttccgagaagccgattgagatggattctgtaaatattgatgtacatcatatctccaatcatcagttgttaatgcagcaacttcaaccctaacatctttgatcatcggcttataccccgatgccccttgggccaaatcattagcttcaatattttgcctctcgagagacatgcctcaaagtaaccagccgaaattccttcattagctcttggcacttctcattataaaccattaatgtatcattcttgcactcatattctcctaccaattgactgatcactagcaaagaatcccccataatttcaatagcattggcttcaacttccttgagtaactgcaaccctttgagaaccgcttcatactcagcctgattattagttgcataaggtttaatagtgtaagcaaactcaaaacttgccccccgaggggaaattataaccaagccgatgccacaaccatgagtgcatattgatccatcaaagaacaaagtccatggcacgacttcaaccgagccgattgaatcatcacgatattcaacaataaaatcggctatagcttgtcctttgactgccttcggtgactcataccgaagatcaaactccgttaaggaaaatatgcactttccaacccttcctttcaaaattggagccgacaacatgtacttgacaacatcggctttgcatatgatagtgcattcgttggagaatagataatgccttaaccttgtacacgaaaaatataagcacaagcacaacttctccacaggggaatatcttgtttccgcatccaagagccgacgacttagatagaacacaaccctttcctttccttccagctcctgaattaagaccgagccgatcgacttctcaccggctaacaaatataatctaaaaggtacccctttctgtggaggaatcaaaactagaggagagataagatattccttaatactatccaaagctttctgttgctctgcccccaagtaaacttttgatgggccttcaatttcagcaatggtgtgaaaggttctaatcttccaaacaaattagaaataaaccttctaataaaatttatcttgccgatcatctcctgtaactctgtcttgttctctagaggctgaatcttcttgatcgcattaacactcgtttgagttacctcaatccccctctcatgaacaaagaaatcctaaaaattggccagccgatacaccaaaagcacactttgtcggattcatcttcaggccatatttcctggttctctcaaaaatcttcctcaaatcggctatgtggtcttctatttctttagacttaacaaccacatcatcaatgtagacttcaaccaaccagccgattagatcatggtatatataattcatggctctctgatatgtagctccagcacttttcaatccaaaagtcattacaacccactcaaaaaagccgattgcaccaggacacctaaaagcagtcttatggatatcttcttcggccataaaaatttgattgtatcccgcatttccatccataaagttcaatatcttgtgccctgaagcagcatcaaccagctgatcggctactggcattggatactcatcctttggggtagctttatttaaatccctgaagtcaatgcacaccctcaccttgccgtttttcttgataacaagaactatactagaaacccactcagcataccggcaaggacgaataaaaccagcatcatataaacgtttaatctcagccttgacaggttcaagcatatcggctttgcatcttcttggaggttgttgatgtggtctaacccctggtttgataggtagccgatgttcaacaatcaataggccgagtcctagcatttcgtaatactcccaagcaaagcaatctctgaattcctttaacagctctatcaacttggttctaaattctgaagataaattcttactaataaatgtcggccttggtctatcacctggacctatgtgaatttcttccaaatcatcagccgacatgaaaccctgtccttgcttgtcatcgagatcatctactgtgtccttggtgtagacgtttgaaccctccatgacgccctcaaaagtttgaaccctccacgatgcctcagaataatagcttgggctctccatcttcaattggttgtatatcagaatcagacacttttagaaaatctccatcccaaactttaccagataagcaatcgagaccatccatctcccaaagagctaaatcggcactggcaacattgactgacctgtcggctggcacaattttaatcttgtcgccttgcctctgaatcaagcattgatgcatggttgaaggaatacaacaattagcatgaatccaatcccttccaagcaacaagttgtaagaacccttcccatcgatgacaaagaatgttgtagggatagttttgttgccgactgtcagttccacattcaaaacccctttggtttctgatggattgccaccaaaatctttgagcaccatgtttgtcttgatgagatcctcaacatttctgctcagcttcctaaatgtagcataaggcatcaaattactgcagccccaccatcgaccatcatcttagacatcgacttcccattgacgtagtcatttatatacaatggtttaagatgccgattctctgtcccttccggcttctcgaagactgcttgttctggtgacaaaatcaacttagccgattccccttcaactttatcgacatcggcttgcttgaccccaaattcagcaggcaaggtgaacccatgttaaccgatgcaatcacaaccccttttcctttagccaatctatttgcttcatcggctgcaggagcttgattcttaacacgccactcccgcttcggcttggtcttctttaaccgatgattgattttttactcaacctcctgaaagtgctccctgtttttcaacctttgacccttctcttctgattctttgtaaaaatactatgacatcattgagtcttcctgccttcattgttctcttggttacaatcttggttcaccgggcccaacctttgatgaacaggaactcttgcttgccttagctgattgcctctattatacgatcggcttgaaccttctgcaacattactgcacccaggacagtcttcaatagatggtagcctcataccttcattccagcaaaatctaaagaactcacagccccaatgaggatcaaaaccgccatcgtcttcttcataatgcatttcctgctgtttgtcatacttcttctgatactttttgataattttagccgaattcacctgaaaacctcttgcacgacctccatcggctgttcgaccagctgtatgcaccatattgacaagaaaaggattaccatcaaccttcatcggcctcttagaatcatcaaatttgattttgcctccttcaatagctgcctggacctactgcctgaagaccttgcaatcattggtagaatgagacccagaattatgccacttgcaataccttctcttgctcaattcttcagccgatgggattgtatgaccagcagccagttgaatctgtttctct

SEQ ID NO: 24941 - DNA, 2392 bp, Oryza sativa
acctttttaaagttcttcctggcttctgcgaatctctgttcatgcaaggttcccttctgtgcaagatgtgataaactatcaaagtcttgagacgagaatttctccctgatcggagctatcataccctgaaaagccaaatcggccaactgggcatcaagtccaaactcaacctggaacatttatttctcatctttctgaccctctgaatgaccccatgcccaggctcatcatgccttggcttaaacgttgttaaatcagataatttcatctgatgaatccccctgtggaaatagctatgaaaatgcttctccaaatcggcccaactgttgattgatccacatggcaaagaagaaaatcaagtgaaagccgatctagacaagccaatgggaccaacctaaccctcaaggcatccacagccgatgcttcaccacactgagctaagaatcggctaacgtgttcataggttgaaatgctatcttgccctgagaactttgaaaagtctggaaccttgaatcggtcaggcaaaggaaccctctcaaaccactggggtaaggatgccgatacaaatttccagcatctttgggcttaagcccgaactattctctcattacatctgcgatcatatcggcccatggtcgttgctgaggtgctccttgtgcttgttgcggcacaggctcgaactgattgtattgaggaacaaactggggctgagccgatcctccctgctgatattgaacttgtggcgatggaggctgatactgataattcaaattgcccccctggtaatttgaaagtttggctgaatattgcgcaccaaatgttcgggaacaacttgaggtaccaccgtttgatctggttgcacatgatgaaccaaatgttctgggacgactctacagcgtgctgcctttgctgattgtcaagtgttccaaacccagccgacgcattcatcaaaccacaacctgccgccttggtggcgtctgttgaatcggctgcacaacctgctgccttggtggtgtttgctgaatcggctgctgctggattgggtcaacagtaggttgaggtggtaagaacatagctgtaacctgatcttgcgttagccgattcacattctgtccactatgctgtagttgctctctcaccaacaactgaggattaactaattgacttagtgccgataatggtgcagcaggtgcgggagccgatactggtaccgtcggctgaaccgatggtgcatgaggaggaattgactgaacagctggctgattatcagtgattaagggccgataattcgggaagacacctcctggcaaataaaccggtcctgtagctttatattcagctatcgagccatcaaccatcgacttcaccatgtttgacaaagtgttaactaatatcccagattgattgatcaaagcatgttgcacggcatagtcaacctgatcctggaagttgttaaactgtagctgtaccgtgttgccatcttgattaagatttccaccttgaaatccctgagaaccatcaccttaaattccttgagaaccaacaccttgaaccccttgagagccatcaccttgaactccttgagaaccaactgtagcacctttatcacttggttgagctgcaccatctggagcttgttgtacctctctatccttggaagaacctgttctgggaacatcagcaattacttttactttatacttctgaacaattgttcccttgcgggtctgcatgaacgagttcaagaattggttacatgcttgttgcatcattgcttcaagatccttctgctgcttaggtgtcaagttgtccagagtgatggtcacgatgtcgccttcatcaacctcagataaaccaagcttctggatcttagatttaacagagccatctttaccagctgaagccggcgatgctggtggtttctcatccatgaggaaacgtcgttgtgatgctgacttgtaatcagtcccaccgggcgtgccaaaagcgtgttgatatgaaaacacggggcttgggagatctgcttaactccagtgcaggtccaaaactcgccttcgggtatgctagcgtgccagttgatttgatcctgcaatcaacaagaaacaaatacaaagaatccgtggttaaatccataaacgatagccgatcggtcaggtgccgatgacgtatcatttatctttgagccgatgtcatatatacatcgatcggcaatcattaataagtaagaaagagataaatttacttgatcggctgtagatattaatgatatataatctctatgtcgatatatacttaaaatcaagtgactgggatagatcggtcgccatgccgagacagtataaatcactttcatcgaaatatatactaaccaccagattatatatgctcatag

SEQ ID NO: 24942 - DNA, 6570 bp, Oryza sativa
tcagcaaagcatataagataaatatggttaaatcaggtaagatcggctgaaaccccgatgctaccgtaatcggccaccaagaagcaggctaaaggttgagattttaattacgactcataagatcaaactcaactgatgcagctataagtataaaaagaaggcaatatctagacaatcaagccattggaagtttcatagagttgtggatatcatatataatctaagccaacgtcgctatctaacctaatcggctgccttctaccgacatatgttagctgattgtagattagatagcaatattgccagagattatataagatatataataacttgacgaattacataaacaagattagagtatcataaagatggaagcactaatcccgagaacgcaagccgccataaaaagttttacctcttgttgaagatcgaaaccgatgcagctcaacccgaaagtaagaacttgtcgaaataaaacgaaagcaaaaagggtggcgatgcgccgagattgtattgaacgtgtgttcgtttgattacatggggttcggggtctatttatacctgagaattacaaaacgtgtccatatcggacacgactcttatctctaacaaactctaagataccataagtctttgtggcagacttttgcccaaacatatgtctaaggaaattacataaaatatcctaattaatagatataattgccttctcaggactctatccatgtgtggcaatcatcttgaagcacgtcaacctaacccgacaatgtatgtcgtgtcacattgtcagattcggctcgatcggctaaccctgtctgactcgatctctgccgaccctagtcgtagccgatttggacttcaaccgatccttactctggttccgggatgattttcatctcgaattccatttcggtttcttcttcatctcctatccttgaattaccaataacaggtttatatatcagcaataagctaacataatacattaaccttaccttaaacttttcaaatcagatcttctacctagcaccatgtgactgacagtgtggtgatgcatctatcgtttgagtgcaggtaggcgtagtggcggtaacgatccctttcctgattctttcctcgtcgcacaacgggttcgtcaggatctggattgtgttggccatatacatgagcatcagagcctttattagcacctggaggtaattaattaacactctatatacattcttgtgcaactgcccgcggttttgctgtctgaataaaattgaccttaatttaaattttgttttcgataatttggaaacaatttctatatgcgcgtaatcgatctaactgaaggttttatgtactatttatgtatgatggaagcagacagggggccatggacgcttcttcgcacatgggcacctggccagtccaaaagcaaaaaatggttttgtttgggggggaaatggtgagatactgatcaagtttgtggttttgatgtgtgatgcgatgattaatcatgtgattagacaacacattatagaacctctttttttgtgcagaaaccaaaaaatgcgtggaatttacgggcttctattggggattctgctatttgatctcaccttgcaggtgttggttagcaagctggattaattcgttagaatatgccaaattttgggttgtgtccgcatatttaagttcgtttttaatctgtttgttggttctatacttagggttgtacctgtccggaggaagaaggaaacagcatggcgaatcttcgttctgaaagggcatgcgtgccggcgggagtgttggtcggatggtggcaacgcatgctttggcgtttggggcggagagggtgggccttgccgtgggtgaaacgatgctgcacactgggctctaggctagcatggcagcgcaacgtcacaatgcctttgtctggcacgctgcgcactccctcactcatttacacctgtggccaccgtctgtccttgcttcagtccttggcctggtttaattgatggacattttgagattgtgttagtgatgatgagtaacaacaagatactatacatcagcggagtctgagactgacaacaacaatggcatgcaaaattcaactcatataaggtgagttggtttgattgagtcgtccattttgcattagttattttttgaattatttctgttcgcaatggtctactttggttatgctgaccgtttagtattgggtacatacttatgtttccaagcaataccaaggtgccattgagaataatctatgttatatgtgattttgtaggtaccgagcgttttgttgggtttgctatctattggatgccttctttacttctgaggatgcggttggttgcattgcatgtatgcctgatgtttgtctatatgtgtatgtacgtgttccgatgcacacgtgtctgcctgagtgttgcgttgcatgtccacgttccactgcagcacctgccgttggggcaatggggcatggacgcgaaccctgggatctcaaagccgtcctagatacttcattctttcgtgcttattagctccctctattttattgtgcttttgcttaataatggaatgtaatttttgtctttgccagtatattagcttatatttaaccactacatatattctgcatctcaatgtattctgtcgcatcgtattaccctcgacgtagttccttaatccgttaagtactttagttgtccctgttctgttgtactatattatttatgaataatatataatgtctttggtaatgtattatcttgtacttaacaagttcaagcatatgtattcatgcgcggcgacagcggcgtgtcgccgcgcttatccttctagtaaaaatccaagttcggaagtcttcggaagagttcggatatggctctagcagctttcttttcttcttttgtaaggcctatactttatttagaatattcttctttatacaattctggtattataatactctccgagtatatgaataccaactttactttatatccgagttatattgattatactgctagcttatttgggagatataatggtacgggtatagtgtttgcttatgcaatcactctgtcatgacgatgatattagagtagtatctggtagtttaggcgtggtgtcttactgggtatcattatttggggttatatgctgcggaagagaggtgggccgctgatggtgacagctcagcacgggtattcctccgcacgtgtatatagtctaagttaatttcctgaggaggatacttctccgtatttagccccggttgtatagtcatgacgggctgtcgtaaggaattcggcagtcaggggtggcttctcgaagtaccaggagggcattggaaagatggtattagctagttaatcttatagctaggatgtatatattatatgtatactagaagtataggaatatattcttttctattttcttttcacctagcttagataatttaatatgagaatgagtagccttatgcttgtgtgtcactctaccctttgcttatattatcccctatttagactatggttattacaggtaatatataaattattagtacagttctctctactataatctttccatgggattaaacaaataccatacacttggaatactctcgggtgaaatgttacaatggtatatccgtgcgcgcttgcggataaaatatgtaaccataatatactaggagtatttctgcaccattgatgagaattatatttctagtaatgttgttaagaaatacccacagttataacaaggtataaacacccaacagattgagacaattatacggatgaactattaatacaatatgtgttgtattcaattgctcttatcgagtgaacatctctgttctccgccttatctatattttaaagatgcgttcgccactggatggaaatagaggcggatctacccattaggcagggtgggtcgaccaactcagctacaactcgtgtcaccctacatgctcatgacccccttatccccttatagtagtcgtgggccatcaaaatttggtataacaaggtataaacatccaacagattgacacaattctacggatgaactattaatacgatatgtgttatattcgattgctcttatcgagtgaacatctccattctccgtcccatctatattttaaagctgcgtccgccactcatggaatcaggggcggatctacccattagtcagggtgtgtcgaccggctcagctacaactcatgtcgccccacaccctcaagaccccttatccccttataatagtcacgggccatcaaaatttggtataacaaggtataaacacccaacaattgagacaattatacgaataaactattatagcaaatttaatagtatagccaactactaactcgaaatcacctatagtcaatttaacagtcaattcatataatagttacatactacactgttaatacctggtctcatctatcatacgcactgtgtcttggagtccatgctacagctggctacaaatctttagtttgttgctattttctcttctcttttatctttataaaatatatttatagctgttattgtacattctcttaatacgatatatgttgtgttcgattgctcctatcgagttaacatctccgttcttcgtcccatctatattttaaatttgcttacgccactggatggaatggcggctcgggaggtggggattggaagctgttgctcgcgttcgtattagagaaaggacgggagtgaaggacggctaaccggcgacgaggatcgacctgcgatggcggcggcgatggtgaccccgatttgggtatatttgctctgattgcgatcgggctccggcgagggcctaattggggtcactgggtttaggggaacttgatggcggcggcatggtggagaatggaaggtgttggtggtggcttggcggcgtgaagcggagagcgagtgcggcgacggtgagtgtcgctcgcgaaggtcgagcccgagcaggcgctagagtggtagagtgaggcgcggtaggtgatgggtagcgctagaggacgggcggtggctcggggagttatttttcgccggtgccgagtgcggagacgaaacggagcggcacgatgggacagggcagagcgcgtgtcggccgacagcggcgcagcagcgagcggtgctggcgcaggggcggacctgtgtacgcgcacggcggcggagaccagcaagatggacgtcgcgaactcgtggctcggcgtgtgaaagcgctattccaggggtggcagaggggctgcgagtggcggcgtggtgtcgggaggtgccggtgcagactgtgcagtggaggtgttgcggtcaagcacggcagcaaagcggcatgtggacattttgtcgaccggctgccgggcgtggggaagaaaaggaagggccgaaggatgtaacagacggtagcggcatgtgggccccgctgtcggtggaggagcggacgcgtgcatgctgcggcccacgggccggtgcggcagagtgggccgcgcgagcgtgagtgcgagtgcgggtgagtgggcccgcggcagacgttgggcaacggtcggcggatgcttggatcgagatctatccgtccggtcgtcgcgtcgttttgagggctgttccgtccgtctagtagtatattcgttcagaaatcccctcttctcccagatccgcctctcgctcccccaagttcgggtgttacaagattatccccggttccttcacccatccattcccggtggcccttgtttaaccaagcctggcaggcttacccaccgccaactctactcacccctaactcccctgccgccgtccttcttcttccttaacttcggcgcagggccgccgccacgtcgcaccggggtaacttcgagtgctcccaaggtgacaaactttctttcgctttacttggcctattttggaagatatcacttaacctcttatttaggagatattacttaacctctttgacgggttcccatgggtttagcttttgaggcttcccctgtgatctgttttttttttctctatctctattaatatactactactagttgtttttttttctccatctctattaatatacgaggcaaagcttttgccctctaaaaaaaatcttggcctattttattcatgcctcataacccgtcacgtttaatcgctcgtcgcctgatccgggccgaacacggagtagaatccgtttcggtatacataaccggatgttcttatgctgggtgtgtttataactagttataagactccatgcatgctacaaggcatctaatccagtcattgctagcatagacagcaccccctgccctgagtatacggtattccacccatatttctgttaacgaggtatatttgctgttgctagtgcttattacgccatggacttgaataccgcaaagagtatgatgctggacgacagcaacatcagcccaagaaagaagacattcacgacacgtaagaacaccatgctgagcataagcagaaacatcaatccagcagaccaagaaatgctcaaaacatacaagaggagaagagtgaacagggc

SEQ ID NO: 24943 - DNA, 6974 bp, Oryza sativa
  unsure (1)..(6974): unsure at all n locations
atttgcatggagagtatcagataatcaataaatgtctcactgtgatggcctggtgttattccaagctgacaccaagttgtatgtgatcaacctgaccacaagtgatgttcttaggttgcctgacaaccaagagtctgatacgctgaggcaggcaactgggctgggtcttgaccctcgcaccaacatgtacaaggttgctcgatacttctaccgttctgtagaccatactattgggacttatgatgcagctatggaagtgttctcaattggtcaggatgccttctggagggagacatcagaggttccaccatacccagttcgctctatggaaagtcccattcactccaagggatatcttttttggaatatcgatgagaggttcctcaaaggacaatcacgtggtttcctttgcttcagcttagaagatgaaacatttagtcttatcccccatccctgcccatatttgccattgaaccatggaacatcactcgtatcagagctagacggggagttatgcgtaggtttattcatatcaggtcaacaacagttatggatgtacaatggcaatcagtgggatcagcgcttcagcattaacgtacccgggccaaatgacttgtacattccattagatattcttcctcatgatcaattacttcttcaaaggggtccacatctgtaccaccacaaccaccagtcaagtgaagacataaaagaagtggcacgcatggatcaactcaactaccagagtcccccgggagaaccctacgtctacatggtgattccctacatggaaagccttgtccgagttacatgtaacatgtagaggagctgatataacataatcatgtaataatatatttggctctgctcaattttgtttgagatatatgaaatcatcatatttatttgtttgttttttatttgttatctcatgaacaaagttgagtttacttttaaaatttttcatggtggtacaatatcatttcttgtaagttctttttaatttacttagtacccctttgatatggaggattgtcatagaaattttgaggatgtaatttttttaaaggaaaatttcctatggagtctgttgattcataggaaagataggacatttttcgtagggttgtattgttatagttaaggcttggggggaaaataagcaagagggtctaacctcttggaaactttcctttgctttgttaatttcctatgatgctatcaaagggtttctcttcatcttttgtacgttttccattcccgtaggacaagaaaaatatgctaattcaatccctacgtctttttttctatcttgcgtttcaaaggggtccttaattggctcccttgtaaatttgttttctgttcattcgtattgctttacaatgacttttcgagtagggtaaactgttttgacagttcagaactggaaggtccacttgtagctgtcagagttacgtggaaccttgtgcttattggacaatgaacactgtataattatccaaaactaggaaaacggatatcaactattattcctcagtgctataattcaggcatacctgactaaaaactttctattcaacctaaaacaggtaaaatgtagcatttgtccatttgatggtcaatcctatgttggtaaaatatagcatttgtccatttgattttttttcctaccattagtgatctaatcatatcttcaccagaactataatagtaattttaattctatgttggtatgtacataaacttggttatcccttggcaactttgcaggatgggaaggtattgcctaatggacctgttgtgatttcacctgatgtttatttccttcattgtaccaggaaggtagcatcatctctccaatatttgcatattcttgatgacgacatcctccactattacccgctggcaaagacgccaaagtcgggcggcgaccgtgtgagcctctgaataatcccaccttgcttagcttgggaggaggaagccattttaaaaggaagagccacccttcccctattggactagtcttttagggagattgggcctttccctaagtgggtgtgccaaagaactgttggggtccggacaaccttaagttattgggcctcggccaaccccacctgggccggattgttatcatttggtatcagagctgggcccctgttaagggagtgggaatgatgaggacatcctccactattacccgctggtaagttattgggcatcggccaaccccacctgggccggattgttatcatttggtatcagagctgtgccgttgttaagggggtgggaatgatgaggatatcctccactattacctgctggcaaagacgctaaagtcaggcggcgaccgtgtgagcctctgaataatcccaccttgcttagcttgggaggaggaagctatcttaaaaggaagagccacccttctcctattgcttgcttagcttgagaggaggaagccatcttaaaaggaagagccacccttctcctattggactagtcttttagggagattgggtctttccctgagtgggtgtccaaagaactgttggggtccgggcaaccttaagttattgagcatcggccaaccccacctgggccggattgttatcatttcttctattatgacctgctgaataatgattagcaatctggtttcactgaactactaggatggtctgtataattggcaaccttaagttattgggcctcggccaaccccacctgggtcggattgttatcatttcttctattatgacttgttgaataatgattagcaatctggtttcactgaactactaggatggtctgtataattcaggctcagcttcgacaaagaaaagtagctaacagtgatcaacaatactgttacttttgtgtactgtaataaaattgttgtttagcatgttgtaatgtttcctttgttcttctcagttatacgaagagcaccacatgagtttaagattgcatgtatggaggtaattctctttaggcagttgtcttatgaggatcgggtttaatactcaatgtgctatgatactatgaaatattatgtgccagtaaaacaagctaattttatttgttagaataagaactatgaggtcttgtttgtatgtgccttttggtttcaattccttagtgaacttaaccgaacaagtccctaataaattatccctcatccgcataccatccctcctatggttaaggagtttgcttattagcttctccatttttaattcttgtatggcatcataccccatatccctcagaaatcactataagacntgcaagaattaagaaaagttgttattgtctcgaaattcctttctaacgggtacatgacaatcttagaaacacacattatttagattcttcgagagacctgaaactccatgttggtatcacagcaggttcttgaaattctttaatttttgttcttcggcagggcatgcactcctcccttctgattacaatccattttattctggatttgtcaacagagatacagataagcttagttacaaaaagatgggaattccaaaagggaaaatctttatcatcaacccgaaggtatgtctattacaccagttaaaaagttagtgatcccatgcttgtattgcctttttatagtcatcctgtgtgcgtgaagggggggagtagccataaacagttctgttgaactcctatacctccttacatacccttatccatgatatgttccctccaaacactcttgttgtgcaggttagcttgtcattcttcccttcttgcagtacgtactttttaagtaatgcatgaaaggtcttctctgccgtagcaattactatggccgacgatcaacgtcgtcccaaaataagtgcccctttcgaattcaaaatttcttcccatcttacctctaatcaccctcccactgccaaacgcacatcatttaataatgggcactatattgttttgttcttaaaccttaatctctaccaaacaatctaaaaggggcacttattttgggatgaagtatttactagctatgtgtgtgaacttgctgtccagaatcccaggcaccaatattttttcttgcaaaattgatgtcagttgatctgatgtggatgcatactgcatagttacagaaaggttaccaagttaagtaaccgtgttttctgcacatggataaaaggccacagagaatatatatatgttatgtgtgcaaacttttcatgagattagctagaccgaaaaacatgcacattcatgttttctttttctttggttctttcatactatcctggacaaactatttttatccttagtgcatagtcaactccagttctatgctgcctgagccatacaggttactgctgggagcaaagggcagctagtgtgattgtgttgtactcatggatggtcggactccataacatgtaaatttctttttgtgctgaactgctgatcatcaatgatgacgccatgcagaagactacaattcctggaattactggaagatgccatctccaaatgttgatctgtagtgtagttttaacaaacacagaagtagataccactagattctgcatcagcataacagtcaagttcgtgtacacaaattatcatcgctacgtcggggttctgtccaatctgtaaagcatctcaggagtttccatatttatggttttgatttgatctccaatgcaaaggttgtcattttttttttttttgcttcgacgaagctctcctgatcatacatcttttagggagtgatctgttatactcttcgttgaacttaggccttagcttgttagctttccaagttgtatcagcagctgctagccagcaattttttttttcctttatgtgttcttgtaggcttgtagctgcaactcctctgtgattagattactctggttcatggaagcaacaggcaacccaaaactgtcaaattacgctgtatgttgtacgagagagaacatcgtacatttcctgccccattttcactttcttgtgctgtatgtaaccttcaatgcctgtagctggtaaacgtttcatgtgctctgttatgcacgtagatggattgggtgttcgacaggagggcgaggctatagatggccaaagggcccgcccggcacggcccgcccaggcacggctgggcacggcccagcagccatcgggccggcacggnccggcccatgggctgcacctctcgcccaggcacggtccaacatctgtgtggacgtgccgtgcccgcccgaaggcatgggttggcccatcaggcccttttttaaaaaagtatattattcatccgtcctctttgggctatttcatatgtatggctaaaataaggccattttccgtccctgctctttgggcggacatatgtatagctaaaataagtctattttctgtccctcctcttcggctaacatatgtatagataaaaaagtctattttagatccatattctttcgtccatggcatataatatgtctatttttactcccctattttttttgtgtatcgggcctagctgccggcccatcgtgccgggccggctcggccgagccggccggcccaacatgccggtggaggggcccaggcacggcccggtggtcgggccaggccggcacgggcccaacctccgtcgggccgtgccgtgcttgggccgggccaaaataccgtgccatgggccgggccgttgggcctcgggccttttggtcatctataggcgaggctgctgcagcctcgccgccccggagcctaggtgaggtcaaacatagaagaggggagactagagataggtttaacttctttcttgattaattccacatgattgtgatgcctctacttatatagagccgacccctaacaaacatcctaacaaacttatctaataaagcctaacaaccttatctaatagagggctgctagggtacggtatcccgtccaaacgagatactttatattgatgatgtcacctccgcctcagctttatccactcatgagtccacgacttagcgccaccctacacgctcacgccacagccagtggaagagcacgcgtgaggcgctaggagaaggacacgacacgagtagtggcttaggtggcaaagttggtccctgcaatagcatgatgacccttgtatcaacaccacattgagaagaaaaaggatggtgatagggaaaggaatggaagggagaagacgagacaaaacgctggtggtagatggctcgccacccagccaagaggcaacaacgtacgttctctcccgataccttgatacctcgtacttggtacctatgggttatcggttagtacctataggtattagttggtacccgagacatcaaccatgataccacaggtaccaggtctgaaacctgtaggtatcaaccatgataccgcaggtaccagccctgtgtaggtatcaaccatgataccacaggtaccatgcctggtacttgtaggtaccagctgagccatggtgatatgccgcacgcacaacatacctgcgcacaatgtcgacgagcagccaatgtctgcagcaccacgttgattgtcaatcgaaacttcagatctagcaccttcatttgtttccccttcatcaccactaacagtagcgtgggaggattcacatcgatcaacatcctccccgacgacatgacaccgaggtggaggccacgggggttggtgcgatccatcgcctcatcgctgacatggctcaagcggatccaataatggaaaggccctaggtatctccagatctggtactggcagcgccctccttgactcattgatggtgaggtgggacagagcaggagggtaggtgagcaagagaaaggagcacaacccattttcaggcttccagccaggtaaggaagaagaggggaggaaggagaagggtggtgccggaagaagaggagaggaaggagaagagcggtggcggatgagaggcgtatgggcaactagaagagcgacaaggagattgg

SEQ ID NO: 24944 - DNA, 716 bp, Oryza sativa
cacagtactagcacgatgctgcaatgcaagttaatctagagccaaaatagatcgcacagtagggggaaaaagtggaaatactgaagtaaaatgtcagattggtgggtaagaggcgtactcacggacggcggtgtctacgatctggcagacggagagcgagatcatggaggtcttgccggtcccggactggcctgggcgatgacgtcgcggccgctgatgatggggaggacggcgcgctgctggatggcggagggcttctcgaagccgtaggcgtagatgccgcggaggaggtcgtcgcggatccccattggtcgaagctgctgatgacctcgacccccggggaggtctcgaaggtgaggttctcgtcgtccatggcgcccgggccgcgccgcgacgtggtggccgccgccattgggggagacgaaaccctagaaagagaagagaactagagaagagatgggggaaggaggtgaggggtggacgggtggtcggaagaggatcttttgactaaagtcacggccgtgcagtttcaatacgtaatatccaccgtccactgccatccaacggttctctatctgctgctttcctttgcacacgtccaacgtggcaacgtctccttcgcatcccatcccagtgtggtcgctgtcgtcgcaggggaggacttctctgcgtgggcttgcaacctgattgaatttttttcatttttagattttttt

SEQ ID NO: 24945 - DNA, 1787 bp, Oryza sativa
aggttttgcccttggcatttgcttttgttgagagtgagaataccgacagctggtactggttcctgaaattggttaaaacaaaagttgttagtatgaggccaaatgtgtgcctgatacatgataggcacgctggcattctgcgagcgatagaagagttgcagtttgggagtatggaacgaggataccctggtgagtgggaagatgtatagagtaggtggtgcatgcgtcatatgggagctaatttcttcaagcaattcaagaacaagatgtacagagtaggtggtgcatgtgtcatatgcgtcatattgctaagttcattgtacatcacatcgatcgtctcgtattgcagcgccgatgggctcacgtccaggttaggcagtcgtatcctgagtttgttatggagttcgaccgccttctgccgactgacgtcgtgtgggagccctacagtgtcgcggctacccaggctcgtgcgccgttgggtctgtccacactctgtaccagggaccaggcgtactggatgactacggttccgatggtcttcgacatctgcgttgagcctcacgcccctttccgcgtgatgcggcagttcggcttccgtcagccctttccagtaccgtttccgacgaccgtcctagctgctattcactggtaagatctttcactacgctttgagttgttgcattaaaatctacatgtccacacatatttgcaccatctgtcgattcacactaatatgacacattaattcgcaggtactcgcgcaagggtgtcacacctagaaattctcgaaccagaatttctaagctgaatgtgcattaaatccctgtccaggaccagccagggtacacaaacgataattgttgacatacagacccacgtcttacaaatataaaagattacaaatgcagcgggaaggattaaagcgagctaaaccgggaaacttgacttcagcagcggcgactccactccacaggcaatccttgacggcagcgacaaaaccaacctctctgcgacggctccaactgagaagaacttcaactctggtgtgagggaaaagagagcaagactgactacccactgtactcagcaagtcataccggaagaggaggtatgatgcaggatataaccaaaggaagctaggggttcttttgcataaagcaggcatttcaaagcagtagttgaaagcagtaaaacagctgtagtaattaatcaatattaaccaatcactgtccaacgctacaccgaattgcaacaggcccaactaaccacctgaactacaccagttcattaagctaaactaggggtgagactaatcacggtgaatctggttgatcgcccataaccgcgggcacggctattcgaatagtttactctggccagaggtgtacaactgtacccacaagacacgattccacacatgtcgccatgccccgaagtatcaccatgatactgcaaagggggaaatcgtgacaagaccctccacataaccctcccctaaccatccacaccacgctaaggtttcacccccacccctcaaaaggcagtgggcggtcccctcttgcgccgcggtgaatccggcagctggacaaccggacaccccggccgacccaactccatcacgcccaccctcgccaccggtgcctaggaaagggtcgagctatacttccgatcaagcagttacccactcccgcttgtggtaagcacggtaagtctcccagggtttcccgtgaaccggtccttaactgccatgggtgcgaccaacaaaaccatgcacccacagcccacca

SEQ ID NO: 24946 - DNA, 2294 bp, Oryza sativa
  unsure (1)..(2294): unsure at all n locations
catgtccaagtctacgatgccaaaacatcacatctttatcaaacttagcaaccaaacatgttatcacaggtgaaacaagattttcaaaatcagctttaaacactcttccatagcgagaaatattcaacacagaatcaccacaagaatcaaaaactttacttctagttttcttaaagtgaacctcaaaatttttatcaacaatttgtgaaaccgaaagcaaattgtactttaagtcctcaaccaaagctacattcttcaattcaaaatttttatttacctttaccaaacctgtagcgagaacgacacttgtagaagcatcaccaaagataatcgattcagtcttggatgccttcttgatagaggagaaccaatttttatcaccggtcatgtgccgcgaacaaccggaatccacgatccacacgttctacttccttgccaccaaagcctacacacaagcagaagtcgaagcctcagtactggggttagataataataaaaatttaagaatccagtactgagacacacgaccagaagatctaataggcatatatccacgtgcaaaatcaattttagaattttcagaaaaattccaccgaggccggtctgaccgaggtacagtggccggtctgaccgggggcctttgtaccggtctgaccgcctttgtaccaccggtctgaccggtgctcagcagccggtctgaccggtcgccggtctgatcgcgggacccactgcggtctgaccggtttcctcgagggaaaacccgattnttgccactttgattttgcagaaccaatctctctctcctttttctgtttatgagctaatctgaaacaaaaaccaacaatatgtccatctttgccacaaaaagaacaagtatatttttcacgatgattagacacattggaagcattaggagatttagcaacacaagcaacaacaggagattttgaatgcacaacattggattttgaagaagatgcattcaaggtagacatgataccagcagatttaaacacagttttgttagtattaggtttaaccaaaatctcacttctagcaccaacacctaacacagcaggaggatgtctagaattatgagcataaggattaaaacctaaatcacggttatgtgtgctaacctttgattgatccaaaatcatgttgaggttctttttaccattagaaaatcttagcaaagaatttttcaaataagaaacctctttttccaaattagcacaattttcacaatctaccatgacacctttgcttttacgacatttagggcaagaaagcacttcattgtttttcacaacatcttccatgtactcaacacgacctaaagcatctttcaatttcatcttattcaaatcacatgttgagcaaaccaaaacatcatgaggttgttttaactttttagcagaaatcatattaaacatcaaactagcatgaaaagcaatttgatatttttgcaacaactttttagttaaaaacaactcatccaaagtgcgtgtgtgcaaagcaaaactacaggcaagagaagatttatttttcaaatcatgtgcagcattaacatctctaatttttgaaatctcattcattaaaacctcacaattttcgcaatcatcatcattaggaataagagattttaatctagcaatttcagatttaagagattcaatgataaattcctgttttctatatacatcttctcacacttcttattcttttcactcaaaatattaatagcttcctcaaaagcacttacctcattatcttcatactctgtgtcagattcaccacgcgccatgaagcaaacatcggagatattcattcccttatcatcatctccactttcaccatctacatcacttagtggctcgaaggcggcgcaaacttgttgaaaagccttcctgagattctccagcttcctctcttggtatgaacccttcggcttgttgttgttgttcttctcatcatctttgtcttctcttttgcctctcccaagcttaggacaatgcgaacgaagatgatcaattgaaccacattcaaagcaacgatttggaccacctcttttcctgttcctggcattattcatagctcgagcaattctatagcaaccaaagccaaatcctcctcctcaatttgttcgagttgatcatcggatgtggcattaaaaacagcaagaaaagaaggcttagatgaagaagcatcaatatccaaagaagaagaagaagaagaaaccaaagcactcaacttataatcaactttccgagaaagaacattcatctcatgtg

SEQ ID NO: 24947 - DNA, 89945 bp, Oryza sativa
  unsure (1)..(89945): unsure at all n locations
tgatgaaaattactcaaagcattccatatctcatgagcagttcgaagatgagcaacacgatcataatccgaacgagaaatcccactcaaaagaatattgcgagctttgcaattttgttcaaactcagtttttaaagcagcagtattaatctcttcaggaatcacataaggataagaaacttttctccaaatatcataatcttcagccataatataagattgcatcttactataccaatgagaaaaatccgttccgtcgaaaacattaggcttagttgaaaacctagtaggagtagccatggcaaaaaaaaactctagatcgataaaaatccaaagaagaaaacaaggctctgataccacctgtaggatcgaaacacaagaactaagccaaccagagggggggtgaatggttggtatacccgaaaaccgaaaactttttgcggaaataaaagttaccctcaatttcgatgagatcggtctaatcggagtagattagccggtctgaccgaagcgtagccgccggtctgaccggtgtggatctaccggtctaaccgccaaaattcgtcgctgcctcatgtcgccgaagccggtctgaccgctgtgtgcccgccggtcggaccaccgcgatgccgccggttagaccaccgaaacctggtgaaacacaaaacgaagaactcttaaactagatgacaactttattgattctctctgtgtttacaaagtgcaccaatagcactccttacaaaaatttcgactaaactcgaaaccctaactcaaaactcaactcaattgctgtcacaccccaatctggtaccgccgtacaacggcacctgactggagcatgtcgtaggaaaaacagcgcgaaccgcttcatacgaaaccgcaatctcagtaccagtcccaggacatagcgctggtacccacagtgacaaatttgaatcattgcaaatccttaacataaatagaggacttatttaccttaacttagcttgcagctcagaacagcccgagaatgcaaccgacgacgctgacgaggaaacaccaacaacagcagcagcagcggaaccaacgaacgaacacccaacaccacaggcgacggctgggaaccaggacgaaaccctaatcttcacttcactttatcttctcttcaggccggaggaactatatatatttatatagagcaagggtgagtactttggtactcagcaagtcacgggaacttaggtgtttaatgcaagcttggaagagaggcaaggttgttttgcaaatcttttgtttgaaatcattttgaaatcactaagtgatttatttctttttaagtttgggtcgaaaaaagacttgcgtctcaaatcgacttaagagatgcttttcaacagctcaattggaaatgtaccgacctcccgggtcagatcattacttctcggctcccagagccatttcacttgattaagcggctcccagagccatattcgtttttgcggactcccagagtccagctgcccagcagcaaagcaatccgtttccactcgggaaacctagtctatgatgcccgcaaacatcccgaatcacacagattcgtttctgaccactcagttcatccatctgccacataggctgattctggttacgattcccataccacaacaacttttcacaaagcacatgcaaacaaatctacgcaatgggaaccacctcacatccgcccatgaccgtgggcatggctgttcaaacagttagttaacctctgcagaggggtacactttacccacaagacacgaacttactccagacactggccggtgtcagaggttcgcgacaaagccttttccaagccgacccagggatacctcatgccacatagaaggatcaaatcctcacataaatataggccattttagacattcacaaatcaactccaaccaccttgatcggtaagtgagcaagcttctcgtccttgccttaccaggaacccggtttgtccgaccccgccccggcgttcccaactattggcatgcgaggtttccctgaacagactagttacttagccagcgtgtcccattccaccttgtggttgcactttgattatgttcgatgagtttcccacaggaatcggtccttatacgcgaatacgggacagtgccacataggcacaacccccgcatcgcgagttttcacaattcattttattttcaaacacaccgacaccacatgtcgggttttcaaggcttctcaaacccattttccaaatttttgacaaacaacggtgtatgtgggataattggtatacgcgcttagagagcacggataccgaagtaccacaatggtggagcgacaagggatcagggtatgtcagcctacaggaagtagtgcgactactgggtaggtccgtcggtttagcatgcaaaccgaggccaagcaagttaagtgtgtgattctaataatgcaagttgcaaacaaaataataatgatttttcaattataggagcaattggtcaaagggtgacttgcctagctcaaggtcttcacggagcttcacgaatcttcgagaaaacccgcgatcgacgaaaatccggtaaccgcaactatacacaaacaatcaaaaacctaaacaaaagaccacaagaaagatcctatttagactaaataatagtgccattaaatagatctcaattttacggaaatactggaagtggaatgaagtcaatcggacgaacggatcgagagatatgaattttggaatcttaactggaatttctggacaaggaaatgatttattggatttttctagaacacgagaaatggtttatggaataatattctcaagaatattattgatggtcactgacgtgcgggaccaaaggaaatgattcatggaatttttggaataaggaattgatttatgaaaaagggaaaaggatttattaatccctttggataagaaaaggaaggagggataggaatcagactttctcgagcgacttggcgcggcccgagaggatttgcgcggctaggccgatcttattaggccggcacgggctacggggaggcggcccaagagaggggcgcagggagagagagggggaaggggagccgggtggaccagccagtgtctggagtaagttcgtgtcttgtgggtaaagtgtacccctctgcagaggttaactaactgttcgaacagccgtgcccacggtcatgggcggatgtgaggtgattcccgttgcgtagatttgtttgcctgtgctttgtgaaaagttgttgtggtgtgggaatcgtaaccagaatcagcttatgtggcagatggatgacctaagtggttagaaacgaatctgtgtgattcgggatgtctgtgggcatcatagactaggcttcccgagtggaagcggattgctttgctgctgggcagctggactctgggagtccgcaaaaacgaataaggctctgggagccgcttaatcaagtgaaatggctctgggagccgagaagtaatgatctgactcgggaggtcggtacattaccaattgagctgttgaaaagcatctcttaagtcgatttgagacgcaagtctcttttcgacccaaacttaaaaagaaataaatcacttagtgatttcaaaatgatttcaaacaaaagatttgcaaaacaaccttgcctctcttccaagcttgcattaaacacctaagttcccgtgacttgctgagtacgaaagtactcacccttgctctatataaatatatatatatagttcctccgccctgaagagaagataaagtgaagtgaagattagggtttcgtcctggttcccagccgtcgcctgtggtgttgggtgttcgttcgttggttccgctgctgctgctgctgttggtgtttcctcgtcagcgtcgtcggttgcattctcgggttgttctgagctgcaacctaagttaaggtaaataagtcctctatttatgttaaggatttgcaatgattcaaatttgtcaccgtgggtaccagcgctatgtcctgggactggtactgagatcgcggtttcgttggaagcggttcgcgctgtttttcctacgacacgctccagtcaggtgccattgtacggcggtaccagattggggtgtgacaattgctctctaaagcgataacgggaagcctcacgctccccctctatttatacatgaggtaggcagcctaaagccatgaaccaaactcatactaagagtcctaaacaccttaggaaaccctctagtacaagaaacaaactttacataaccaatcgtaccaaatttggactccttccaaattcgactccgcgtcccacacgcacacaatacctccatcgtatgccatatggaatctccatcaaccacgtgcatcaactctatcctaagtatcccgcatgatctctgaccaccacggacgtcgtcttatccccaagccgactcccggtccatcaccgcaaatactctcctgaggcatcgagtcacctacacatgaaataaacaaagaaaccatattccaagaccaagctatctccaacttgactcattagtagcaaacaacagtattacatacgtatagtatccatctagaagccataatcatgaaacaatcacggatatccaaacaaacaacccgaaaccgaaaccgacacagcgtcggccggtcagaccgcgggcttgccggtctgaccgcgcatataccgccggtctgactggcaacacctgcccagtctgaccggtcacataaaataatagaacctgtgattcacctgtaaatccaatcatctccaaaaccacttcgtgaataaattccaaataacaaaaccaataatctccaatgcccaattattcatcacagagtaataatcaaaaacacctttgattttacataatcctgtaacaagtttgcaaaaaacatggctatccatttgttgctatctcgttctttcaagtaaatcctgtaacaaattaatctgtctttctaatccacctatcttgttgatgtacttttttttctctcatttttgttatccatttgggcctgcattcacaacacgaaatgggctacaacgaggtctaattacatcaacgtcatcaatgatattattcagaaaggaactaactgatggcccattggtccaagcccacgatcaggacatgattagaatttagaaaggcgccgaaacccaagatttcatttgaactaatcacaacagattgcaacaaaaagcaactgcagattagtacttctgaactgagtacaacagcaccaattaacctactcccaaaatggagatgaatcggactgttcatccaaattcatcaaatttgaaaggaaacgaaaaggggaaaatgggctgcaaattaatcctgcgggccaacagagacatacaaaaaacaacaaggtttctctgaagtttgcctcatcagttgttggagcgctcttaaaaataccgaaacactatcggctcgatcaactcgttgagaggagccagctctgccctgtcgatcaaatggaattcctgcaagtaaaaaattgtgaagcatagcagttagcctaagatgaaaagattcaattaattcaacactgagctacagcaagatttgatggacaaatgtgcatgccttgttttatgtgattcgaccctcattttacaactaaatgcaagtatttaaaaaggaggttgagatcaaactaaaaacatcatcatagcctcatagggaacaaataatgcagcaaatggaatgcttgtgtgtccccaacaactccttaatttttacaaagatggttcttaagaacaaaagttgactttgcatgcagaatgatggatcacaactgctaaagaactaaactgattcaaacaaattaggaaaggcatttgaatgattgcaccaaagacattcctttatttttgcattccaatattccattaaaaaaaacatgtggctcatatgtggtgttccttcaatcttaggcagacataatgcatttgttcccatctttgttccttttgaaaaaaaattgcacatataaggattatcattaatatcattccctcaagatctctgagagagagagagagaagaagaggaagaagaagaattaattacccaagtgaagagcacaaagtgcttgaagcaagtgctgagatgggcctcctccttgagcttgaggatcatctgaaaatgcgagtggtacatgtgggagtacaccctgaagagccgcttgaagatggtcctgatcacctcgcgaaagttttgagggaagggagcccctgcaatttagtcagttacattaattgattgacgatttctccatcaaaactcatcatcagcttaactaatctgctactgtagtgtggtgctgcaacgaacaaattaattaacgattgatcattctcagtcagagattagcttaattaccaatcttttgagggaaaatggcctcatcatcaagctggctctccacccaatccatcaggtactccacgtactttggagcagacacttgaactggcttcttcaccttcattccatcagcccacctgtactcgtacctgcatttgtcaacaaaaattgttttcgttccttagttctcagttatttcagagaatacatctgaaacagtacatgatcgatttctgattcagaaatattcttgtgtaatactccctccttccctaatggcccgtttggttggagggagtttttaggagggattgggagtttaaagggatgaggctattaagtgttttgtttggttgggagacatgggaatttaggtgggatggggatggggaactaaggaaggaactccctccttttcaatacctgggtaggagcaggtaattgggagggaattccttctttactttgtctaagcaaatctcagccatccgtttttattattgacctaatcttcaactaaactccctatcaatttccatcacctctaccaaacgagatattgggattaaaaattaaattctcatcttaatctcatcatcaattccctcatgtaaactcccaatccccttccctcgagttaacaaacaagccgtaaatgtttgacaccgttgacttttttaaacatgtttgaccgttcactttattcaaaaacttttgtgatatgtgtaaaactatatgtatacataaaagtatatttaacaataaatcaaatgatagaaaaagaattaacaattacttaaatttttttgaataagacgaacggtcaaacatttttaaaaaagtcaacggcgtcaaatattttggaatggagggagtatgttggttcgctggatttgtaggagtgaaaagattagaagtgatatctacatactttggtccggcagacatgatcgggcaggtagatgaagtgcagaactccatcagggttccgtacagaaagttcacttggttgaagaagtctacggctgcagatagaggacatcagaattcagagagtacatgttaaaacagcagtgcaattagggcatccacattgttggctttttagccggtaataagcaatacatgctctcttcctacccggtaggaagcattgtgagagtggcaaaaagttaaaatctggtcatacagctactaccgatgaacaagagataaacaatattatttgtacagtgtttctgacagaactcgcgggaaggagtcacgcagcagtcatgggaattttactatcggtgatttttttttagctgggcccaccttattcctctccaacacgcataaacaatgtgaagggtgcgatggtttaataccatctgaccccttggcccacaatattgctgaagtcggcaactaacattgcacttgcccttatatttctagtgcgtcaagtcacgactgattttactgttctttgataagatactaccatattttctaatgtaaaatttaatatctctatatactagtaattatcttaaaatataaaattttgtagtgaaaaatttaggtacctcaagataatatcgtaaaatatctcaaatcaccgactaaaaatgtcaaataagaacagtccagaaaagtgaactacacatgacaacttgactgcatgttgcttcacaatcagagactagcaagttcctgctacgtataggaagtgataaagctctcaatgatacgtgccatactgccagcctttcttccattcgatttaaatagctaaaataatctattatattattaaaggaatagaaaaaggagcctccacgtacgctctcatggcctagaaattctcacattaatcggagaaaaagaaaaagcagaatccatatagaaatacaatttaaaaatagctgaaattcggaattaaaaataaggaatattagaataggagactagagtccatatagaaatacaatttagaaatagttgaaattcggaattaaaaaataaggaatattagaagaggagactagagtccatatagaaatacaattaggaaataactgaaattcggaattaaattaaggaatattagaagtagagtatagagtccatatagaaatacaattaggaaataatagaaattcggaattaaaaataaggaatattagaagtagagtatagagtccatatagaaatacatttaagaaaaaaatagaaattcagaattaaaaaataaggaatattagaagtagagtatagagtccatatagaaatttaaaactaactataatttggaataaaaaggaacctccactttcgctctcatgatctagaaattctcacattaatcagagaaaaagaaaaaacagagtccatatagaaatacaatttagaaatagttgaaattcggaattaaaaaataaggaatattagaagaggagactagagtccatatagaaatacaattaggaaataactgaaattcggaattaaattaaggaatattagaagtagagtatagagtccatatagaaatacaattaggaaataatagaaattcggaattaaaaataaggaatattagaagtagagtatagagtccatatagaaatacatttaagaaaaaaatagaaattcagaattaaaaaataaggaatattagaagtagagtatagagtccatatagaaatttaaaactaactataatttggaataaaaaggaacctccactttcgctctcatgatctagaaattctcacattaatcagagaaaaagaaaaaacagagtccatatagaaatacaatttagaaatagctgaaatttggaattacaaaataaggaatattagaagaggagactagagtccatatagaaatacaattcagaaattgttaaaattcggaattaaaaaataaggaatattagaagagtagattagagtccatatagaaatacaattaggaaataactgaaattcggaattaaaaataaggaatattagaagaggagactagagtccatatagaaatacaattaggaaataatagaaattcagaattaaaaataaggaatatgagaagtagagtatagagtccatatagaaatacaattaagaaaaaaaagaaattcggaatctaaaaataaggaatattagaaatagagtatagagtccataatccatataggaatttaaaactaactaaaattcggaataaaaggagcctccacgttcgctctcatgacctagaagttctcacattaatcgaagaaaaagtaactaaaattcgaaattaagaaaaacatgggaagaaaagtttaaagtcaatatagaaatacaatttagaagtaactgaaatttgaaattaaaaattaaagaatattgaaagatgagtttagagtctacatagaaatacaattagaaataataaaaaatcagaattaaaaaaatattaaaagacaagtctagagtccatataggaatatatataatttacaaataactaaaatttgatattaaaaaaattaataactaacacgtatataaaatacaatatgaatattacacattagtagtttcgtaaagttattgcaaaatttaaaattatgttgtcattgtaatatattttaataatataatgagaaaacatatatgctattttatgagggaaaatataatgatgttaggcacgcaatctgcgcgggccaccatgctagttaaaagtatttaataaaatgcatcaatcttgttgtttcacctacatgcacggtcagattcgagccatagaagggcacacaagaacaacaaattcaattccgaatgtcacggcacctttcgtagtcttatttaatttgttgtttgtctgttctccttctgtagcttgaatttaattcttcatgtttatttaatattatgcattttttagattgttttcacaattatttagattggaatgaaactatgaaagaaacaaggacatattcttcagagctttatatactctctctcttactagataaaagaagtggactttaagccctctaaaacgtgccatcttttcttgcattcaatttaaatagttaaaaacattaaaaacattcagcaaaatagattgttggatcacttatcattgcacagtcatacaaggccaaattagagctacagaagggcacacagaaacaacaaattcaataagtatgaatatgattgcactattcacaatctggttttgttgttctcgtgtgttctctttgtgtaactctaatttaattttgcatgtttgtgccctattatatgacatcatgtttacttttctttacatggttttcatatttatttatttagatctgaatgaaagaagcaatgacccatattcttgagagactaacatatatactttctcctaccatatagaagtacaacagttagaagttagaacaggatccccagatcattacatcagaggttatgatgaaattggtactagttgagatggtagcttactgttgacagcgagccattcgttgagatcttctccaattggcagacggaccgcctctcgcaggtttccgctgcccagggtggcgtcgatgtgcttcttcagcggcaagccctgcaagcaagcatcgcgtttaatttgttggaaactgaaacacttaacagtttcagaactgagcacgcaaaaagctaaaccccggaccaaatacactttacacataatttaataagtactcttgagtggatcgaacctttcctagatgtgtccatttcagccattgtgcatgccaccatgcatgaacaactttggcgttacaaaaaagctagccaactacccacaagggaacaagagatttgttttggtttttaaaaacttttttaataaataaataaatatatagatttttttattaaaagatatatcgacattcttagctagttacatagtacctaacgacaacatgtcgccgcagtcagaattatgctacatgcaaatctatttatatgcatgggtggtgtgtgtttaaacataactctgtcacctatagagttttagcttaaaaacagatagaaaatcggtgcctctactttgatattttcataacatagttattgttttttaaaaaaaaagacgattttttttaaaaaagaagacggataaataaagggacaatatgaaactgagccatttggtaaaactaaaaccctttcatctcccatctcatctcatcccatctttttttttaaaaaaaaaaaaagaaaaaaacacggcttcaccctttacttggttagcctaagatcatggaaagctagcacctgatgtggatagctgtatcaacggtaaatcgtcgtatcatcccatcccctaattactcgttgatccctgatgctctatgtgacatatatatctcccatgcaagaactcggagaaattaattaagccgacgaaaaaacgaacaagaattggaaactatctcgtacacacgtaccttgctcccggaaggggagctcttcttgggcctgaacgtcagctggctcctgcaagcacaacaacaacaacaacaacatcgatatcccacagtcaatacatgtaggagcacagatcgatctactctactctacttccagaagagcaacaggaaaagcaggcaaattaaggtcgtctcctacctggagctccgcccaaacaagctcatcttcttcttcttcttccgctggtggagctggagtagtggcgagagagatggacggatggatggctgcctccacaggcgtggcttatataggcagccgcggatcagccgcctatgtgtaaagtacgtacgcggatgtggacaccacgccgaggaggagaaggaggccgcgggcgatcgatcgaacaggctggcgcggtgaccgttcaccaccgcgcgcgcgcgtgcctcgcgttggggttggggttgcagcgatcgatggcggctggtgcacactcgactcgactgatggatggatggatggatggatgatcacgctctccgctcgcctctgcctctgctcatgtatctcagcttctcaggcaggtcaggggccttttcatgtgtttcctcctttcctcgtcgttacttcgggcttttgatggtgggttttgatggatcatcgatccatcaacagctagcagctccaccccttttgcacttgatgatgatgatatatgatctgcatcctcccctgtccttgctgtcatccttctggatgccaaatcactcccatttttaaccttcatcccctctctctcttttcttttgctaattatttatccgctgtcaagattaatattccttttctctcctgttgttttgcaaacgttatgtttacaggttgtcaagggctcgctagttcataacttccgctaaaactttctataatcagcgatggaggatcatggaggtgggggagtgtcttgtgcgaattacggcgtgtggttatcgttacatttattttacggagggaaaaattacgaattacccccctttctctcgaactattgcggtcattcgaattacccccctgaaccataaaactagacattcttcaccccaaactatataaaccggacgaattaccccccccccatcgacctaaatccacggtgcttttggtctacgtgacatatacatggcagtccagtcagcgttctatttattaaaaaatgtggaacccacatatcatatcctcttccactattcctctctctcttctctctctcactctctgtctcttcccccctctctctcacgcgcacagcagcaggcggcagcggcgcgcacgcacgcggacagggccggaggcggcggcgaggacagcagcacgcacggcgccgcggtgcgcatggcggcacgcacgcggccgcaggctcaaggcctcgacctccctctggcccgcgcgctcgtcctcctcgacgcgccgccccatccacgccatcgccgctgccgcgcctcttcgcgccccgtgccgccgcatgccgtcacgtcgcctgtcgtcgtcgctcgcggcgggccgggcgtggcgttctcgtttgacggcctctgcgacctcatcctgctcatggccgtcgtcgtcgacatcagcaacggcggcgccaccgttgccgtcctgtacaggagggagagggagttcgccatagcccgcacgggcgagcgctcatggcgtctcatcaacaacaagctggacagaatcgtcgacatggcgaggcacggggatggcaagctctatacggtgcacctctccggcaaggtcgcgcgctggaagttcaactgcaatgtctgcaggtcgccgaagattcttgagtcggtgctggtcattgactcgccctaccactacgtcgtcaaggcggacggcaatggcaatgccatcatcatgtctcgggaatacgaacacgaccaccgcgaccgcgccagcgagtgctgctacctcgccggagcaccgcgcggcacgctctacctcctcaagcgggtgtacaagcacaagcagggcggcggcggcggcggcggcggcggcggcacctcgagccccgtccgcgcgccgtcaccccacgctcgcgtgcccgcgtgctgccgccgtcgcgtcgcctcctcgcgccacgccccgccgcgctgtgcatgccgccgtcctcgccgccgtgtgcgtctcggccacgccgccatcctcgccacaacctccggccccgtccgcgtgcatgcgctccgccgccgccccgcctgctgccgtgcgcgtgtgagagagagaggggaagagacagggtgagagagagaagagacaggaagagagaggaatagtggaagaggatacgacatgtgggtcccacattttttaataaatagaatgctgactgtactgccacgtgtacgccacgtagaccaaaaccaccgtggattgggtcgaggagggtaattcatccggtttacatagttggggtgaagaatgtctggttttgtgattcagggggtaattcggatgaccataatagttgggggggtaattcgtactttttttccttttacgagtgtctagtacgaggtaaggcgtgtggttgtcgttacaacaatccattcttttgcgatgccataggctaaaagaattgttcgctatttctgttggtcggtagttgagtaactctagtgaagtggggtaactaaaagggctatacatatggacataatagctatggcgatgacaaaaatactagatacagtaacagaagcacaggcatataacggtaccgttgcccaatgggttgaccggatgacaatcggaaaacgacatagttgataacggaaacaatcgtacaaggtacatttggcatctaattaagttgattacatacaacagcacaaatcaacatatctaccctatagttcaacaaatactttcactcatcactcattctttcattcatcactcaacggttcagattatccgtgtgaaatccaatgctcatgatcggttccacctcccacctcccctctcccttccgcacccctcacctcggttgcgccctccctgctcccctcattcacgcgctccctcgctaaccctaaccgcgctgcctcaaccagtcaccgccgccgccacctcgccctgtgcccttgccacatcgacgttgcgacaccctgcctcatcgccatagtcgccttggagcatcatgagtcggatcccctcctaggtgaatccgggcactcctccaccgcgcaaccaccggccatcgcgcttgccaccaatcgcccattgtgagttcatcgtcgatcctctgcggattgaccggatccctctccactatggtgccatcaggtcgtcatcgatccgtcgagccaccatgccaccatcaggtcatcgctaatccctcatctttccatcacgccgccaccagccaccgggacccctcgcacccgcaggtcactgatcccgcacgccaacaaggtaagcatccttccttcaaccgttacatatagatccgattccttcaaccattgcatagatttggtttgctattctatagttgaaaaaaaaatgcaattttctatatttagcgatggcggatcatggaggtggcggagtatctggtgcgagttacggcgtgtggttgtcgttacatttattttatggagtgtctggtgcaagttacggtgtgtggttgtcgttacaacaattcattcctctacgatgtcgtaggctaaaagaattgttcgctattttgaaataggttatcctgcaaacattatgttacatgttatcaaaggattcactagttcataactttcactaaaatttcctatattcggtaatggcggatcatggaggcgatggacccggagaaagtgtccggtgcgaggtacggtgcagggttgctacggacaaatgctgacaatagaataaaaatacaaagctgttgatgttacaaaaatccattcttctacactacagtagcttaaaaagtgttcagtatctaccctataattcaccaacggtgtgttacatcctcattcctcattgatcggtcaggattgccccaatcaaatccaacgcaccacgttactcccacctcccgcgtactctctctccagcgatacggatcgcccctctctctctctctcctctcacgcgcaatctccgctccgctccgctccttctctcccatcgctccctctctccccgccctctctccagccgtcgcctcaactcgtcgacgccgtcgactcacctcgccagaacagctgaacagcgacggccccattgctctcggcgccgcatcccgcccctccgccgtcgtcgtcacccgcgatccctcctcccttggtacgccgccggacggtttccgttgcgccgtcgccgacgatccctcaccgtcacctgcgatcaccacccccgccccctgccatccgctggtcctcacgccgaccgctgatggtcctcccctccagtaaaggtaaagaagatttctcctgtagtctcggatactgtaacatattgcagagtagattttgatgctatcaatttttttcatcagtttgattaatgaaccgttttcctgggtgaccaatgttgattgtgctattcacacttttctgctaatgtactgagacatatctgctaatcctcctttaccagatcagtctgaacagctgcttcccatacgcaaactgttgcgatgtgcttatggtcgaggcggttgtgaaccaaatcagcacatcaacctcggccttgacacattcagtcgttcagaggtgacccgacctgtgaaccctctactgcttgtgtgttattagtatgaagctttgcatacatgaaccatgtactgcttgtgatttatatatttagccaaagaaatatctgaatgccaaagcaatacatgatatatgcagatcaatcaacggaagcagtggcagatggcactgggcgtgcaatggcaggtgtgcacgaataagatcatggtacgatgtgcatattcgacagttaagtttgaacaccattgcaaattattagttttttcgaagtaacattttgattcctacactgataagctgactaaacaatttagtcatttgctggttatttatattcaaatattgaccatttcttattgtcaggtgatgcttccttttatcaatttattccattttcagtgcaattgtggatgttagaatgccagtggtttataatatagtaattttcaaaaagtttaatctgagataattcatcagatttacttttcatgggcttatcctaaaagagaaaatgttatgctgaccacaaattatatgcaggactgtgaagggctcactctggtgaatcagagttcaagtgaaggattgaggaagggttgaagggagaatttgatcaacttgctttggttcatttgctttggacccagaaattatggttcttttgctcatttaatataatttgttaatcatgcttgaccacttgcatattctgtattggttatttcttccagtttgatgaacaagcttgtgggcatttgttgttttatagaagttcagtgcgtctacatggaggatagggaaccactatacacctttcaacaacctgaattcatgttatatagtgctatgactatgcaaattcatgccatatgactcatctccaaactcatcttaatggtggtgaacagtggcacttcccttatcggttccatgacaatcgtgctgagttctggcaccatgtcaccatgaactctcttcagtggctcctgtggctgttgttgcgattggtgccattcttgtgcccggacgcagtgcataccaaggtatacactaattgctcttctattatattgcttgcaaatcaaaccaaagtatacactaattcctcttccattatgttgcttgcaaatcagcaaattagtttgaagatgtacacattgtatatttgtgtgattagtctcatgtgattaagaacaatattataatagaattaaccttttgtggaagggagttggcatccctcttcctgagatctcaaaacccatgaaaccaggctgcctgatgaaacgctttttaatgtaaataagttggtgatagatttctggagctttcaaatttttagatgtgttttgatatgcggttcaagaatttgtggcagtactgattttcattttgcccaatagtcctcgctggaattttgccgcatctgtctgttatcttgaactgaatcagctggtcttaaactagatcatgttttctgtagtccatctattaattattgatgtctaaatggtagttcatgggccatttgatactattgaaaaaataaatggggcaactcctttgttgtatgcccatgtgtccatttcttatgcttttatatgataaaatttgccgctgacactttggcagaatttcatggagggaactcttttgcagtacgggggacatgaggaacttcaaatggttcatgagatggagctgctgactccctactgctgaactatttttgatctagacctgttgtttctctgaaaatgtgttgttttcttttgtagtatgaggggttgccatgtttgcttgttataacaatgtgcacaagcacaggaattcttcgtttatatatagagcacaattaaaacatttttctacatttatagatgcatcagcaggatcgattaatgagaacaaacatcctaatatctatgtgatttggtgtttttgtgttggaaagcaatgcaaatgcttttcaatgttctcatattattttgagttaaatgcctttacagctgtaaatattgtcaatgaaaaaagaaggatatgagacatctatatcatcttttgggagtgatatgtatttcagtaaaattatatactagaataacatattcactttttattatgtgattaccataaacatttaccatcaccgtagcgttagcacgggcatggtactagtttctgatggttggacaactaaaaggttacgcatatggatatgatagctatagtgacaacaaaataatagatgttgtaacggaagcatgcatgcgtgcatgtaatggtaccgttggctaatggattgacctgataacaatcagaaagtaacatagttgataatcgaatcaatcataggaaatactgctgatatctaagttgattagagacaacatcacatgttctagcggaactaaattgatcactacaacaccgataaagggacacacagtaacacaagccactaatagggcaacatcacgcattcaaagatggcaactcaaggcaccaatagggtagcggtttcacgggtttcaccgtatgcaccacaatgatgagttggatcaactaaaagacaaatacatatgggcatgacagctatagtgacaacaagaaagtatatgtaacagggtacgacggttcaattgaccaatagataaaaggaaaaatatatcattttttctaaaattaataaatcatatttttcgtgaaatgtgttatgcacattttccctataatatgttatccgcattttccctataggaaaatgtccacattaattttatatgttgctatccatccaaatttaatttttatgtaatattaagaagtttttaaggggtaatatgtaaaaattgtaatgagagtatgtggggtggtagattcattgccaccatcatttatatagcatttttttctaaaattaataaatcatattttccgtgaaaagtgttatgcacattttccctataatatgttatccgcattttccctataggaaaatgtccacattaattttatatgttgctatccatccaaatttaatttttatgtaatattaagaagtttttaaggggtaatatgtaaaaattgtaatgagagtatgtggggtggtagattcattgccaccatcatttatatagcatttttttctaaaattaataaatcatattttccgtgaaaagtgttatgcacattttccctataatatgttatccgcattttccctataggaaaatgtccacattaattttatatgttgctatccatccaaatttaatttttatgtaatattaagaagtttaaggggtaatatgtaaaaattgtaatgagagtatgtggggtggcagattcactgccaccatcatttgagtctttttaaaggagtacagatataatctgtaattcagtttgtcgacactttggtgatgctatataggagttcgatgaatgtacatacgatgcaataaaggaagaaaagtaattaacttttgtactactaaattttttatgcaggtggcgtgcaaggaagataaaagattactagcttccaggttacggagtacacctggatggcgacagctatgtatgatttggatttgttgggcagttcgatcggattagtcccggaaaaatctctcaatccctgcaggtgacagccagcatatatatgcgaccgtgttctaaggaaattttcagacgacaaatctgatcatgcactgtggataattaattaaacaccttaatttcataagaaattttataagaatatggcatagatttcacaggaagtatctttctttgccctgagcgattcctttcaagaaaaaaagaaacattgccctgaaagcaaagtactttgctctctagttttcagagaaaaaagaatgacacttttatctagtgaaaaggaagatagtttcatatgatgggattcatgcaatggctaataaagactgcaattatatataagagcaagtttaatagtatagcccactactagtttcaaaccatctatagccaatgtaatagccaattcatacaatagttgcttactatactattaatacctagtttcacctattatacacacgttacgtcttgaaatctgtgttgcagctggctacagatctgtagcccgctgctcttctctctcttcctttatctctttaaaatatgttggcttctagcctgctattgtacatgctctaagttctcctccgtccacaaacgcaatcttctcaaattatatacaatgaaatcattactctagctactttggaagaattaacaatgttcaatatggagtacctcctctgtccctaaatatttgacgccgttgacttttttacatatgtataaccgtttgcctttttcaaaaaatttaagtaattataattcttttcctatcatttgattcattgttaaatatacttttatgtatacgtatagttttacatatttcataaaaaaaattaaataaaacgaacggtcaaacatgtttacaaaagtcaacagcgtcaaatatttagaaacggagagaatagatgacaaagtcatctcaaggctaggaaggctgtgatgatattgcgctttctttgctaattaagcagtcatataaacaaatgagtcccaaatatataattaaccaccaatattaacttattttctgtttgcagcagcagcagcagctccaacacttgacagtcctaaatattcagatctgcgctttttctgatgattgtaacaccaggctgttcgatgatctcatgttctcatgctttcttttccctgcagatatcaaatgattagaactggattattggaaggggaacgtagtgacttagatttttttagctccaagttgttaataaaccagaatctaattatgatcatgattgtattgtccggctagctagaattgcataaaacttcacgggttgcagagaacctgaaactagctaacatcgtagactctagacaccaagtccacgacactatttgcatcagaagccatacacgtgtaaagatgatttttttctttttttttcggggatgatgattttagttaagtataaggccccattgtttggctttttccctaataagccaagggaataaaaataaatttataggtaaaacttttatatatatatgttcttagtgacttaaaagccaatactgaaaaaaaaaactacgttgaaaatatctcaaaatcattcttaaaattaagtttgaaaatttaaaatttggctttttctttggcttattagaccatccgatggagccatagtcaggaagctagctcacaagtcacaactagctaggcccttgtttagttcccaaccttttcttcgaacttccaacttctccatcacatcaaaagttttctacacacataaactttcaacttttttttaaacttttaattttagtcaaacttctaattttagtgtggaactaaacacaccctaaatcattatttggatggctaacaaatggatcaaaggccgctaattcagcgagttaagctagcggagagtcagtgccttcttcttcttgatttcagacacatctttaattagtttgagcatttctttgttctctcttgatgatgggtggtcaaatcaaagctcaaaataaatgagcaataattatataacattatatatttgcatattcttcgtgggttcatgatggtatataatgttagctcgctggatggaccagagcaaatcagcctagctggatggcagttgtgactttgttattttggtctgcggcctttttgttgcactgtgctaactattggaagattttgctccctttttgttttcttccccctcagaaggtggtggtttaaggcccggtttagatggcgaaatcttttgggatgggccaaaaaattttggcatagggccactttttgcgttttgtgaactaaacgaggggcaaaattttttggcagatgtgcagtaactgttcacccatggacgagtagtacccctcaccctgctcctcgtcgctccaccaaaatccccaacgtagccgcttgccccttcgttcgtcccactgccgccgcatgccatccctgacaccgccccctcccaaatcgaccccctcctcccctacgctcgccctccctctctcagccgcctctcgccctccctaaaacagccagccgccgctcgccgtccgtgagacccctgccgcccagatccagcaggttctgctgcttcggcgttcgtcgctcatagcggagccacccgtcgtctctcacaccgctgccgcccagctccaattcttccaccgcttgtgtggtcgtccctcccccgccgacacacgtcatccctccaaccgccgccgcccacccttccgattcaccgttggcacccagatccgccttcattcccgcaatggccagctacgggggtggctacaatggcgacgaaggcggcaacggccacgacgacgacgtgtacggccacgacggctgcaccaaggacttccttgcgtccgggccttggtgcgcacgccaagggggcgcggtcggcgctgacgcggcgcatcccccgcctgattcctctagcggcaacacctcccgggtgcggttcgagtcgctcgacctcaacgacagcgacagatggccggaaatggctatgtacgcgggcatgctgcaggccgacgacgacaacatcgaaattcctccaccgcccgttcgagttcctccccggtgaatatctcgcaacctcggaatccggcccactcacagcgtggggggaggaggagtacaaggcgcggccgccggaggaggacgagcaggggccgcaagcgctggaggaggagtcgcaggcgcggtcgtcggaggaggaggcgcggccgtcggtggaggcggcgcggccgtgagcgcacggcctgcatcacgcgcatcagtgcgccgcaatgtctcagaccttgcggccgagcactccgatgctaacgacggtattccggtacgtacaacaattccaattacaattgattgcctgcttccaactagtttaaaattttgttaaatgcaaacttagttcacatgttcggtgttgttttccataactattgatgcatttaggttaggaaagataaggcaaattggtcagcgagaaatactcgcaccttctgttccatctggtgccatcaaatggacataggaaactatgttcgcggtattatgcaaaaaaatggctggagggacatcattaagaggtacttccaagccactggtttagttcacgacagggagcaattcatggggagacacaggcaacttaggaagcaatgggcattctgtaataagctccgctccagctctggcttagggaggaaccctgatgggacttttgtcgccgaggatgattggtgggctgccaacaccaaggtaaattggtcatgtctctctaatgttgtgaacacatgttaagtttagcaggccatgacatgtgctttcgttggacagggacatcctgattggaagaagtttaggaaaggcttgcctgaatatttgcctgaaatggacagaatgtttgagggtgttgcagtggatggttctatatcctttgttgcgactgctgaccagcctgtagagtgcgacagctctgatgaagcggatgatgatgaggacgacgatgagctgactcctcttagtgtcggcaacaaaaggacaagcagcacgagcaccacagcctcgagtccaagtaagaagtctaggagtccagcggtgagggtaatggacagaaacatgagtgagtacaacgaaatttcagggaacaaactcagtgtcctggagaccatgttgcaagtaaagtaggatgctatgcaggaagaacgcaaagctattgagcggaaggtggcaaaggttaacgagctggcaaaggagtgtggggtaactccctctgagaccccaacattgttcatgggcgtcctcgaaatcatcaagtatcaaagtgtgatggacttgttcattgtcactgagcctgaaggaaggatgctcatcatcaagaaatatgcaggggtcgacaactagtccagctaatgttttgtcatggctatatttcctactttatgtactaatggccgtatgttcactcggatgtatggtgcatgtatttgtgtgtttggactatgttcctgatgtgtgttatttaaacatcagcatggtactactattaatgaactctatgtatgctgctgatttgaactatgtaatgcatggctgagaaagaaatgcatattaatcatgtctatgtatttttcattgttaatattttgcattgcttgttttgacaggatgatgaccaatcaggttatgtggaggatgatgaccaatcaggttatgaggagtcgcaccgtcgacttaagcgttgggaggatgagatagacgagttaatcattgcattgatggatgatgatgacgacggttatgtgtacggtatgtaccggtatgccattcacattgacaagcatttgactagagctgagtacacaacctgccatgactggtttggaatgggtacatagaaaacttggggacagaaaggcctgttataacatgtttagaatgagtccaactatgttccttcgcctgcatgatctattggtacagtcgtatgagcttaaatctagtagcaagtcaacctcggttgaggcacttgcgatgtttctttggatggttggtgccccgcaatctattagacaagctgaggacagatttgagaggtcaatggggactgtaagtagactgtttaacaaagttttgcaatctatcatcaagcttgccgttgatgtcataaagctggttgacccacaattcacaacaatgcatacaagactgaggaaccgtaggttctttccctacttcaaggattgcataggggctatagatgggactcatgtaccttgcgtggtgccaagtaacaagttggtgcagcacttgtgctgcaagggcatgacaacacaaaatgtgatggttgtctgtgactttgacatgaggtttacatttgtactagctggatggccaggttcggtacatgacatgagagtatttgatgatgcccacacaacatacacccatgtgtttccacattcacctacaggtatatgctttaatggtacttgttccttctttgttatttgaaatatgtcatactaactcatgtttgatgctgtagggaaatattacctagtcgactctgggtaccctaaccggccaggttaccttgctccttacaagggaaccaagtatcatcttcaggagtatcgcgacgcccctgaaccacaaggtaaggaagagaacttcaactatgcacactcatctcttaggaatgtcattgaaaggtcatttggagttttgaaaatgaagtggaggatgttggagaagatccctagttatgatcctcgtaaacagacacaaattataattgcatgttgtgcgctacataacttcattaggaaaagtggcatacgtgacaagcacttcgatcgttgtgaccgtgatgagaactatgtgccgccacaagctagtgccgatcaacctaagaccgaagaagtgtttgatgattgtgatctgatgaatgcatttcgtgattccattgcacttgctttggtacacggttcttgaattttgtttgtcatttggaacatgcgtatggactgtcatgtatgcggctgatgtgtatgtttgacaacttatttgtggatttctattgcttgcataattgttgactgcatttgtaatgtgctactgttatggaggatgtaagccaagagatttatgttgtatgtcagtatgtgtgtgacgtcgcatggcagctgtgtttgctgtaccatgcatgtatgccaaattcattatttgtttgcagcaacagcatcgcccatgaagcaagtttgaaagtcagccatgcatgcatggcattaaatatgggcaattcaggaattctgtgtcaggggcccaaaacttcttgccaaaactttctgcatgtttagttcccaaaatctaaaaactgtgcagttcccgaaaatttttgccttgccccaaaaattttgggcaactaaacacggcgtaagtggcagtggttgtgctatctctctaatattcctggactgtcagtttcccaccattttgggcccaaatgggactcagattatgtgctggcccagcacatcactagtgtttagcacaagtggatacaggggtaatctgctgcattataatctgtacctcgctagtgttaaaagctgtgttcgggaggcatatggttcccaaccttgcctcccgacacggaaaacaaagcatactattatagtgagattaattagtattagtataaaaaaacatgaaaaatggattaatatgattttttaaagcaactttccaataaaaaaacttttgcacaaaatacaccgtttagcagtttgaaaagcgtgtgcgcggaaaacgaaggaagtgagttaggaaagagggggaaagaacacagccagttccaataggaaccgtgcgcacggaaaatagagcgatccattagcgtgtgattaattaagtattagctatttttttcaaaaatgaatcaatatgattttttaagcaactttcgtgtagaaactttttgcaaaaaacgcaccgtttagcagattgaaaagcgtgcgcacggaaaacgagatgagagagttgggaaaacagagtaggatcccaacaagaacattgcccagtgcccatagaaaacagaaaacagagcagcatattagcacgtgattaattaagtaatagctattttttaaaaaaaatagattaatttgattttttaagcaactttcgtatagaaactttttgcaaaaaaaatacatcgtttagtggtttgaaaagcgtgcgcgcagaaaacgaggaatagaggtttggaataaggggtgccgagaacaacctaagttgctacttttgtaactctaaagagtcgatacattgactgtctcatggcaaggtacatttgaagtgcatgtttctttactttcagaattagccaaccccataacatggctcatatgtttggaaattggttgaatggttttgaacctagacttaaaagataaatttatatgggcattgcggcaattttgtgggttttatggcttaataggaatgatgtagtctttaatggctccaatccaatttctttcatgcaggtaatcttcagagggactcattgtgcaagactttggtcttgctttttaaagaggacgatggagatgccatccaagttcattgtagaattttggagacacgagtaatggagttttatgcaacttatggctgaaattttagaagaaggattgaagcttagctttctatgattcttaatatgggttatatctttatgtgatattgcccatgtatcgggatgagtcttatgcaaactttcgtagctcgtgttgtccctcatataacttgatgagtcttatgtactcttggaaacttgtttggttgtgtacaccctctcacaggtgtagaggctaggtttaatataaatccattatcttaaaaaaaaattggaaacaggggtggttttgaggctaatcaaatcagatacattctacgacaaataaggataaatggaatttaaatcaacaagcccgtctagctcagtcggtagagcgcaaggctcttaaccttgtggtcgtgggttcgagccccacggtgggcgccttctttttttaatttcttttcacacccgtttcatattttgatcaatacattttgttccacacatttttcttaccatttcatcttcttctcacttaacattttgttccacacattttttttcttaccatttcaccttcttctcgcttaataaaacatttcgtatttttcttctcacttaatataaacatttcttgatcaatgcattccttttccacacctttttcttacttaatagaccatttcgccttcttctcacttaataaaacatttcatattttgatcaatgcttttctttcacacacatttttcttagtactacatcccctccaaaatagaacaatctaggatcggatgggactaatcctaatactacgaccatttcatattttgatcaaatgcggtgtgtttagatttatttaatctgctccattataatctgtacaatatataaggaaatggtcatctgactacgtcagtaattcttcagcagctaagcttcaacgtacgccttctgcgcctacttaatcgatgagatctctcttcgtgccgatgatccgactcgcaggaacacacgaccagcaaagcaatcatcgatctttctcaactctcaactctcagctcgactgattcgattccacaatgatccatggatggatgccgctatcagaggagccatggcgcgaactccaagtagtcgtcgtcttcgtccccaagcgaagaaggcacctcctcctcctactggtggtggtggtggtggtggtggtggtggtggtcaccgtcgtcgtcttcctctgcttccagctgccccagcaacgcctccaggtcaacagctccagcctcgccaccgccaccggcgccgccgagctcatagccaatcggcatcggcagattcggcaccgctccggcggcggcgttaccgtcgtcgtggccgccgccgcgccacgggctgatcaggaagccgtcgagtcctcccagctcgatgtcgtccaagtcaaggtcgatacagacggccggcaccggcaggtcgtcgtcatcctccgctccggccagctcttgctgctgctgctgctgcaccgcctgcggcgtggccaccttatcagccgccgcgtctcccggcgcgccgctctccggcggacggccgccgtggctgcaggcgcctgcctgctgcaccaccactatcccgctgctgctgttgttgttgcaccgcagcgccttggtccggattgggctgacgacgaccgtgcggggctccggcgatcgccggcgtcgtgcagcagcgccggcggcgtcggcattgctgctggtggtggccgccgccggcatgctggtggcggcggcggtccgttgcatggcgacccgcttgctgagggtgctgttccagtagttcttgatttcattgtctgttcgccccggcagcctcccggctatcagcgaccatctgcatccatagttccatacaagtcttaccaagttttcaaaattgaagcaatttcgaccaaatttgaaaaagaaaagaacaacacaaaagttttggttcgctacgtattgcagatctacagcagtaaacaagttttaagtatagatggccatatggcccgaggcccatggcccggcccaaggcacgccattttggcccagcccaaacatggcatgacccgactggggtcgtgcccgtactagccagatccaacaaccgggccatgcctgggctgcaccctaggcacggtgggttggcccggcacaacaactatagggatgcaaatagacttaattaccgtataaggcaaggccaaaaagaagaagaatacaaaatagacttattttccagccatatgaacacagtcaacagagttgagggataaaaaatatactttttttttagaagcacaatgggccgtcgtgtctttcggactgctgtgtatgcagcccgtgggctggcacggcacggcccggcgtgtcggtcgggccatgccgacctgattaacctcggcctaggcacggccgtgccgtgccgcccatttgaccaactatagttttataagttccctcgcttcgtactccatgtgtcgtaaagtttcaggcctattattatttttaatatacggtcttcaatatttgaccatctatttatttcataatacgtaccaataactataaaattagcataagcttttaaaaatacgaatataattatatgataggcatcacattagatatagaaatggataatataaacatagatatttgaccatatatttatttctcattttatcccctttttgtttttaagagtccaattgtcttcatactaatttatgttagcaggtcgtagttgtaaaatctcctctctttttttctatgatacgtaaggcttttacgtgttcgtaaaataattattagttaaaagttgtctagattgatttttctaaaaacaaggacgtctcgttaaattgagacggagggggtattaagttgcaatgcacaatgtgagctgcacttttccatatgtgaaagcacaatgcttgccacgtctgagagaagtggttgtgcattcatcatgtgctcttccgatcctaggcaaaaactttgctcttctttcttgtgtgagtttgtggctttaggtgtatatatagaagcagccttgtatgattccatctgtcatcatcaactttgctgacctaattactcttttcagattaccctaatctggagagcagagactgcactgacaacaaaaggtttgttcttctagagagacagctgatctggaaaattgtgcaggtggtgactgatttgggtaaaagtgtgcttaggtggttctgttaattggaggcaattagttgttggcttagtcatggctgtgttggcctactttgtctgtttctcatctcatggagcagacagatgtgtgatatctgtcatcaaaccaagagaaacgaatagaaagcttcattccatcatgtgctaaagagagcaagctagttactagggagatgatcatgatgagtccataaccctaatatactgatgtgcaatcttttaaaggaccctctctacatacgtctagcaataaaattctcggtgatattctcagaattcttgatctcattttggggaaaaaaatgattccttgtcagagtattttaaagaaaaacatttgaattttgaaaggaaaacccaattttgaacaattcagatctaaagaaattgaggggctgtttggttcgcgtcttgatgcttgcatgcctggccggagcgctgcctaagctccaacaactacgtgtttggtttgtgccctggtgtatcctgagctagcctgacctgactcttcattagcctgctaaatcctcaggcaactttattagcctgagccaggccatcgaatttggatgcctgagcttcaggcagctactcttaatgatgcatgtgtcatttattctatgctttgctctagtaaaagttgctttttgatattttattattcttcaggtatgtgcatgaaccaaacacacaaagcttcaggctgcctatgaggcaagtgttgcatctcccaatgctgcctgtccggcgtgagtttttctcaggcgtggccctcaggacacgaaccaaacaacccctgagtaactgcagcatttttgtgggagcagaaaaaaaatctcggcgagattcatcagaactatggtcatccgccagtagtgatcatgtccttgtacgctctagctaaaattcattcatttggctcgcaagaaaagaaaataaaatcattcatttggcttgaacactagtgtcaggctgtctgcaatctgcatgttactgttcccctagagtttagcatcggagtttggctgatttagaacggacttagaaacagggcgccaaaaaaaagagagagagagagagagagaggagagaaacaggattttactgaacaagaatgcatcatggctgcatcgtcaatttcttcagcaacgcaggaatgcagatatgcaggcatgcagagcaaagcagtcctatcaagtatgcaaatcaatcactaactactccagtacatacactgaattggcgagttaaattactgataagcaagcaggaaatgaaagtggtaggccgggctggattaatttgcaggagaggaggagaggagaggatcagagacaggcctgttgccgaggagagtgtggagcctgaggatgagctcctcctcgtcgccggagatgttgcccctcttgatccccggccgcaggtagttgagccaccgcagccggcagctcttcccgcaccgcttcagccctgcattgcattcatccatggcgatctcatctcatcacttcatcagctgttcaccaccgatcgaaggcaaagctagagagtagagaggaggaggaagaagacgacgaccgaccggctctcttggggagggctccccatttgccctccccgtgcttggcgatgtaggacaccaggatgtcgtcctccattgccgtccatgcccccctgttcagcccctccttggagcagcacggcttcctccccatccacgattgctcgatcgatcgcctacaaacaatgccaatggcggcagcgtctctcttgctctctctctctctctctcttgttgatctcaagcagagagcaggagacacgtctggctatgtcatatgtagtgactccaatttgcacaaggcattccgttcttagatgatgtggttatctcaaggggatggatttggtcgtctcaattactccactaaccagatacaatcattggtgccgtggttaggggcggatctacagtataagtgtcggtgtcaggcgacagactttcggcaaaacctattgcaaaacttcttatccatatactataacactataatctaggcataattaacatattatgacatcgatagacatgccaacgaatcgattttctggatccgtagtagctttgatttgcagagtgaccacatacagattctgaggttggcattcaccatcagcggttaataccaaccaatttaactctttaacccaactgttcgtgccttacgcaaccgaccactttaaccaaacggcgcctggaattttttagggaatcttctttaacaaaactgggaaggtgacctgtatgcgcgggtatttgtacggttgaacttaaaattatactccacccgttccaaaatataagtatttttaaaatagtgtcaattcaaacatttttaactttgactattaatagaaaaaaaataaaaagatcaatcagttaaaattaatgttactagtagatttatcattgaataaactatcataaaatgcaactccctttatttaaaacatcttacttttatatatattgttaaccaaagtagcatctaaaaattatgtcgaaatccaaaaatacttatattataggacgaagagagtagtttgtttctatgatcatatgatttgtataatggctatttgagggtataaacaaatcaattaacttttacaaagttgagaatttgttatagaaaagtataccaaaataattatatagtatttttcacgaaaagtatcatagcttgggaagcgtgcaaataaaaatccaaaatctagaataaaaaaaataacagggtcttagctaggctcccctataacactcttgttttgataataggtctagtgatattggttaatattttttttcacttacgtgaataagtagtactaaatataaatacaccctagtacattataattaggtaattgaccatctgttttagctcacacgggtttacatgttgtgaaaaatcaaaccacgctggttaattcttctctctgtgcattacccttcaatttgttttgacgttattaacaaactaaacgttatactttgatgaatttgatacatcttcaccttggcaaagtggtagcgtgcagctgttgtgatcgctttggtttaatatatttcaatgcagaaaaaatatatacacacatacacaaagtttgtatacgcactaaaaataaaaaaaataaaaaatacatcacgtatagaaagtttgtatacgcgtatataaagtttgtatacgcgtatataaagtttgtatacgcgtatataaagtttgtatacgcgtatacaaacttcgtatacgcgtttgtatacgtgtatagaaagtttatatacgcatatataatttgtatatatacgcgtatataaaatttctatacgtatgaatataaatttggtatacatacgaatataaacttggtacttatacatctttagaaaaactgtaaaaaaccgaacagaagagaaaccggaaaaaaaaccgaataaacgaaaaaaccagaggaaaaaaaccaaacgaacagaaatgaaaaaaaaaagagaaagagaaaaaaaatggaaaattcgctcctctccctcgcggcgtgtccgccgctccctctccgcgtgcgacacatgtccagtcgcgtagagaggggggcgcgcgactgatcgcgcaatgtagaggaccggagagagatgtcttcagaggctttcgttttaacaacagatagatctaaagatctaaacaattggtccattgtttaaatggaaattgatgggcaactatttcttttacaaaataggtttgaacttagtataaattagtcaatatgtgaagagtaaattgcatattgggccacctttctttaccattctgtcaatttagacggggatagaacaattttttcactttggaccacctaaatttacatgtttgtttccttttgggcctcttcttccacatccagctccctctctcttatctctatttcttctctctttcttgactgcaaagggctagaggaaccaccatgagcaggccaacaagtgatcatcagtgctcgtaccgaagctccgtcggcgtcacctcctcgtgcttggaaaggagatcgatctccctggctgttgggaggtcaagctccagctcgaggtagagtatggcaaacaacgggactcgagatagtgaggcatcagcagagcttgagaatgagtgcggcatataattcagggaggccagagagaagatcgatggagttgaaggtggaagagtgccccaaaataaaacaatatgtaaatataggtggtttaaagtgaaaatgttactctatccctggtccaagttgaaacaatggtaaaaaaaggtggcccaatatgcaatttactcgtgaagagtaaatagatcatatggcggtgtaaattttattttcaaaccccacgttatttaaaaatgtttaatgatgtaaatggataaaaattaactatatgattcaaatgtttatagttctttaacatttattatcgttgtcacctcggcagatcaccttagttgtctcatgtatgaagcttcatcatacatgcgaaagcaaagatgtacatgtgcattgtgcagagggtcagataaatgttcttagaggctttgttttcatcaaaagatagatctcatattctaaataataggtccactggcttaagcaaaagatttttaggcaaatatttttaattaaaaaaatagtttaaaataacagattcacttgtttaaatataaattggttaatatagatcatataatagtgcaaactttttttttctcaaacggtgcactatttgtaaatatttaacgatgtaagtggataaaagttagctatcaatttattatacttttttcaaattaaatatcactttattttcaaattaactatcactttattttaaaattattgtaagtggataaaattttgtacatgtagaggaggtcggtttagactaatgtttttataagtttttcttttaataagtgagattgatttcctgtggtgcatcttgtaggcccatggtgactgaaccatgcatatggttggcacgtctaatagaaaatgtctaatagtgttctttaggaaaaaggaaaacgaaaacatactctaccgtacttgatcggtgtttatagttgtttaaaattgagtgaagtgtatgggcagtacttaaacttgtataaatgtgtcatctagatctctaaactctcaaaatgtatttttgggtttctgaacttgtcatgagtgtcatgtaggtccaaacgggctccaacccgctcgatgagatgacgtgacatgccacggtgacgcttacatgtcagtggtatccacatgtcattcgcataaaaaaataaaatttaaaaagagaggagagagagagaggagaaaaaggatgttttcaattttgaaaaaataaatgaaaaaagagaggagaaaagcaatattcttaattttttctatatatgactgacatatggattctattaacacataagcgccaccatagcatgccacatcagcacacggagtgagttggagcccatttggatctatatgacacccaagacaagttgaggggctcaaaatgcatttgagagttcagggacctaggtgacttgacacacctacacaagtttagggaccgcctgtgcactttactctttaaattttattgtcacaaaatgaatttccatctaactaatatagcataaaaagagaagagataggaaatagaaggggaggtcatataggggaacgcgagtaggtacatacacatgatggtacgggaggtaggcatagcacagcaaaccgggctagaggttgacccgctctggttgttagttcaccggttgaaccaccggatcactggtcgaactgccggtttttttatttattaatattatatttgatttgcattatttgaaatatagaatcatcataaattggtgaaaatatgcataaataaactagtatatctattattatatggccacaacatcaaaaaaaaatgtagtgtggtaacataataaattcataatgctatactggtaggacaaattaaaaccggttcgattcttcaaaaaccactcccaattcaccggttcccataaaaccgcccggttcacaggttttttaccggttcgattgcagggacggtctttttgttgaactgagccatcaaggtcgccggttccggtttttcttgattcaaccgccagctcagtccccccccccttttttactatgcaggtagggcatagtgtctatttttctttaatataaatctaatctaatggtttataatattggacctaccgatttaattgaaaaatcaaatgatgtgttttgtttttcttatcatcttctctaattaattaaaacgccacgtatcagcttgagagtgtttttgaacgctacatgtcaacttaagagcgcttttataaagtttaatggacttttagtatgtaatatgaatatgatatgatacctaaaataactttataatatgatacagaaagagtaacaaacatggcatcaaattcactgtgatgcatcgtagcaacaatggagtgagttttttccccttgtctacggacaacaaacatgtgacttgagtttcctttcggcctaataccagcccaacattgtgcttacacgggccgtaacccactaaattcacctccgagcccattccactcgaaaaagaccttcgggaagcctctttgcctcccgctcctcgccgcccccgccccgccgcctcccccccacttcaagtctccattcctccatcgccgcctcgatctactcgccgatggcgctctcccctcccgcggccgcgcgctcttagcatccgccgccgcctccgccgccgtccacgccttcgatccactcccatgtcggagccgccggcctcatcctgcctgcttcagtaggctaaccgacaggggggaattccggccgggagccaggctgggcgcccatgtccccctccgccacctcgccgccgaatcgcccacaccgcaagcgccgcgccggtgccggtggcggtggcgctgacgacggctcgacccgccgccgcggccgcagcgctgtcctcctcggccccacccacttccccgccgttcgctccttcggcctccgcctcgccctcgtcgtcgccccagccccacgtcaccgccgcaagcagcgcccgctccactacgcctgccgccccacctcccttccctgtcgccgccgccgtcgcctccgcagtatcatctccctcctccacctccccatcctccgcccgttctacctccgctacatcctcgcggcagccgcatcaggcccctgccgctgccgccggaaggaatccctggtaggcatgggaaactacatctcgcgggtgctccggaagagctctagtgaccgtggtaaggcgccgccagccgacgatacagccaagcaggtacccaatttttaatctaattgagtacatctggcatgtaatttgcttgaaccgtcagtttgcacagtaaaattgacaatgcaacatagtttcaaaagatggtaatacgtttgagtcaatccaaattgcttttagtgaaataagtggataagtaggaatttatattagctatattgtatcaagtattttaatccacaagtgagagtaaaaagttaagtacttgcatttccagcctgttcatttttttttcttttgaagtcaaatactgttaactaaattaatttgagcactgcaaattgacctttgttgtcatattttatccttgactattccaggatctatgtgaagtttttacacctctgacaaatgaagaagaaagtgaagtaaacaacattttgtatggcagtgatcaaaggtattgtaggcaaccatgaatttaattggctgattacttctcctatatctttagcacaatcaggaattgattttccctttctttttttgcagtaagaaaataatagtgatgcatggaccttccaatattgatattactaaagagaaaatctggtgcttgagaacttgtaattggttaaatgatgaggtgaatacggcctgtccatggaaggaatcctgaagaatatgttaaacaaatgtcccattctttctgatcttgacattagtggttccattttccatgcttcacagaaccaagactgcatcagcattctacttttgttccttgcaggtcattaatttgtaccttgaattgttaaaggagagggcgcaaagagaaccaaaaagatttttgaaatgccacttcttcaatacattcttttataagaaggttagataatttgcatatttttctttccggtgctgtatgatggaatgttcttttcaatatttctgtagttctgttacacacaccattttatgatcttcagcttatcagttgtctctttgaagcactatcaagtgatatttatgcaattattacttgactcttttccctttttttgaggggaatttattattttccttccatagtaggaattatctgccagttagcaggaaaacctgtgattcttttccttcgatagtggaaattgttggctagtttgcacaaaaaacctgtgtttcaacactcaagcatacggtaccatacatttgtttgagaacacgcaattcctaccttatccttaatatatgttgatgtgtgccttgtatttacttaattgatgacccttttcttgagttacaaattttgtgtggttgttattctcttacttttttttttgctaattttccttgtaggttgtaacatcccttactatcccttactatttattaataaccttgcttagatatcaaatgaattctagcagtagtttgcaccttcatgattttctgaattctcttcagcttgcttgtggaaaaactggttatgactatcaatctgtaagaagatggacaaccctcaatagattgggctatgggcttgttgagtgtgagaaagtaatgttactgttattattttttcaatgtttttcatgtctgtttgtctttcaaacaaatcatgagatttattgtgcagatctttattccaatacatagaaatgtgcattggtgccttgcgataataaacatgaaggataaaacttttcaataccttgattcttttggcggcatggaccatgctgtgctgagaatactggtaagcttagctgattacaagtatattactggattagagagccagttacttccaattagttcagttacaagtccgacttatgagacgttagtttggtaagatggcacattgatgacttaacagttgattcagtcatagcatttggacttaattgctccaaattaattttgctaagtatgttatggtgctctctatttggatgccataaatctccagctcccacaatagttaaagggtggacaaaattttacccctgatgcattcatggacttattttttggtgctatagaaatgagaaaggtcttacgttatcacaaatatttgtgatatcttaaaatctgacatgattcagagttattctttgaaatttaaattgtgacttacgaagcagtaatccatgttaattagaatttacccatcaggtgctatttcaagctttcagttattttcaagtgaagttctgttttctattcctctcaggctagatatatcagggatgaattgaatgacaagagtaacatacaggtagacaccagttcatggctgaaaatatcatcagattcttgtcctttgcagcagaatgggtacgttctctttacatgctacatatgacctaccagaattacgtatggaatgaataatggtttaccttcggttctgcaatgaacacagatgaaggtctaaattttatcactcagtgcattaatacattatcgacatttgtgttgtgcatatcaatgaccaagcatggtccgcatggatatgtctgacactgaatttctcttttaataggtgggattgtggtatgtttatgcttaagttcattgatttccacagtagaggtattggcctatgctttactcaggtgagtatagtacaaaatactggattcaagttattatatatgcttaatctgttcactcattgatttgctgtttgcactattaagtcaatctcaaatgaagagtcttaacctgctaagatgaagcacaatctctctctttcatacatctaaagtggagtaacatgtaccttgtacttaattgtgtttggtgtcatctaaatcaatcactatttgcaggaacatatggattactttaggaaacgaacagcgaaggagatactgagattgagagctgactgaaaagatgtcctttcttgttcacacactcttgggcattttgtcaaggtaggtattcttgcgacctattggaaaagacataatgatgtatttattttctactagggtgttttgttgattacaagtggctggaacaattttgcataattctttaccccttcattttctaggatcttattttgatagaatagggagagattgaaatgagaccccaagggaacaagacagagctaacagaagtcggaatgtaagagcttagatgattagaacaagaatgcttaacccataccatgtatagccgccaattagaactataaagagataaaagggggtatgaatccacattttgttattctttaaaatattcaagtgaactgttatgaaatagatatgaggtgatttacatcaattatattttgtgaaaagggcgtcacccatcaaatttttttccttatagcatctcctttgcctctggcagtattagccattggctaacttgaaaaataattgtcgaaggtgatcgtctttctggaactcatattgcccagcaccacaggatatgaaatatggtaactcacaacccgcaaatcgctgcctgctggtgtaattaagtaatcgacatacttcctgtaagcacatacgaagttatcatctctaccccaacattcagttggatgagatcataataggcaactgtaagctgaagtgttttcatcaaggatttggaaaattgcagtatttactagcaaaagatattgacatcatatattgctgtttacagaaaagaacctgtataggcggttctagcaataaactacaaataactagcttggtacgtgtaggacaggcaattgtaaagttggatacgatctatgaatggcttggcaatcagcatgtttggattcgtttgctccagtgcttaaaatgatttcaaattttccctgcataaacaaagcacaacgatcgagagagaagaatcatatggatacatgcagacaaagcgatggatttttttaaatctctttcctttgtccttccttgagtcaatatctgatcacctgccaatcaacatacacacgaatcagatggccttggatctgtgtctcgtactcatattcatcaaacattcccgaatatatgacggcttacgatatcaatatcatttctcaagagctgacaaaagagaacaggatttaaaacctatcaaatactccctcctttctaaaatataatgtcacacattttagttatatcaatctagatagggacatatctagattcatggtattatgatacatcccatttgatcctaggtttctatattctgggacgaaaggagtatacatggtaataggtatacatctgcatgcaaaacagcttaagggtgtgtttgattgagctgtggcttttgaaaaagtagctgttggctgtggatttttgaaaagtagctatagaatataggctgtggcttttggaaaagctcgtttggttcagcagccgtagcttttgaaataactagtctcgcttacaagcgggtcccacatgtcataaacatattggatcttcttgttcgtctcaccaccataggatgcctgagatcactggagctgctcggttggggcagatgcggcggcgccgctggatcggtaagacggcggcgggggttccagctcctcggctccgcccgccacgcaagctgcgcctgtccgcctcctcggctccgctcgccgcctccgccgcgcccctgccccggcctgtgccggcctgtgcagccgcctgcaggacctcaccgcgggcgtccaggtcctctgacgccaggttaatttagtactagaataagttaatctagtaatagaatagaatatgatatcctagtactagattaacttattttcagacggagtagtatgaatttcatgttgtcaatttgtcatccatccaaatgacatatttcttcacaggcttgctcttggctgtcactatcatctatcagtacaatattgttccagcgaagacttagccaggaacagaagcatctgtgctttgatatatcatatgtttattcttgcgagcgcacatcgtaagaaagagcaaagtaatcacgacaaatagcatcgttaaaggtgaaatgcacgtcatcgtactataggtatgtcttgtaataattggtgggaactgggaaggtttctggagttaccgacttttggtcaatatcgtcgtatcaacacggataactttgaaaagaaaacaactccaagaaaacaaattgatcggtacttcaaaatcaacacgactattactcatataaaaatattacaccataaaatattttcagcggccaatatggggaaacagctttgacgtatatagttctgataatctggaacacatcaatttcaaaatttttaaacgttgactgcactgcacacactctaaaacaagaatggccagaaatgtgcaagaccttgctctagatcaagctgtcaagtttggtgaggatcttgctactgcaatctttgctgatgattatggggttgcaaattatcattaaacaagaagatcggacccggcccatgtggatgaaaagcttctcagattctcgtccttgggttcgattgcaataatcacatggagcttaagagtcaactatcctatcaaccactggatcagcaccagctttattcctcaaaagggaaaaaaaatcctgattgtactctcatctttattctgccccagcagcaatctcctctatctgaaaaatgctgtcgatctgtcatttgtgttaggctggccctggccctggtctggccaccagggctcagttttggtgcttttgtagctagcttggtcatgcaaagttgctttctcttcggaagatcccaatcggtcgagagttgattatatataaaaacgacttattattgataaaaaaataatttgagtaaaaaatttatatagaaatgttgttaatgacttaaaagccaatactttaaaattatgttaagaatactctaaaatttaagttttaaaatttaaattttggtagtgaatgatatgttgtggggcaaacgatgaggcctttgttaaagtggaactacatggcatattcagaaacaaggttaaaaaaaagggaatatacaatagtggacatattgtggaaaatgctaataatattccctgcaaaaaagaaaagaaaaaggctaaaatattaaagagctagtgattcatacttgtaatagccaactattctgcaagtaaaggagatagatattgtttcccatcaaatcaagagatggaatagggtgcgagcaagtgacatcttgcatgaaaaggaagggatcactcagacacactaactcactaatttaaccataacaaagtgtaggctaatttgtgttttctttcttgaaaactattgaggtgtctttgttttaaagcttccaataacgtctctaaaaatttcagcccttttgccaacatgcattagttagacaagttgaaatcttgacagggataggagaaaaaaaaaaggagaaaggggcaggtacattcccaactttccattggccattacacaacactttcacaatcaaggcaggttctagctctagctcaatctcttctagagctggagtctaaccaaacgatttcagctccataaaaaagaaagcggaacaagctaaagtgatatgagaaaaagaactagacaggtggagcggagtttgggctgctccgtggctctattgctaaagttagatttagtagttggtgccctaccaaacagatcattgataactctacaaataaggagacattttgttcactttgttaaggaaagattcatttattagggcaaaatttcactttgcaccaaatttcctttgtgtagttgtggtaactaaactgtgtatacaaagaaatacgcattgttttcattggctggtccaaattgtagggaaatgcagacgatagtgatcacatcaacattgtaaatgcatacaaatatagactatatgtgtgattttgacacaaatgtatttcaaagcatgcatatgcaaatatcaaggaaatatgtttttgttatgcgccggatgggggcccaaacgcctaagagcgtagttgtgcttgatgggagggtgagggcgcacgcctcgcctccccggagccatgccggcgaacggaatagaaggagaagggaagagattgaactggggataattgcttgctttattccctgaatgatctgccatatataagcttacaactaaaccgaattgctaatttaaaggactcaacaaactaacaaactttagataaaattgagaaacaacaagaactgtagcaatccgaaaacgatgttgacgctcccctgtgcgcgcgatgcctcatctgcccacttacgtcacaccaccctcatccgttcccgcttgtaggcttcgctttatcgcacgacggtggtatgaaaatccccacataacagtttttatcatttttatgaattaagactttgagatcctcattgccatcggtctctgcagctgttcttaaaatgttaaaggcatggacagcatggtgcaagaatagaaagaaatcaagaatttggttatatgttctatgaaggtcctgttattttctgattaagcgtcgaaacaaattttcggcaatatgaaaagggggtagcgcacgagacctaaaagtggatggatgcggagacaaagatttagacaggttcaggccctctcaatgagaggtaataccctactcctgtttggggatttgaatctgccgagtgaattatagatctgacgatctagttgtctcatgccccctagagggcctcctgcccaccttatataggatggggggcaggattacaagatagaaaccttaaccaatatggtatcggtttcctaaatctactttacaatcttatcaaaccagaactttaggccgttccataatatacagggaaacataatacccaagtcatgatccgttacatattccatagatataagttatcccctataactagtcggataatcatgccgtgtgggtatgtggtacccataatctccacagtagcccctgagaccttcacagtcgaaaagataatcttctctcgaaccagattactccaaagccaagtacttcaatcatctttgccatgatctcccgagaacttttaccaaatctaaagactgtggagggctgaaaaataaagttggtgcatcgactagatgcaccttataggtgtagcccccgactatgtggttagcttgaacaaactaagcatatagtcaaggaataaataatccaaccaacagagtggtcttgataattgtaatcaaccaagtgacttgatatcaatgtatagcatatgcggtgtaaatcctagaataatatgattcaagtgatataccgtctgctttgtaaaatatgatgcgtgcaacctaaagttgactacatcattgaaaattcacacgcaaaacagctataaagaagcttttatgttgtgaataaagaaatttccaaagtattgggcatacaccatgcgcacactgctttaacagatgtgcttaagtctctaaaagacacatggtttcaccacacctggaaatatacggtatatgtggtgtaaaatccgagtaaataaactcataaaggatttaccaactgcctggaaaatgaccaagatatataattagcctaagccataatattggtcaataaaaatgcacacttacgtggcaaaaagcaacgatattgtatccaatcaattgcttaaaaatccaaacaacaccttgacttatataaaaaagtcagcggggcagctatataaagctttactgtttgacaccttttaagatgcattgtaccaactcctaaaaagttgagtaactgcggtataaaaggattttaaggtattgggcacttgatcacgtgcactttggcctaagcaaaaagtgcctaagtccctaaaaaaacgtaataggccatacctgaaaatatgggctacagacatattaggccaaagccaaaaaatatgccttcgacaccctttaaaggatgacgcatgtaacatgctcccgagtaataaatctttcgggtgatatagaccaagtgtagctcatatgaatagcttcttatctgagtgattatcccttatgtgatactccaaaatagatataataattgaatcccgactagcacaagtattcggttgataacccttacggggaataataaatagtccagtcttcgagcatagaaaataatctcagaacaaaatccaacttgaaggtatgatccttgtgtttgagttgataagcccctgagcatataacttatccttctattgtagtcacatttgtccattgatagtaactgacgcagtcggcatggagacgaaatgaccaacatgaagatgatatcacccatcaaagcagtcggcggcggcggaggcaggccggcaataaagacgtagacgcgcatcaacagcgatgatgaaatccactaatcatgaggatgaagaaaatagtcggcgacagcaaacgcaaccgacatgatgaagatgacgatgtcaatgatccagtcaatagtagtattgcggccgatgataatgacgaagacactcatcagtgtttgcatagtaggtcaaccatgacggtgaaataacaagctggcaatgacgaaagcaactggaggcgaagacgtagtcactcattagcaacggcagagatgtcagggccgatgaagtagaggtgctggtgatgatgtcagtgacaataatccatcaaactgttgagaagatatcaaagcttgagtagtttccttgatgcgagtgtgtgcataaagaagattgatgcaacgctccttgatttatgaagatggcagtagaacttggtattatagctgttgcagatgcttcatttggaggaaaataaatgatgttgtccaactcgttgaatctgagttaattggttgataactccaaactcccgaacatgtagattaaatcttgaacttgatacttgagaattttggagtagattgtggcggcgtggagaagccaaaattgccggtgtaataattagagtcgctgaaattaaatgttggctctaaagcgaagacgaagataataactcctagagttgactcgttgattgattgattgcttcatcttgccataaagcttgtcgaattttgagagtcttgtatttgtgtagccctcgactctttggttagttgggaaacaactgaacatagagtcgagatctgtagcttcttgtcgtcgagtactcattgcttgagtaaagatgcatgttgaagatgtccgggtagaaatattgaagattgtaacacctcttgttgtaataaaataacacggcatcatatttggtgacgcatgccgagatgtcgaagctcttgtagacgtcgtggttggtgaagtagcaaaacttgcgaagcagcggcaatagagtttgtcggtgccgaagataatgaagatgaagtcgctccaccatgatgacaaagttgcatagccgtgatgaagtgaatacaagtcggtggcaacataaacaaaccggtagcgaaaacgcgtagttgtgaagataaaaacaccagtcggcggtggcataaccagtcggcgatggaagaagtagaatgatgacgaaaacgaagacgtccatcagtagtggtagtagtataaaccagccatagaggtgagggcactagtcaacagcagacgagatgaccggcggtgaagacgataaggccaatcaacactggcagactcatgcagccatggaagtgaagaaaccagtcagcagcagacgtagatagcttgtgttgaaggtggtgacgcctatttgcagtggcggcgtcgtggccagccatgaagacaaaagcaccagttggcgtcatacgaggcagccggtcggtgaagatgtagacgcccagcaacggcgacctaataggccaaccatgcaggcgaggacaccagtcggtagcgacgaaggcgagccggtcggtgaagacgtagacgcccagcaacggcgacataataggccagccgtgcaggtgaggacaccagttggcggcgacgaaggcgagccggtcggtgaagacgtggacgcccaacaacggtgtcacaataagccagccgtgtaggcggaaacaccagtgggcggcagacgaggtggccagtcggtgaagacgtagacgcccaacaacggcggcataataggccagtcgtgcaggcgaggacaccagtcggcaacgacgaaggcaagccggtcggtgaagacgtagacgcccagcaacggcggcataataggctagtcgtgcagacgaggacaccagtcggcggcgacgaaggcaagccggtcggtgaagatgtggacgcccatcaacggcgacataataggccagccgtgcagacggaaacaccagtcagcggcggacgaggcggccagtcggtgaagacgtagacgcccaacaacagcggcataataggccagccgtgcaggcggaaacaccagtcagcggtggacgcggcggctggtcggtgaagacgtagacgcctaacaacggcggcgtaataggccaaccgtgtaggcgaagacaccagttggcggcacaagaggcgccgatggtgatgttctgactgatccattcctgaagcgtaagagataagattaaagccatgaatcgctatcatgcatatctggatctagatcctgcagaacaaacatataggatgagtagtatctgatgtaaatacagtacttaagaaaaattcaagtattttaaaatatttgtaaatatgtatttctcctcttgtcaattttgatttccccgagcagatgactccatacgtttaaacactatgtccgactagtcatagcccccaagcatcgggagtcggcctaggcacttcccaaacatgcatatgagtgacatgagttcgtcattaatggaacaaagtttcacgaatcagaatttactactcgggtacttttgcaattgtaaagagcagaaaataaatttatcttatctctatgcttttgatttattctgaataatacttagcaccttgcgttactcggtccatccaacgagccctcgggtgctaggaatcggcccaaaggcaactatccatcaacaaaccaaatggaaagcataggaagatgaaactctataacccgataggcacttttgtactcagattatgtcgcgagcaatcaagataaatgttatgaaaattgttaaaaaatatgatataacatctgtagcccccgactcactagtcaacggcgaaccagttgatatagtgaggcagaggaaaagaaaaatatcatataaagaaaaataatgatgacttagctttgtaatattcccttggtgatggcagaagtagctgatgtgggaacaaagccgtccatcaatggcaatgaaaacaccggtcggcggcgttgactgcagccagtagtgaagacatggttgccatcagcaacggcggcgtagtacaccaaccgtgaaggcgaggacaccagtcggcggcggccaagtccagctggtcggtgaagacgtggacgcccaagaacggtggtgtgaccaaccaaccgtataggcgaggacaccagtcggcggtgacggaggcaggccggtggtgaagtcgtagacgcccaacaacggcggcataataggccagccgtgcaggcgaaaacaccagtcggcggtggcgaaggctagccgatcggtgaagacgtggacgcccatgaacggtggtgtgaccaaccaaccgtataggcgaggacaccagtcggcggcgacggaggcaagccggcggtgaagtcgtagacgcccaacaacggcggcataataggccagccgtgcaggcgaaaacaccagtcggcggcggcgaaggccagccggtcagtgatgacgtggacgcccatgaacggtggtgtgaccaaccaaacgtataggcaaggacaccagtcggcggcgatggaggcaggccggcggtgaagtcgttgttgctatcagcaatggcggtggtgaggacaagccggcggagtagactcacggccgatcgaccgaaaagctgagacgcctcgagtccatgaccagcattgatcgcctcaatagtgccgcgtaattatatgcgaacaacaacaaaaaaaaaatagcaagagattaatttgagattagaaatcaatctaaatatggaaaattacgaaacggtcaagagatgtgcactcaggccaatgttcggcacgaatcccggcgagaacaatcaacaggtgacatgcaaaaggcaacgtgcacgcgtgtgctttctcactcggcatgcagcatggccaaatctcctgtgtactgagttgcaggtagcagcaagccagtgaccgatccaggcctatgagcttcagcatgtcacgtggtcgctgagtggttcccggtgtaggcgtggatccgaactcgcaccgtgtgggctcggatttgcactgggaggaggctgatattgttgctcggcaacatcgacgacacggaaaaattgattccatcacacttttcgacgggaaactcgacgcacccctacctggcgcgccaactgtcgaaacaaattttaggcaatatgaaaagggggtagcgcacgagacctaaaagtggatgaatgcggagacaaggatttagacaggttcaggccctctcaatgagaggtaataccctactcctgtttggggatttgaatccgccgagtgaattatagatctgacgatctagttgtctcatgccccctagagggcctcctgcccactttatataggatggggggcaggattacaagatagaaaccttaaccaatatggtatcggtttcctaaatctactttacaatcttatcaaaccagaactttaggccgctccataatatacaggaaaacataatacccaagtcatgatccgttacatattccatagatataagttatcccctataactagtcggataatcatgccgtgtgggtatgtggtacgcataatctccacattaagatacaatttttaactcaattttcattaacatgctttttaaatgaattgccaaatggtacatttcatgataaaactttctatatagaacttgttttaaaatattagataaatcaatttttcaagtttaaaaaaattaaaacttaactaatcatttattaatggctttcttgttttgcgtgcccgtacataatcttcatctatcgctttctcgaattgggggccaaagtcctacaaaatttacaaattgtcaaaacttttgaaaggttacatattagaataaaagcatcaacttaaagacacaggaaagaaataattttttttcctccacttatattgaatagtctattcgataagaatcttgaaaaaattgttgtagagattatggataccccatatctatatggcggttatattccagctaggtacagggtaccgaataaagatagaatatcttcatgagggctcgggttagattctaaacttgtatgtcaaggaaatacccgggatcctagtcggttacgattgtattttatctgtaattccatgttcctttgggatatggactgtattttgtaaagcggaccccttcccctatataaggaggggtccggatgcctctcggggcgcggttttttcctagatcatacaatcaataatacactcggcggaatcatcccaggacaggagtagggtattacttcttgaataagaaggcctgaacctgtataaaattctttgtctccaaacccatccactttcctagcttgatagccacccccttttagtattgccgaaaccttgtttcgacagttggcgcgccaagaaggggcagcgtcaagtttttgccgactaagtgcgatgggttccgtctccagcatcgacgacttcgccttccccccgggcaggcgttccggttcggcagcctcaacttcatcaccaataacttcggcaagctctctctccttgactcggattcgaaccagtcagggagaaaccaggtcctctcgccgttcggtattccgaactcggccgatgtctactccaagatcgtctctcccgagttagtttcaaaccactcggacgagatccaatctacccctcagcgaccagatcaagatgacgggtcctatccttcaatcctgatgagacttcctgatgatttggccactgtcttcacagccaaggcatcccccgttcgaagatctagacgagcttcggcttcggccccaatccaatctagatccagggaggttggcgttatactccaatctcttgggacagtctcaacggaagagttggatggctacctcagctcccctgacgtcagttctcgaccaaccgagatcctcgactacggcgacttcgacaacttcgacgacagctatgaggataattacacgcctctcttctgcggcgtattcatggctgacaacgaaacggaggaacaacgccgagcccgagaagcggacgaagagcgcacacgacaagaaactgaacgtcgtcgactggaggaagaacgacagcgacaagagcgagaacgactacagcgtgagcaataagatcgcaagcgagttgcaaaggaggctgaagatcgacggcagcgcgccttggaatccgggcgacgagcgagagagctgatcgggcaacaagacgtcgatggaacagtggttttttgcacccccccagcagaacgcggttgcagcaatcactctcctcgacaccctcctcaaggaagaagcactcaatcaagctgatcatgttgtcaacatcttgaaccagacgaagaccatgatcgctgcctcgcttccagccaactccgcaagcacccgcaccccgactggtagccgagtccctcaccttcgatctcaggactatcaccagccaagcctcagcattgccggcgccggatctagtcgcaggagcaggggacatgatgaacgatctgttcgttcgcctcccgaatgatatagggagcgtcgagttgaacgtccacactccccacatcgaaggcgccccgtcgatcttcgtgacaccatcaaccagctccgcgcagcaagaggcaatcattcaccggatcgctacgatgacgatatggacggagttgctgccttcacaagtgaactgcgtcgagtagattggccagccgactttaagccgactggaatcgagaaatatgatggcaccaccaaccccgagtcttggctcaccgtctatggtctcgcagtccgcgcagtaggaggagacagcaaagccatggcgaattatctacctgtggccctagcagattctgcccggtcatggcttcacgggctaccccgcggcacgattggatcatgggcagagctacgcgaccacttcatcgccaacttccaaggcacttttgaacggcctggtacacacttcgatctctacaacattgttcagaagtctggagaatcccttcgagattacatccgacgcttctctaagcaacgcaacaagatctccgacatcaccgacgacgtcatcattgccgcctttactaaaggcattcgccacgaggacctagtcggaaagttcggacgcaaacctcccaagacggtcaagcagatgtttgaaaaagccaatgagtatgccaaagccgaagatgctattacggcgtccaagcagtcgggcaccacttggaagccaaagaaggatacgccgaccgcaggagggagtggaagtaacaaccacagtaacaaccacaaggatcgcaagcgtaagcccgaagaacttgtggcaataacctctccatcttcccgacaacgttcccgcgtcaacaccttcaacaagataatgaactcccaatgtctgcatcatcccaactccaaccacgtggccaaagattgcttcgtctacaaacaatttgcggagcaatatgtcaagaacgcacgtaagccctcagacggagatcaaggcacatcaaacaagaaagatgacgaagacgatgccccgactggttttcaagatcatcgcaaagaactcaatcacatcttcggcggacccctgtcttatgaatctaagagaaagcagaagctaacagaacgggagatcaatgcggttcagcctaacacgccccaagaccttcggtggtcagagatagcaattaagttcgaccgctcggatcatcccgaccgagtggtccacccggggcggtaccccctggtactagacccagtggttcgcaatgtcaagctccgacgaactctcatcgatgtggcagtgcactcaacatccttttcgctaagaccctggacgatatgcagattcctcggacggaattaaagccgagtacgcaccattccacggtgttatcccaggattatcagctacaccactcggccagatcactcttccggttacctttggcactcgggaaaattttcgtacagaaaacgtttgtctcgaagttgccgatttcgagacagcataccatgctatacttggacgaccagctctagccaaattcatggccgtcccacactacacctacatgatgatgaagatgcctggtcctcgaggagttatatcactacggagcgacatcaagcaggccgtcacaagtgacaaagaaagttgcgagatggcccaaacccacgagatcactctcgctcgcgaagagatctgactggctgcgaccacggcaagcgaaggagaagtgcctgcgaccaagctgtcaaagaccgaagaaggcgacgacaaaactaagaagattccactagatccctccgatcctaccaaaactgctgtaataggcgctgagttagattgtaaataggaaagcgcgctcatcacctttcttcagaataataaagatatttttgcatggaaaccatccgatatgcctggtattcctagagaggtgattgagcactctttacatgtcaaggaagacaccaaacccatcaaacaacgactccgccgctttgcacaagatatgaaggatgcaatcaaagaagaattaaccaagctgttagcagcaggcttcatcaaagaagtcctccatcccgactggctggctaacccagtcctggttcggaagaagaccgggcaatggcgcatgtgtgtcgattacaccgacctcaacaagtcttgccctaaagatcctttcgggttacctcgcattgaccaggtgattgactcaacggccggctgcgagctactcagtttcttggactgctattctggatatcatcagatccgactaaaagaatccgactgcttgaagacctcgtttattacgccctttggggcctactgctacatcaccatgccctttggattgaagaacgcgggagcaacctatcaacgcatgattcaaagatgtttttcaactcagatcggccgcaatgttgaggcttatgttgatgatgtggtcatcaagaccaagcagaaggatgacctgattgcggatttagaagaaacctttgcaagcattcgtgctttcaggatgaaattaaaccctgaaaagtgcatcttcagagtaccgtcaggcaagctgctcagatttatggtatctcaaagaggcatacaggccaacccggagaaaatcaacgccatcctcaacatgaaaccgccgagctcctagaaagatgtccaaaagctgactggttgcatggcggcgctcagccggttcgtttcgtgactcggcgaatgggggatgccctttttcaagttgctgaagaaaactgacaatttccagtggggacccgaagcagaaaaagcctttccagacttcaagaaacttctcactactccaccagttttggcctcgccacgtccgcaagagccgctattattatatgtgtcggggacctcccaggttgtgagcatggtcctagttgtcgagcgtgaagaggaaggccatattcaaaaagttcaacgaccaatttatttcgttagcgatgttttggccaactccaagacaagatatcctcaggttcaaaagttattatatggtgtgttaattacagtcaggaaattatctcactattttcaaagtcactcggtcacggtggtcacgtcgtttccactcggggatatacttcataaccgcgaagcaaacggacggattgcgaagtgggccttagaattgatgcctttggacatatctttcaagccacgaactttgatcaagtcacaagctttagctgattacctcaccgagtggaccgagtaccaagaagacatgccagaggagaagatggaatattggactatgcattttgatgggtcaaagaggcttacgggtgctggagctggggttgtcctaatttccccgactggagaaagattgagctacgtattgtggatacatttttctgcgtcccataacatggcggaatacgaggcgctgctccatggattaaggattgccatctctttaggcattcgccggctaatcgtccgaggagattctcagttggttgttaatcaagtcatgaaagaatggtcctgtcaagatgataatatgaccgcttatcgacaagaggtacgcaagttggaagataaattcgatggacttgagctcacccatgtccttcgacacaataatgaggcagcagatagattggccaattttggttcaaaacgggaagcaatcccttctgatgtgttcgttgagcatctttatgaaccaaccgtgcctagaaaagaaaaaattgaagccatgaatactcaaggcgtaagcatgattgaagccgactggagagaacctctcataagatttttaaccaaacaagaactccctcaagacaaaaatgaagccgagcagatttccaggcgcagcagactctatgtcattcacaagaccgagttgtacaagaaaagtccatcaggaatcctgcaacgctgcgtatctttggaagagggaagacaattgcaaaaagacattcattcaggcatctgtggtaaccacgctgctgcacgaaccattgttggcaaggcttatcggcagggttttttctggcccaaagctgtttccgacgccgacaaaattgtgcgaacatgtgagggttgtcaattctttgcccgacaaactcacttgccagctcaggagttgcaaaccatcccgttgtcttggccgttcgcggtttgggggcttgatatggtcggtccattcaaaaaggcagtcgggggttatactcatctctttgtagctgtggaaaaagttttccaagtggattgaagccaaaccggtcgtcacaatcaccgcaaacaaagctagagatttcttcatcaatattgtacatcggtttggagtaccgaatcgtatcattactgataacggcactcaatttacaggcggaatatttaaagatttttgtgaagactttggcattaaaatttgttacgcctctgtgtcacaccccatgagtaacggacaagtcaagcgcgccaatggcatggtacttcaagggatcaaagcacgagttttcgaccgactgcatccctatactggcaagtgggtagaacagctgccgtctgtactttggtctttacgcaccacccccagtcgggctactggccagtcgccgttcttcttggtttatggcgcagaagctatgctgccaagtgaggtagagtttgaatccctccgattttgtaacttccgggaggagcgatatgaagaagatcgagtggatgatatcaaccgactggaagaagcccgtgaagcagtcctaatccagtcggctcggtatttacaagggttacgccattatcataatcgaaatgttcgatcgcgagcctttttagtcggcgacctggttctgaggagaattcaaactacacaggatcggcataagttatctcccttatgggaaggaccgttcataatcgctgaagtcactcggccaggttcttaccgactcaagcgtgaagatggtactcttgtcaacaattcttggaatattgaacaccttcgtcgattttatgcttaggcatttcatttgtatttttcctcttcgactgctaacttcaagtttttccttgaagttttcagtcggggggctactataataataatggaacatgatttttatcaattcaatttgctaacttgatttatcattgccctgcttgattttttggcttagacaatgaggactgaaagtttttaataacttttgcgagttttaggctcaataagtttgacaaaagcttttaagaaatcagaggctaagtttgaaatatctagcacagcataaattcatcagtattgtacaaattgatcttccatcatcatcagaatcactgctactaatcagtgtcggttttttcattgtcagaattatcagacccagtcggccgaaggtcgacatcctggaatctctcaactacgtcagcaacaatcttgtcagcggctttttgcgcatcattgatgaggttgagggctgtttcttcgcttgtcccgtctgcaaacccatcaacagcgtcaatatcgattttggggtataaagatttggtcatagctaatgccatgcttgctcccatacttccagcctccctgatattcttgaagtaagtatccggagcgactctcagcttgtcgaagatctcggaagcgtcaagtgtactcgaaccggcgttattgaagaacatggcttggatgagtggggcagcggcattagcgactttgtccctggccccttcaagcctattgatcttgttgactaagatatcaaactgtgcctgggacttgattttgcgatctgcacgaataaattcatatcaacaagtggctataagaacatggggaatcagttatcattaccttcaacatcttttaaggctaagtccctctgctttgcaagttctgccttgtccttctccagggcttcgacctgcttctctaggtcggaaatcctggaggcttgcattgtaatgctttttggttaatcgatatgacaaggaaggttttacgaatacgtcagacggatatggtatttacctttggatgaaccactcaattcatagttggattcttgaagctcggagattctattcctcagatcatgctcagttttcctcgcaagttctctgacttcatgtaactggcttctggtggcttcaagagttccaagatggggaactaatttctcaagagttgtggtctttgcctcattcctgaggtggattctctgcgataagaatttactagcgtttcagcaaaatatgaaaggggataattaaagctatgcataaatggacttacattcacaatgcgagtggcctggatgagtgcctttttcagcaagcatacttcctcatcttctttttgtttgtttattacgattccttgaggttgcctatcatcgtcccaccacttgactaggatgggagggcgtgagtcctcagttgcttgtatacggggaatttcttcttcatcaccaatcattggtcctaatgtatccactgacaaaggttagacaattgatcagagtcatttggatcaacatggtttcaggcaaggtgtttacctgtgatgatttccggacggggatgagtcgactcttgcgtcttaactggggaccctggcatcgggtcgttactggcgtcttgtctacgagggctgtctgcccgagctccaacttctggaatctcttggcttggcctagtgtccgactggttttcagtcgggggctcctgattaattccagctccagctttggccgactcatttccggtcgggggttgatcaccagatcctacattatcggttgctggctggttgtcactcggctgatcctcggcaattggctcggtttcttttaagttcgtttccctgctggtcgggtcagagtcttttccagaaggatctatatcagatggtttcctgcaagtttgattatcagtattatttccgcactaggtgcgcatcaatcaaagggagatcgttatatgatttgtacctagaagacttcctgatctttggcacaggacgactggatgttttcttccttggagtagcctgcttcggcagtttcttggttgcctctcggtctccaggctttctagcagtatcgctttcgtcgtcacttgacaccaacttccttttgcatgaatctggctgaccggctggattggaggtatttggccgggcttcagaatggatcttgggacccccgctcccttgaccggtttggcggtggggtgatcggcgttgaacgactgggggatccgacttcatcaaagcaaattcctgggcgtaatatccttcattgttaattgattcaacaaaaagacaaggttatattttgtgaaaagttgaaatgtttgattacataccggtggaggaggattgaaagcattgaatggcacgactggcagcaagtgcgaatagctgacgacggtagcattcgagaagatcttgtacatcctctccttcataaccttaaagttaagagagtctggatcttcacgatttggatcatgtttgctgtcaaactcaaaagctgtgcgggacctctctttgattggagctaaccggctttttatgaagtgccgagtgatctgttctccttgcaaaccttgctctttcagctttatcatgcgctccatcagttccactgcttgggctgcctcatctcctgtaggcaatgaattccatgtatcttggtagactggagggagacaagagtactcgggaagggctggttcaggattttgaacatagaaccagttagcgtgccagcctttgtttgaggtcttgaagggcatggagaaatatttttggcttagtgttcccctgagttggaaaccagcgcccccgacaacgcacggtttgctcttgttggctggggtttaaggaagaagatgcggcggaacaaggcgaaatgaggcctaatgcctagaaaagcttcgcagacgtgaataaaattggcaatgtgcactatggagtttggattcagatgatgcaagctcattccatagaagttcagaattccccggaaaaatcttgaagtgggaagagaaaacccgccatagaaaaagtgagaaaataccacgacctcgtgtgtatcgggggttgggaatgcctcgccaaatgccggccgccacccgatgatctccttcgtaggaagaacgccgtgcgccaccatctctttcagattttcctcaatcaaatcagaaggcgcccactggctctcgaaactttctccctcctccgccatggatgcgagctaaatggtttgatttgaactgagatatagctcgaggggaatggggaatcggagcggtggatgcgtggagaagtttcgtgggattttgggaatggattgaagcggattgatgaaccctagcttcatcggcgcagttctgtactgtagcaaggagtggggaaatggtgaaagtctcggcggggaagacgaagtgacgcttggacttcggtgtttttagggtatcgggagtactaatgggcctgggcctatacagtacttcaacccaatattacaatcagcgtggcccgttgtgatccctagggatttaggcacgttttgctttggcaatttgtgctcacaatgatgtggcccgatgctattaaaatcctttttaacgcggttcaataattctttggaattattatgatgcaaataaaaaggtgcccggcagaaaggtgttatgctatttttgtaagctttattaggctgcaaaagctgtttgggtagatttgagatgactagtttgctaatagtcattctcttagcattttatatgcttattttggttgtggtgagggtcatagcttaggctattagactcattgattaccatgactttttatcatatttggtggagtgtctttggagtttttactcggattcctgtcaaataagtctatttgagggccttttgagcgtttatcacacgggtcttctcattttttttctcgatatattaaagctaagaagtagtcggctgggtattttactgacttctacgagtgttttgctgtataatgtttggttgtaaaaccactcagttcttgactttatgtttagtttttttaactaaccacatagtcggggggctacacctaattaggtgcatctactcgatgcaccatgctttattttcgcccttcacagtctttggttccagtactcggcaggctaaagcaggaagagttgaagcactcggattattgttttttgttctgagatggctatttcgtcgactgcgaaggtctcgagggctactgtagagattatggataccccatatctacatggcggttatattccagctgggtacagggtaccgaataaagatagaatatcttcatgagggctcgggttagattctaaacttgtatgtcaaggaaatacccgggatcctagtcggttacgattgtattttatctgtaattccatgttcctttgggatatggactgtattttgtaaagcggaccccttcccctacataaggaggggtccggatgcctctcggggcgcggttttttcctagatcatacaatcaataatacactcggcggaatcatccccggataggagtagggtattacttcttgaataagaaggcctgaacctgtataaaattctttgtctccaaacccatccactttcctagcttgatagccacccccttttagtattgccgaaaccttgtttcgacaattgtgtgctcgaattatttatttcaaatgattttggagattttttcctatacaaatcagatgctctaacttttttttgttccatagaggctattccaaatttatgtcagttcaaagttactcaaagaacagtatttttcaagacataacggaataataagttatgttaattaaatagtattatgctggtatataacatcaattactccatcccatccattctaaaatatagttatttcgagcgtttaaaaaaaatactctaaattaagtaatacttcctctacctaatcactagtcatttaatttttcttagtcttactataaccatctcccactctgcaaccatcccagaggcactcgatggttcatatcctctatcataatgacacgacactgacttgtgaggcaataaagttgcgtttggttaaagggttgggatgggtcgggttgggttgaacccatttttttaagtgtatttggtttggggacatgtgggataggatggtcaggaatattcccctaagatccgggttgacatggtcactcaaaaactgacatggtccctcaaaaactgacagaccattccaacccatttttttctcacgctgacatgtggcccattccttcaaaagtaggattattatatcccttatgccaaacaaatagatgtgatcatcccatcctaaaaacagggatgagtccaactcaatcacatcttgtctccaaaccaaacacatgctaagagagtgggactcacatactaatgattataataatagtgatattatggtagatgatgttcactcgacactcgcgtatatacctaaggtcaggaggacaacttatatcccttgtcccgtgagttgatcatgtgtcgtaaacagaaggataaccagatcaagtggtaaaatatgaccatttgataataggtagtgacaggagcagaggggattaaagaactaaacatatactatgttactgttagggcatttcgtcatggggcaatgccggatgtgggcacctttactctttattatatttttgccccagttttcgaaagaatcctcaaatcacagaaaattacaaataaaggctatcttttgtgaaatctgtttaatttcttctctttcatttaaaagcgtcacaaactggaaagggaaagagtatgattagaatatggtctcactgcacaaagtgataagatcaggattcctcttcatctgtctccatcctctatgaaaaagagtagatcaagattatcttcacgcaaacgattgaataaaccagagccatgcaaaaagaaaatactaatatatttttaaagataatccaattgacgagaggactcgtgctactcgtaaaatatttgtgaatataaatatcaattttagtagctagagtgtatttaggttcaaatggggaccgctactgatgattttcctttgtcttgaactatcgtcaactccaacccttcgcaaattaatgtcacaggtatatattgattatatatcttggtgacagtgacaaacattaaaacattggggcaaatgtattcttgcccctactttcatttgcaattatgattttacccttactttttaaactttatgattttgccctcactttttgacgttgaatggtctgtttgcccctggtttaaacgtctgttaggtggactcagattaaatgagtttaagaaaataagaaattgacttgcaaaatgtaaaaagacatctctatcccaaacctttcaacctaagccactgctgactcctccgtccccgattcctaaccctcgcgagcggtggcggcacacgcgggcaagcgagagcgaggagcgcgcggtcgtcgcggaggagctcggggtgaagcaggctgggccggcgccaaatggcgatgtcaagctgagctagcccgtcgccgtccgccgtggtggtcactgggctcgtcggcatcggcctcggctatagtacccgaaccgctgcacagcagatgatcgagtacatacgtactgctgcatatgcgtagctagctaggctgtcttgccaccattagcatggccgcgaggagctcgcctgaggcatgatggtgacaaggaggagaagaacagcaaggagaggaggagaggaacatttgagttttattgtcttttactttttcttctttgtcactccccctttagtttttatttttcttactgccttgaactattggttggttcctaaactggacaggaccaacaaagctattctgttgttgaaagctattctgttgttgaaagaaagagatgagagtagtgtttcttgtttgcatattcataaatcccttgactgttaaaatgattaaacatgcagggcaagttcatacgtcaggcattgaggcattgaattcatacctcagtccatagtgtttcttaattaataaatcccttgattttttttaaacatatgctggagaatcgcatttcttgtgtagttacaagttggatttcgttgttaaaataattaagcatgcagggcaagttcatacctccgttttctactgtaatcgtgaaacacggccaaaacacaaagtcctcacaagccaaatctgcaagggcatagatgtccttttacctgtcagttaacaccattaaggctctgttcgtttcctggagttcccaactcccccatctcattttccgcgcgcacgcttttcaaactgctaaacggtgtgttttttgcaaaaagtttatatacgaaagttgcttaaaaaaattatattgatccatttttgaaaaaaaaaattagcaaataattaattaatcacgtgctaatggactgcttcgttttccgtaccggagggatgggttcccaactcaaccaaaagaacagagcctaagtcctcctgacggaacaggggcatacctgagcttcagttcaaaatagtgagggtaaaatcacaaagttaaaaatacaagggtaaaatcacaattgcagttgtaaatagggacaagaacacaattatccctaaaacacaagtacttctaaaatattctcttacaggacgagagatttggtgccgaaataataaatagataagaaatatttctctctttttttttggcaagaatcgagctgtctcgtgtaaaacctgtaaaattcatgtgctttgggatgcaaaggtgtccaaaggggaagtgtgggctatacagatgctcgggcctatatgtgaacagtatgtactatagaggatctcgattggtccaaacaaattttaccaccacaacatatttttagtactctctccgatcataaacattcaacgtttaaaacaagatgttgtcaaacttttacaattcaatggattgaacagtaaaagtttaacatcctaaattactctcccatttagaaatgcttatattttggcatggagctagttgatgtttgttacgggagggaatactccctccatcccaaaatataataacttttagccttttgaatttatcccaaaatataacaatttttctaccaatattcgcttctcaaccaatcacaatcttccacaatttaattctatgtgctttcctaataactgtgtctaactctaaaactccttagaacaggcacaatagtaggctataagccagctataaacatatatcgatatgataaaagaggagagataatagcaacggactacagatttgtagccagctgcagcacggactccaagacacaatgtgtatatgacatgtgggaccatatattaattgtgcagtatatatttataggtatatgaattgtctattaaattgactataaatgatttggagctattaattggctatattgttaaacttgttcttatattctgggacagatgaagtattaactaagcaagttcatggacttattagtgggatcccttttacttctgtgacatgatgcacacaaccgctgtgtgcttacggttagttctctctgttaataaaagtatatttcagtgtcctgaacctaattgcatatcccaagaatgtttcacaaagccatgcatgccattggcttagatagagatatgcaagccttttgagggaagaatgcacaggtagtacaggagatgaccctctgcaaaaccattcactggcagaagtgcagaacaaaagagtggtcaaaaaagctggccagcttccttcttttggttcatcagattctggtcaagtgctgcatgattggcaacttaagagtgcgtggaagtttgttaaagatttcgttccggctggttttggtgtatctctgttatttgtaaaacttaaattcacacaattttggatattctgaaactatattatggtgtctgtttatctgcatttggtccagtttttctttattgaaaaagaacacattcataacttcacatgaatcgaatgcctgtactgcaagaggaataaacacacatttacgagatggggtcaaatgcgctcatcaggggaatctcatgcacaacccagcatccactttatagcaaaaaaacatgctctcaccaaaaaggacctgatcccattggcaagaaaaaaaaagtactttccactactacaattttttcaggagcagagaaaacaagtgcaatcatccaatgctgaatgcccacacacactgcaacagatttctgcaaaaagtgatgctgttaaaaggaaggcttcattcattcatttttatttcttttttacaggaataggcttcattcattcatgtagagagaggagaaagagaggaggaaaaaaaaggaaaatggcaacagattctactactggtttctggtatgaccaaatagcagcagtacgaattcaaagaatataatagtattttgtttgaaaagggagagatttgttgggccccatcatggcatcatccatccatgacatttggtcatctatctatctatccctaacagcagcaagatagttttcagttcatctagcattttcagtggaagatccactactagtagtaaagagttaaaagaaaagtaggagtttaccaaaaaggttttcaactcaagtggagccttttttagtgcagccaaccaactgaacagaagctgatacactgttactgaacttcagattggaaagaaaaaaaaatgatgtttttgggaattcagagaagtgctcactctcttgtattggcattgttgcatcaaaatccatataatagctcatcatatcagctacaacaagatgaaacaacagctacaagaaagaaccgaagatgattgtactacctccgttttaggttataagactttctagcattacccacattcatacagatgttaatgaatctaggcacacatatatgtctagattcattaacatatatatgaatgtaggcaaatgttagaaagtcttataatatgaaacatcgggagtagttgtgagggggcgttaattgctcatatgtagatttatagattatagctagatatacaagcaagcaagagctcgatctttaagctaagctagccgaaattggaattggaattggagaattggaggtggttaattgagaaaatgagaatggttcttgttcagtcgaggtgggtggacctgacacgcttgtggccggcgtggcggacggcggtgccgacggaggcgccctcggaggcggcggggccgggggaggaggcggcgaagagggaggagaggtcggcgtagaggtcgacgacgcggcggatgttgttgttgagctcgcggatgaggccgacgttgcgggagaggtcgccggggaccttggactcgtggttctggttgatctcgttgatcagcacccggttctggtccagcaagctctgcacctgcacgaagctcgtctggaacgcgtgcagcaccttcccgtcctccgccgccgccgccgacagcgtgtcgccgtccatcgcctctttgcttctgcttctgcttgttcttgctctctgcttgttcttcttttgcctctctgcaattctgcaccccaaatggaaggaaatggtgaagagtgagacgacaagaacagaagctcgatgggcgatgaattgacgagttcttgagacaaaagaaaatactagtacattctttatctattcgattcaccgctgaaaatggtgagacgacagaacagatgcctgatgagttcttgacgcaaaagaaataattaattgttttttctttatctgttcggtacagcactgaagattttgcagttctttccatgaatgaaaagcaagatttttcagtttttatcgcgaaatctttgcaaattggagcagctgtagcgaggaaatgtaagattcactgtttggggggcatatgggacgacaaaagcactgttcaacaagatcagatgtacttgacgaatctttatttgcttggacccaataaaaacatgattaaaaccttggaacttttttccccatatgtaatctcgaaattaacgcaatggttggggataatatatatatatatatatatatatatatatatatatatatatatatatatatatatatatatatatatatatatatatatacacaagaaatcatgtaagtctaaattccaagaaacacaaagcgcgtcaaatttggaggggaaagaatcaaagaactcaagaagaaagaaacagtggtcgtgcgggaagggatgatgagttcggggaatagctgagatccattgaattcttcgcgagcaaccggagacgaaagattcccagcaaaaaatagaacgaaatcaagaacaagaacccaaaaaaacaaaatccgttactccgatgcgaatgagattggttttcgaccaaaattcgctcgaatcagtagaacaaaaggggaggggaggcgaccgaaccgagaaagaaattcaggcgagaatcgcaccgggggggggggggacacaagaaatccatgtgaaaactgtctcaacaggtcaaccttaggcacggccagagcacaagatacaagaacttggaggcgaattttggcccgccaagatcctaataatccgcacaagaaacgaaaagaacaactcgtcgctcgcaagaacacagcagcagcaagaacatatttcactacttctcccaacataattcccggactagagagagaaagcgaggaagggcgagcttgactcacctcaaggacgccgtagcatctgcgctcctgatgagatcatgcgaccacgagagagaagagaagtggaatgaagaagaagatgagattccacaggggaataggaggaaaaggaggatggatggggatggagagagagagagggagggaggagatcaggagatcctcagacacacgaaactactcaggctagcagcactagcagtgacccatcatcttctcctcctcatatatacggaggggaatagtatacttttctttctgtatttctctctgtagctttaaaagctctccttatttttcttttcttttcttatagatttagatttatagatggagggtattagtagtaggagtagaatcttttgctagagagagagagattgagatttgtggcatgttcggacacgtttctcctcctcgatctccttctgtatctccattctctctcctcgcatcgtctcactgtctgtgtgcttgcttgctgctgcagctgggttatcctttcctgcccggcacggtgcatttccgtctaccggtggtaaagtaattactcatgtacagtggtcatgtttctgaaaaaaaaaattctttttattggtgtactccctctatccaataaaaaaccaacgatttagttcttttcgcgcagggagtatatttgttcatgcggtacaaaccaacatcatctttactcgatttcggctagtcggcaaaacatagtgggacacacttatcaaatataaaccttgttaaaatgttcttatcattgttcgtaaagaagttagtagattgccttcttaacaaatgcaagggtgtggttaacattatcaaatcgccatcacactgaagtaagggttgttaaaattcaacaatactaaaaatggtagaataataatgcaaacatactataaccttactaacttctatcggtaatttcagaaaattttacttataacatttttaaattttataagtaccaaatcaaataacacctcgaccatcttaacattatcaaatcgccatcacactaaagtttagcatcaccaacttttgatcagattgatttttgcaacaaaacaaacaaaccataaaagcaatttaaacctttctataatggaacaggttatagtgataacaataaagacaaatgaagataacaaatggtagccattattcgggatgaaagctgactaggggcctatttgggttagctaagactttgagaagcagctgattggtatgcagcttctggtttctagtgcattttctaaattctacaactatagcttcttaggagagcttctgattctggaagaagctgcagcagctagaaactccctaaacaagccctaggattctaaagggaatgggtttagagacttatacatggcagtgtaccataggggcaagttatcggtgcacgttgtacaatgggatatttaggcttatgcatggcagtgtaccataggggcaagttatcttgtgataccgagcgaaagaagaacacatggtttgtaactcataatagatttaattgttacatcacattccgtgcaacaaaataaaagccagctgggcaaggtatataatgtgatattgttgaggcgtggttttttttggaggaaaagagagcttcattacttgaacgaaacagaggcgtggtttttgagattcaacaactcttcaaatggtaaatgaaagacaatgctaatttcgcccccgttgattggatcagacaacaatatcagcgttcattctgaaggtatatccttgaaatttggataaccttaccagagatctggttacaaatccttaatttcacctctctccttttttggttgaaactgataataaatgatgagcaagtcatgtaaatcttactcatacagtgagttgtacctctttctacaagtgtacctacaacaaccaagctacaattaatatctcttcaatgttcaattactatgctggtgtggacgcatagtttggttccattgtggtgttctacttgtctcacattgtctagctttggacagttttagaagtgtatttgcatctcacatagacactcattaattcagtccaaagattggaactttggaagttataatactccctccgtccaaaatataagaaccaaagatgggatgagacattttctagtgctacaaatctagacatgctatctaatattcaatcaagtcctagattcttatatttttggacggagggaatagctttgtttgaaaaggcaatttaagccggattggtaaattaggcagcctgtacctaccttcacgtggtgtacttggacatgcgtttcttgatattctttcctgcgtacattagagacaatcaaaccaacaaatcttcccgatccagccatcgtattttgcctgaaattcagttctgatgagaatattctaccagagaacatagtcactagtcactagagtaataagtttattagagcagaagcaatgcaagctacacatttgaggaccctaaaaaataccacatacactaaagacacggtccaaattttggttccccataccgcaaatggcctcgtgagaaacttcaatttttcatttcagccctcatatttttctcaaattacaaagaaatccaaattttatagcaaacaccttaaaatggagaaaataatataaatctcaaccccacccaccaccactaggtccacaaccatctccacttcccccacccacccacctagacgagttcaccggtgataccgcagcctccggcctctccccactctccccacctcggcaatgaactctggcaccgccgccagcctcttccttctccccatcgcggcacctctccactcctggacgccgctcgagcccaacccacacggagatgcggcggtggtcgaggaggccgaggcggcggcagagccactaagcaaatcgacgacaaggaggttggcacaagcagggggacgacgggctcatcggctcataagcggagcacgacgttgagctcggcagcacgcaagcgggggacgatgatgagctccgtggcacgtgaccggtgcccctccactcctactctccttagagggcgaggacctcaacgacggtggcacagatttggagtggcgtgggagctcgaccgccattgtcgtcgcctctcccctctcatgagagttgaggacgagccatggcacggcgacagaccccggctctcctctcccctctctggacatcagctccagcatcgcaaatcgggcggcggcgcgatatctcaacatcgggctcctccacttcaccttctccagtgggtgacggtcctctcctcccttctctagttgaggtggcgaggtcgcagggtggcagggcagcggcgcacaagtcggttgcagcatcggttctttctcctgctccacttttgcctagcaccattcctttttccaactgaggagctcggttctttgtttggagccgagaaacatcacaaagccatggccctccaccttctctatcttctaccacaacacctatcctatgtggcacaacgaatccacgcgacacggtggcgcgtggaggcccttctgctacctccaattttattcattttatctgctcattaaaaaaaatcatgtacacaataatatagtatctctgatatacaaatcctaaaactatagaatattttttattagtttgctttcatacaaccccacttctttttgtgcatttcttagagcttatgtagagtgactcgttctttttctccccatttatcttctacatcttatcattcaatcctataagtaaactaggtgattctcagcgctttgctacgaaaattactaagtaacttttaatattttttaataatcgagctaaaagtaaaaattatgttaagagaaaaaaataaatttagtagactctgtatgagattgtagatgaaatatgatatcccacactttgattatatggataaatatatgttaagtattataaaaatgatggatatatatatatatatatatatatatatatatatatatatatatatatatatatatgttaaaaatattgtgaaaaataatatgaaggtagatgattggatgttgatttgtagaatttaatgaattatagatgatgttgcatgattacataagttttgtatataattattgctagtgtatgatgaggtgacatgtttgtatgtagagatttagaattagtgggttataactttatagtaagataggatggctcggctaacgttttattacattaaacattaaatttagacacaagttcattacagtactgtaccagaagtttgttatctaatcaccgacattagaaatttgtaataattgaccgatacgagtgctaaatgcgtattgatggttggacctgttcatttgagatgtgctttatataggagtatactaggtgaaaccccgcgcattgctgcgaaaatttaatatgataacaataaaataaataacgtgtaagatagctagataacatcagattaagtaaattaatgtggtttataataattcaaatttaaatagtatgtaggatggtgactcaaacgtaaaaagtaaggtggtatgactttatggaagaaaataagtagggaaatagtttggaccgtagattaatcatctaaaggctaaaaacaattgttgtgatatgacttgattagagaaaaaaaggagaaagataatttagaccatagattaatcatttaagcactaagtgatgatgaactatataagtatatagcgtattataaaacataataataaagatatacattgaaacattatgtgaattatgttggatgataatttaatatgtttgtatttgaaaagctcttaaattataaaaactataaatatatagcatgtttgcatgatgtttaaatgtgatgattgctaatggatgataatgtggcatcttgttaattagtggatgatgatgtggcatctttgcatgttaagtttaaggagttagcgggggataactttatagtataggatatgagtataagtcataactaattttaaattaacttaaaggtacaagtatacaactattgccttaaaaatgatatctctgttttttttttggttctggatatgcgtctttggaagctgtataagcttatgcgtaggaccaacaatgatatctctcgtgattcatgctttaactttcggctaaatgcatggttggatcttgtcattttcatttggtcctctacttgacccactgggacacagagcttccaataaacgccgaaacactttgctgaacatccttggttgtatggtcaaaatctcatggagatgtcccttgtgccaggtaggccatcacaaaatcagctgatgatcactcatcactcgctctccttaaataccactaggttgctgccaaatcaaggagcagaaatgctgcggctaccaagaacatttacacaagagaaacaggcgagtgctttgctgacaattgctgggcttcccactcacagtgataaatccatgaaagcattaaacctatcaacaaaatcaaccaactatatagtttataattaattgcaaaaaaaacaaagtttcctaagtaaatttctctagaaatatagatttgtcatacatgaatttttcacaatttggtccttttcaaaaccttattttacaaatagacccatgaaaaaaacttattccaaaaatggtcctttttggacgccaaagtcgcttgcaccgtggtccaataggatggcaccaacaactctggtgccatcctcctgccaccgtggcgggtcggtgctgacatggcagaggagcgcgccaatgaggctagcaccgccctcccaacccacgccctttttttcctctcctctgtagaggagagatgtcttaggagcacataagaaccaaccatagaaaagttaaactcaaatggatgtaatatgtgacctgtagaattttccaaagctctaccgaaaagcttctcgcctcgaaaacataatcttgcaagcggaatttggaggtctaatttcaccaaacccgatgaagcgggggacaatcagatgtaactttttatgtacatgtccatgggtatagaatttgcctaattccgagtccgtataagaaagttatgcatgttttaaggaaggacactcgagtgtaaaagaaaaaactcaacaaaccctatttttttataggatactattttttttggttttttttactataggaaaaacaacgaaaaacaggaagtctcctaccgatataatcttgagtgaatttgaggagaaggggagagagcaagaacaagcagtcgaactcggacttgggaggggggggcgccananatgctggcgcgctccccctaccatgtaagtttctgacctccacggtgatagaagggtggcgccagcaactctggcgtcaaaaaaggactatttatgggttaagtttttctaggggtctatttgtgaaatcagtttttaaaaagaatcaaattgtgaaaaatccagtttgccatactcattccgttctgaaaagacgtttcgtgtttttctcaaattaaatttcttcaagtttaactaaatttgtagaaaaatataatattatttcaaacccaaaaatatatatgctataaaaatatattcaatgatgaatttaatggaacttcatatagtagatattgttacaattttttatataaatttttgacttattacaaacataaaatggcttatgggggaaattatatgttagggtaatactaactgttaatctaaatgttacatatggttttaagaaactgcaaattcatactttgttcaatataagagtaacctaatacaaatataacatatatatatatatatatattataactataaatctggatttagtcctaaaatatactagtatcatatctgtttgtatttgggacgaagatagtatatggttgttttgtgctgctttgagcgcgcctgacgtgtggtacaattgcctttgattgggacagttctgttttctaatgatgattcggataggttttcaagcgaaaacaaataagcatgtccacatgcttgtataagccaagtaagagttgcttcactttacatatcaccttcatgagttgactgacatatatgcaagtcaaagtcaatgcagccgtagattttagactttctgaaaagtggagtatttatgttggttgatgagaccccaatttttgttttgagtgagatttaattagggcctatttggttgaggactaatgctctacacattaactaagatgactaagttcagtcttgtcacattttgtggcaaacaaaatgataaactaaggggttgtttggttagcatctaatttagtagatagtgtttgttttctgccacaactttactttccttagctcttagccacctgacagacatgtcatatattttatttttcttacctaactttggttaagcttagtttgtcattttatttgccaaaaaaatgtggcaagatgaagctcagctattttagtaaaaaatatgtggcgtcattagtccccaaccaaacaggccttaagctagggctgtcaaaaaaagctcgaggctcatgagctattcgagctcgactcgtcctaggctcgattcgagctcgacttgtcctccaaacgagcaagcccgagcctgtcccaaagcttgtgagctttatcgagccgagctcgagcttctaacgagtctagtaatatatgattttttttgttgttatttaataaattgggagatcaaatatgttatttgtatgccttgtattggcatcatatatttattttattatttttcctcttctgctaatatgatgaaccctaaattaattattttttaaagattatcctttgaaatatacattgttctatttaaaaatcaagctcggtagttgactcgagctcgaaccgagcctgtttgaaagctcgaacattttataggcttggcttgagcttggctcgagtttgtatcgagctcgagcctaggcagacgagctcgctcgagctcggctcgttgacagccctaccttaagcttagataaagttagataagaaaatagagtgtatatgacatatggccaggtggctaaggttatgtaagatggatttgtggcatgaaccaaacattatcgactaaaactgtagcttacctaaggtaaggtgtggcaaatttaactgtagcttacctaaggtaaggtgtggcaaatttagttgccaaccaaacaactagtcgtttatctgatcatgaaaacatgtcactcttactccatattggtagtataatactgcaatctctccgacaaaactttgatcactgatatttatattgttgtatactagtacttccgttttatattacaagaatctttaacttttatctaactcaaccttttttaaagtttgaataaagtttataaaaaaacttagtaatatttttgacaccagataaatatattaccaaaatatattcaataatagatttaaatgcatttggtgttgtaagagttactatgtttttatataaatttgatcaaccttataaaagtttgattttagaaaagtcaaaatcattttataatacgaaatgggtggagtatttgtgaaatcaaacaaaactgaaatattgttaaaatatttttcaagacatgtcaatggtatgaatgtcaatggtactagagtaactttttccaagacactgccagatgccaatgctgtcgctgtgaatctcatgcaagctagggccatatgatgtagtactaagtccgtcctaaaataagtacagccgtagatatccgtctccaacgtttaaccgtacgtctgtcttatttaaaaattttgtgaaaaatttaaaaatatttagtcacacataaagtattattcatgttttatcatctaatagcaataaaaatactaatcataaaaaaagtttctacgtaaatagtacaaaactgcacttattttaggacagagggagtacgttctcctccatgatagattcatttatgcaagagcaaatgagtgaatgacactttctgttactgaagtttcgcttagagccaacctttacctaatatttttctttggactaaatattttggtctttgttattttaccaccttaatgctaagtgacggctctggaaatttttccttaacagtgcctacttcatgttcgaaattgccatatcactacaaacttaatataaatttacaaaaattgctcaaaatatagtacaaaatagtccctccgtcccaacatctaaggatttttaaaacttcacgacggttttcgaaatgctactttgactaatatcatttatatagataagtttttcaaaataaaaagatttacatactatgatactggtggagaaaccatctctggtcggtcgacccaaatccacaatagtcctggttccattaaaaaccgggactaaaaacgatttttagtcccagtttataagcataacaggactagatgatttttattcctggttggagttaccaaccaggactaaagatctaactttattcccggttggtgttactaaccgggaataaaaatcaacacgtactatataatccctattacttatcctctttttccgtccacacaacgaactctttctctatctcttttttcctctctaagtccttatcctttcttctttcttcttccttagttcttccttcttccttggcgccgcttggatcggagcgagagcggccagccgcttggagcgagagcgggccaggcggcagccggcggctggtgcggcagcgcggagggacgggtggcggtggccggccggcgcggaggggaagctggtgcgacggtgggcagcagcgcggagggccgcggcggcggcgcgggggccggtcggcgttgaggggaggcggtgcggcggcgggcagcggcgcggagggccgcgacggtggcgcggcgtcgggcagcgccgtgggggccggccggtgcggaggggaggcggcgccgcagcatggcggtggccgaccagccggcgtggaggctaggcggtagcggccggccgtctcctctgttgttttttttaagaatttgtgatttattgcaggatcatgtgatgaatttgatttgtgtgtgatgtgaacttgtgatgtatttgtgatgaattttgtagaaacttgttgtcgacgtttgatgtcgcgattccggtatttgcatagtatggggatcgttggtactagggtatatgcaagactgagataaaagagatggagactgggatttttatacaggttcggacccctgaattgtcaggtaataaccctacatcctgttggccgaagccgatattgctcttattcaccataatcacaccaatacaatatttggggcagcctatctaactgttgtcgatatggcggtctgaaggtctgactcgtagtcgacaacagggtagtcttcctcctcgagttcgtgcccgacgagatcagagacagcgctttcatctctcctgacagtatccggagacatcgtaggggactagccgtgcttatccctgaagtcgatatccggtgtcttgtcttggcgtatgttggcttgtatgttgtggcttctgttgttccgtagattgtggtgggtgtgtgcattgtctcttctatggtgggtcttgtatttatacccataggtgtctccttgtccaagtagaactagggaaaccaatatggatacaatccgagtagtccttgtcgtttccatgcagaactctagttgtctttccttatccggaactcctcctatatccgcaggttgtttccgtataggacatggtatgtggtggatcctgccgagatttagtcaactactattaggtatgtggtatccataaccctgacagtagcccccgatttcaatgcaaatgagcaagttcatattctcaaccgcagatcttggaggaactgttatcgagctctcatgaccattctcgatgagttcagagataacgttagacttcctttatcagcctcgtgcgggcacctaaagggtttgtctgagtcaatctccgacgtcaaccaagaaagtaaagagcatacgactaagtctcccgtcttactgtaatcgagaatttggattgaagtcaagaaattttatctcggcgggtacaccatttcttcattccgtattccttgtcgagatccaccaaccgttctcgagcgatcgagaaggtgtagaatctgcgacgaagccttatcaacacttgtcgtactcgccttagtcgatcttggtgtagaaccatagagacatgaagtcttcgataatgtcgaatagaattttcctgaaatcaatactcagaaaagaatattagatagaaatagcctccgagcgaacgctcaaagggtaacatgttatagaatgtatggaaaaccgaaaatgaattaaacttacagaccaatgttttgtatatgagcgtctactcttttaccgacttcgatcagtcagtttgtttagttatacactctccctagcccccagccttgtcgtcggagaatcgttctcggaggataaggctcttggacctttgacctaccttggttgaacaagcactgatcctagcccccagccgtgaagttggaaaatccaatttccgattacacggcttggttaatacgcacggcgagaactcttacacgaccagatcttacatggtctttcgtctctgaaggatccaacaaggccttatccgctctgggcgtccctagccgaagttcccttaggttcctcagaggccttgtcaagacggcgtaaagggacattaggataggtttcaacgctaggtgtcttttgtggtaagggatctttgggtaaaacacttggcgatattgtgcacctgatatcaactctgttggagtagagataatgggagaatcgctacacctctggtcaagaaccaggtagtagtcgtaactcaaccactataagtaaatgtacgagagatcgttacgattgactggttgagaaccagtgagtaggtgtctctcgatcatttgaagtcgtggtacgaggaccgctgcgttattgctgtagtcgtacctcgaccatctgaggttgcggtgcgagagattgctacgtactgcttcgaggaccaacgaacgtgtagaatcatctctcgaacaccaatggaggttgcggtgcgggagattgctacgtaccggttcgagaaccaacgagcgagtagaatcatctctcgaacaccaatggaagttgcggtgcgggagattgctacgtactggttcgagaaccaacgagcgagtagaatcatctctcgaacaccaatgagggtggcggtgcaggagattgctacgtactagttcgagaaccagcgagcgagtagaatcatctctcgaacaccaatgggagcgctagagttggtttattacatgtgcatctcatgtggccagtatgactcacacacccaacttgtagcatatctggatgtccgttcgcaatcatgttgggtgatcaagccgatagcgttcgcgaggaattatccgttaccaaccttttctcgagtagtccagccatggccggtgctatgagataggtcgtcggtcttcgttggtaggttgggcgtgacgactctacatctgtcgagatcgttctcgataatgcggtgtacttgaccacaacctactcgagtgctcaattgtccctgaaaaatattttctagaagacaagacatatagcagataatatcgagtatgtactcaaaaaactgcatggatcttctagcattatcaggatataacgagcagattaaatatcagggcattatgtaaaccgtagacaagcatgatttatacggaaggaaataaagcaagcccccagcgttagaccgtagtcgatttaacatcggggacactcgcgcaatagatagtgtataaaaaacatgctctaggtaaacataataaatcatatatatgataatatcgtatggtctgaaaaataggtacggtaatttgtatataaattattgcgtacctttgtagatacatgccggatgtatctacggaattagtagatcaacttaaaaaaccaatctaccaattaccttgttgcgtactcgttcaacatcatacgatctgacatctttcggtacgccgcgaagcttgaggcttggatgatctcgatagaccaagttgtcgatgacgatgatggttctgatctggttaggttggatctccccctcagctgaagtcatcgagtagctcattgtcggagaatccatcccttaaacccatcttgtcgaaaccttgaagcaccaaaagatcccctacctggcgcgccactgtcgacgtttgatgtcgcgattccagtatttgcatagtatggggatcgttggtactagggtatatgtgagactgagataaaagagatggagacagggatttttatacaggttcggacccctgaattgtcaggtaataaccctacatcctattggccgaagccgatattgctcttattcaccataatcacaccagtacaatatttggggtagcctatctaactgttgtcgatatggcggtctgaaggtctgactcgtagtcgacaacagggtagtcttcctcctcgagttcgtgcccgacgagatcagagacagcgctttcatctctcttgacagtatccggagacatcgtaggggactagccgtgcttatccctgaagtcgatatccggtgtcttgtcttggcgtatgttggcatgtatgttgtggcttctgttgctccgtagattgtggtgggtgtgtgcattgtctcttctatggtgggtcttgtatttatacccataggtgtccccttgtccaagtaaaactagggaaaccaatatggatacaatccgagtagtccttgtcgtttccatgtagaactttggttgtctttccttatccggaactcctcctatatccgcaggttgtttccgtataggacatcatatgtggtgggtcctaccgagatttagtcaactactattaggtatgtggtatccataaccctgacacttctgatgtaatttgatttgtgtgtaattttttttaggatttgtgatgtatttgatttgtgatgtaattttttagaactttaagatttgtgatgtggacttgggatcttacttcgatttgggatatgcataccacccatattcgggagaaaataaaaaagtatatgcataccacccagattcgggagaaaataaaaaaggaaaaaaaacctggctatcctctttagtcccggttggtgttggactaaagataccctatctttagtcccagttggtgttaccaaccgggactaaagatccatctttagtcccggttatttcaaccaggattgctactcccagttgaaaacccgggactaaagggggttcccaactgagagtaaaaatggtttctctaccagtgatagtttgtttagtgataaatctagtaacaccattctcatgtgatcaatctttttaattttttcgctattaataattaaatttaaaaatatttgacttagcaatattttaaaaatgtttatattttgggttgaggagagtagtaattatttttgcaaaaatataatatgaacatacaaatatgtcaaaatctagagtggtagaaggcctacatggaccatgccttggagccgccacaactaatgtttatgtcgagccacatccaatcttttctctggcaaagatgtaacttgcacataactagaggaggtcgtcactatgaggatgcatatgttgttaaggctgctaaatacgctcacaaggagatttggatggttcaaaatgtagtaaaaaaaaaagagagcaaaaactcaagttcgaagtgaaaagttacagaaaaagtgttccaaagtgaacaagatatatttatccaattgccatgtttctctgttttatagtaatattgttagaacacaatacatggattttgtcaaacacgaaacgtctggaaccagttgtacaaaacaatattccctccgtcccataatataagagattttaagtttttacttgtaatgtttgaccactcgttttattcaaaaaaatttgacattattatttattttatttgtgacttactttattatctatagtactttaagcacaacttttcattttttatatttgcaaaaaaaatttgaataagacgagtggtcaaacgttgcaaacaaaaactcaaaatacagagggagtactaaagttcggcacaccattttcccaacccatttactcacatctatcgttttccgcgggcatgcttttcaaactactaaacagtatttttttcaaaaattttctatacgaaagttgttttaaaaattcatattgatccattttttttaaagaaaattaactgatgcttaattaatcacgtgtcaagagaccactccgttttgtccttcagaaatacgcttcctgcaatttcaattcagtagcacaagttttcaatctctcatgaataaatgggcaagtacaagtaccatgatcgaccgtgtgcgatttacataatattcacaggttttgagaggtgagtctgtacatagcaccatttcagagttcagaatgcaaactcagagaaccacaaccaaaatgagcttcagattcagcgcaactgcgttgccacacgacttcgtggtggaaataccgcaatcctttctttcccaacaaaaaaattactgcatttcaatcatacttaacttgtcaccgttttcgtccgctcagcaaaccatgccttccagtcagtaaccttttcgtcaccattggccacctgaagtatacgcggaagataagaaacaggccctaaacttgtttgagctagtaattatctaaaaaataagaaccttgaagcatatgcttgagctaattacctcaaaaatgagtgttgtctggggaatggagtccagggcctccacacagattgtagcagcatcttctttgctcattcttcccttggctgctgcaccctacatagttcaagaatcatatgagagtttaccaaaaagcagaacatcagagcagcaaaccaaattgatgttcccaaaagaaaatattcttatcaatttgcctcttcaaactgctaggtggaaactacagcatgcttcgaatgaagggaactactaatggtctaatattacataacgaacattataatatttgaatgtctttgcctagctcattgtgcaaggttactaaagtaagataattgccatgctgatacctctgtaaaatcgaaacctctatcaccaccaggagtgctttgcatcgagccagtcctgattatcgtggatgggatcccagatgcaagaaccacttcttcatccctctcagcaagtttccgcagtttgctgttcataatagcttggagaccaccgctacctctgtagacagagagctgcattcttatcaagatctcatatggttggtgattgaatctaagctgaactggattagacaaagttacaaaagcactgaaacctgggatagcagaacaatgtgttgcacacccttgaggtccaagtcagagaagaaaccatcctattgaagcataaatgtttaaaggaagcaaaacttagaatgaggaaggaaagggaactctagaagcgatacgacgttttcgtgtaagtatggagcacagaaatggttcacaatctctcatgccataactcaaatctaataatcgttatctaagaaaaatactaaaccccaccaataccctaatcatcaattgcagtcaatgtaattaggtaatctgataaatcaataggccaagaaaacaaagtttgtaacatacatcagctggacaaattatagcacgaacaccccttagtgctttctttgtgaaggacttatcttccatattaccaaccatgcactacaaggcagcagagaaagtgattatgaggataatatttcactaaaattgttagtacaagcatgatgagaaaacatccaaaaacatctatggcctttttctaataactgatgcaccaaagaggtggtatacaagaacgaaaagcatgttaaagctatatgtgtgaattacaagctgtcacctccacgtaagttccaaatgcttcttcagtggatcgcctgtccttcactaatgcttttattctggcccttttcaggattaatgataatatcaccatctgaaaaaaaatatgggcagtttaatatgaagcaaccgagaaaagttaaaaggaacatgtaactcaagatgaaaacaaggaacttgcaaggttcactaagaaaactattaaaacaaagaacaggagtctttctgggccgacccaagctaggccaaccaaatttacttaagattaagggttacgtacaaatatacaagctttcttacttcaacaagaagctgtcaaagtagatggaagttgccacaaaagcgacctcccaaaagaaaaacaaattacggctcggttttactctcctaaattcctgatagtgaatttatccgtagactgtctcttgagcatttgttaagggggccactcatgtgtgtgtgcgggtatggtggtgtgcatgcacgtctgtgttccatgcagcaaaaaaaggagaaatgattgaatcataaaatggtttctccaataagaatatgcatagaaagaatattcagcggaaatccatataggatattatattatatggaaataattatatacaccaatcttaaatctcaaattactcgcctgacatgtggctgtggatctacattatctatatcctgaaacaataagttgatggtataagtttcaaattattgcccaatgatctgatcatgtggctgtgtacccacatatcaagattgtagtataatattctggtcactactcactagtgaatggcaagcaacttttaggctttgtgaacattggattcgttagcaaatctgcagcagaacaaaagagtaacttgaagaataatggcaacctgtccaatctcgctatcgccattggtgactagcacagcatctcgaggctcctcgatatctatttctcgtcccaaatttgcaataaataagaaacagtgtctaggaaagggtaaaaaaaaaaaagaacgcagcgtactgtttctacgcacctgaaggctcatcctccccatcctcagcactcccatccttgggaagcaaatcgggcgctccataccaccgcctcaactttggaccccctatacgacgaatatttcagaagaatgcaactaagtcacataatgctttagctagttaagctgtccaataaaataaaatcagcttaattttaaagacttcgtccactgacagacaaggcaatgtaatgacagcaattgcatgtcaaactaccaaagtacataaacaagtttgatatattttttttcttcatttttatagcatcactgcacggctacccgtgcccatgaatcctgcaccagcaactgaagaatcgagaatttattttgtgttgattcaggggaaaaaaaaa

SEQ ID NO: 24948 - DNA, 4946 bp, Oryza sativa
aaaaggttttacaatgggaaaggttgacaaaacgttttttgttcttaagcatggtgataatcaactatgtcgttcagatttatgtggatgatatcatctttggttgttcgactcacgctttagttgtagattttgctgagactatgcgcagggaatttgagatgagcatgacgggtgagttatcgtactttttgggattgcaaattaagcaaacacctcaaggtacttttgtgcatcaaacgaagtatacgaaggatcttttgagacggttcaagatggagaattgcaagccaatttcaacaccaattggttctacagctgtgttggatcctgatgaagatggtgaagctgttgattaaaaggagtatagaagtatgattggatctttgttgtatctaactgcttctaggccagacatacagtttgctgtgtgtttgtgtgcacgctttcaagcttcacctcgtgcttcacatcgtcaagcggtcaagcgaataatgaggtatttgaatcatacacttgagtttggaatttggtattctacttcatcttctatatgcttaagtggatattccgatgctgattttggaagttgtagaattgataggaaaagtactagtggaacatgtcattttcttggtacatcattgattgcatggtcttctaggaaacaatctagtgttgctcaatcaactgctgaatctgaatatgttgctgctgctagttgttattcacagattctttggcttttatctactttgaaagattatggtcttacttttgagaaagtacctctgttttgtgataatactagtgctatcaatattgctaagaatcctgttcaacactcacgcacaaagcacattgatattcgttttcactttttgagggatcatgttgagaaaggagatgttgaattgcagtttttggatacaaagttgcaaattgctgatattttctctaaacctttggattctaatcgctttgcttttcttagtggtgaattgggcataattcatccttttggcatggtttgagggggagtttgtacctcatggttttatcaagcaataatatgataatgagaaaaaaattgagaaaagagagctttgtttatgcatatggtattttcttgtgcatgctagcaatattttgaaggtttatttgtctctagcatagcttgtatgtattctagtcttttcatgagatttagattttgcttttaagggagatgatgcatgacacttaaattctacttgaattaagcaaatatgctatgttgatgctagcatatggtttgatctataaatgctctatatatatgctttattgacttgttattcctcaaatagctttcattgctcattgtgaaaaagagaataaaaaatatgaaaaaaatgaataccgaatccttggaaacagtcttgacgataaggatgtattcgatgtgagcaaaataatgggtgccgaatccctggaaacagtcttgacggcagggacatacccggaataaaagagaaaaatatgagaaaaaggcttaagaaaagaaaaaaattgaagaaaattctcttggttattttgtgataatggttatttgagaaagagtgattaatgcaataggtaaatgtgtttagtgtttattcttaaacttatgtgcttgttaagatgttgcattataaatcgtatgaaatcatgaattttgattgttgatttaagcttaattataaaatccttggttcatggttatactttaatgcatgcttgttctgttatagatgggttcatcttctttttattgcaacacatgacttgatatgctatatgtaagataagctcttgaacattaatgaacataattcctatgcttgatgaaatcattgtcaaaaggaggagaagtaatgtgcaaatttttggatttttgggagaagcaaggtgaatttttggagagttgttgagaagagcatgttttttgttcaattgggaatttctttcttttaaaaagggggagaagttttcttttggtttttcgagcacgatgtgtacgtttgtacgaagtgtgctttttaccacttttgtttttatttttccaaacaccaaaacattttcgatgggtttgccaatgtgttcatcaagggggagattgtaaaaatcaaaggtgttttttattattattctgtgatgaacaattgggcattggagattattggttttgttatttggaatttattcacgaagtggttttggagatgattggatttacaagtgaatcacaggttctattattttatgtgaccggtcaaaccgggcaggtattcccggtcagcccggcggtatatgcgtggtcagaccggccagcccgcggtctgactggccgacgctgtgtcggtttcggtttcgggttgtttgtttggatatccgtgattgtttcatgattatggcttctagatggatactatacgtatgtaatactgttgtttgctactaatgagtcaagttagagatagcttggtctcagaatatggtttctttgtttatttcatgtgtaggtgactcgatgcctcgggagagtatttgcggtgatggaccgggagtcggcttggggataagacgacgtccgtggtggtcagagatcatgcgggatacttaggctagagttgatgcacgtggttgatggagattccatatggcatacgattgaggtattgtgtgcgtatgggatgcggaatcgaatttggaaggagtccaaatttggtacgattggttatgtaaagtttgtttcttgtactagagggtttcctaaggtgtttaggactcttagtatgagtttggttcgtggctttaggctgcctacctcatgtataaatagagagggagcgtgagacttctcggtatcgctttagagagcaattgagttgagttttgagttagggtttcgagtttagtcgaaatttttgtaaggaatgctgttggtgcactttgtaaacacagagagaatcaacaaagttgtcatctactttaagagttcttcgatttgtgtttcaccgggtttcggcggtctgaccggcggcgcaccagcggtcagactagtggcatcgcggcggtccaaccggcgggcacacagcggtcagaccgtcttcggtgacaggaggcagtgacgagttttggcggttagaccggtagatcaacaccggtcagaccggcggctacgcttcggtcagaccggctaatctactccggtcagatcgatctcatcaaaattgagggtaacttttatttccgctaaaagttttcggtttttgggtataccaaccattcaccccccatttgttggcttatttcttatatttcgatcctacatattagaatgacaataaagctggattacacataggaaattaattcttcagattctaagacaatctgaagaaagaggaaaatgtggtagaaaggacatcacgtcggtttgattgtcaatgaggttcgtccatattgctggaatgctggacgagactgacgacctcgcctctcgtcatgtatcgtcatctctacttgttggcagccatgcaagttatttttcaggttttttttcagttaaaaaaaaaaagtgaactttctgttgttgcacaattgtagtggcttgcgattagaaaatttagaggagtttgaggtcgaattgtcatctcaatgactcaatttcccccctagcgaagcggttgcatgagcggaagcaatcctccttgcttttgaagctcgacattgcgcaggcattcgattccatctcctggcaattcattatagaggttctggaacacaaagggttcagtagccgttggtgtgcttggattgccatgcttttccgaacagcaagcacgcgggtcctgatcaatggcataccagggaaccctatcttgcaccggcgagggctgcgccagggggatccaatctctcccatgctgttcgtcctcgctatggactcgttaagctctcttttctctaaagcagagaatgaagggctgttacagccgctgcacctgccctaccgaacttccctctacgtggacgacgcggtcgttttcattcagtcggatcctgaggaaatcagcacaacaaaggaaatcctacacatctttggggaagcaacagggcttagggcgaatttcgccaagtgtgcagctctcccaattcagtgcaacgacgacaacattgcactgatccaggatgaacttccatgtcaggtcacagcattcccttgcacttatctaggactgcccctttccatcttccgtcttcgcaaagaagacctgcagccgtttgtggacaaggtagcctgtcggttgccggtatggaaggcagagcagatggcgcccattggtcgggtcactatggtaaatgcggtattaagctctataccgatctatctgctgatggccatcaatgtgccaaagtgggtgataaagagaatcgataaggtccatcgcggcttcctctgggcctccggtgccgctgggcttggcaactgaggacatcgccggaaaagccatggcatggactcaacgttccgatctcgcaaaaggagaggaacctgctccaagtctctttgacatgtcgagtcagcaatggaaagaacgtgctcttctgggaagacaactggatccaagggtcgtcaatccgcacccttgcgccggctatgcatgcagcggtcgtagcaagaacgcggaatcgcaggacggttcgcgaagcactccaaggtagaacatggatccgggatatatctgggctttgggaatccaagctatcctagagtacctcagctggtggacatctttgcaatccttggatgccctattggaagagccggtttcaatcatctgcagatgggagtcgttaggagaatactcagctcgctcagcttatcagtccatgtttgtgggaagggtccaattccagga

SEQ ID NO: 24949 - DNA, 1407 bp, Oryza sativa
cagtagttcatcaaagataagaagaacacattattgaaatctatttgtgaatctccaaccataattgataaaaagtgacatgattattgtctcaagcctatcgtatacagccttcataaactcgtcatcttcattataactttgtagctaagcccaatacaggagccgatacgttctgtagagaaacaaaactctcgtttgggtcgctaggagtagtatttggtaacgtgattcggaatttcggaccgtctcgttcgtttggttcctgatttttgtataaaaatgccccttcgtttgctagcgctctgacattacgtcaagtaaggagatgcgagttcgtgtgcaaaactgtttccatctttaatccgtgtgagttctgcaatacaaatatacaattacagctccaggaagccaagcaatggtcaaaaatcaaggtacaacttattgtacgcaacaaatgaagttagaaactaagtttccgaaaccctcttcaagtttccccttcctctagcatcatcggtcagaggggaacaaaattgtagaacaaaaacaattaattccacctataatcttcaaatgaagctgatagtggtccttgtcactctcgagcagcctcagctgacagccgcggcagcaggaactggtggcagatcaatgacaccgtggcaccgggcacaaagagtaggatggtcaaggaaagatccaacgtctcgggtataattccagcacctctcacatttttcgccatcggcgcgagtcacaccaatccagatgttgccggtgcgctcactgctaaaagttccagtgtaggatacaccagatgtagtttcggagcttacggaaggaaggatctccacctgcagaaacaaagaaagatggtgtaaaaaaaaaacttgaatgcagaagggcagcctctagttttgaatttacctcagatgtgataaacaggcggtgcagagcatcagcgtcattggttgccgaaaccagctcctttagtttggacactgtgttagcattttccgcgtggagataaacttttgcctctaagctagagcctatcagctttcctgttcgagcactctccaaattttgtcacctctgatctcaactgttgccaagtaatggaattttttaatcatgaaattaatcttaatacgaaatcataaatgcaagttcgctcatcaccatgaaatcaagaatagccgcaatgtcctataaactataggatcaggtaatttagcagaaatgatgctatttcagatcataagtagtagttactcgtgtatacaagaaatcttgtctgagttgcacgtctccaagttgaaggcagagccttatcttttaacgtaagtttgatattcgacctataggaaaaaaactgcaaagctatataacctatgatgatgg

SEQ ID NO: 24950 - DNA, 681 bp, Oryza sativa
taacgctgaccttgtgagacgtttagacctgacaatatgggaaacgatacaagtgtgaaagagcttgcatcatcatccataatttctgctgccattgcatatattatattcatgataaaaaatggatattgctggctgctgaaagtagagagagagagagagagagagagagagagagagagagagagaccaaagagttctgtaacttccagaagcttcaacacatatggtacttgaagtttaagagaagcgttacctgcatgcagaaatgtgacttccgcatagccatctcatgtgacaacaggcatttatattcttgccaccacagtccgatttttccataagctgatatatgtaaggtgtaacctcctacagttcaacattgatacaaggcccattaagaaagaggaaagggataatgcacagtttgaattctgtacctggaagcatatgaagtctgggttgtgaagttgaataagatctccaagagcgcccagccttctgtgcagttcaatatcctctctgatccagacattgtatgtcatgattttgaaggtcttcttgtttaaattattctcaaatttttctgcatgacaagatttgtattttagtgtggccatagcgaagaagaagaataaaagtacagctttgaaggaaaaataaacttctaattatctagat

SEQ ID NO: 24951 - DNA, 622 bp, Oryza sativa
tcggctccatcatggagaccagcgccatgaagaagagctcgcagtgctcctgctcgtgagcgacacacagagactggatgttcgctcgtgtaatgtttttgtttcgacatatcgattattacacattcacatcatttcacctcgcgttcttgtcaattatagagaaggattaggcatgtaaaacattgtaaatttggtgattgacaagaaatggtttagattcttcatctgtgactgtgattatctacgcgtgcgtgatgctatgattcgtcgcttagctaacagagcaagctagctcggtttttctaatgccacataagcgcaacgtggactttttcctatttcatatacaaaccattcaggcgcacctgtgagtgggccgcgtggcctcgtgatgccatatttgggccgtttcttcactgtatgggctagaaagctaggcccaacaccagaattcggcccagagaaagttggagatgaccaggttgtgcaggtcaaagggttcggagttactaatcaactccaaacgctggcgccggagttttcatttctgaccccgttggcctttttaaagatcgaactggtgattgagtgtctccgacgagcatagcaccgagcacgt

SEQ ID NO: 24952 - DNA, 64356 bp, Oryza sativa
tatattatgtattgttagaggaaaagagagagcaatagtacactagtaccaatcagcagcccgatggatcggtagatagatttggggcattctcccttttttatggccttggccctacatatgtacattgttagaactacttgtgcaacagctattatgacttgcctctccctccaatgactcttactataaagttatagcctacatcatgattcactaacaattattacatttatattttttaaatagtacagatacatacatagtttccgtgtacgacagaaaactcgaatggcataagatatttcggcttaacccccaagcaatcccatgcgagtctaatcttgagaacagatccaaaccaaaattatatttatactgcaatggtatgaaaagaaacaaaaaataacttaccctctcaaggcagaaaaagtaaaaccaggtgaatcatacaaaaaaatttgaatcaaaactgccaaccaattctcctttttttttactgaatattgcaagttagtattgtgcaatgctttcgaaggtctgaaaagtaatgagatatttatcttctcaaaaattagaatagctatttttctttgacaaatacaattatgctagtactagatttaaagagtgtacaactagatagcataatacatggaatatatcttcgatcgctctcgttccgtctcaaagaatcagatatgttccaattcgcatgaactgtcgttgctaatttaatactctatctcttttattataagtcttagtcctatttctttaagtttaaccaaatttatagaaaaatatagtagtattttccaccaaaaaatatattatcaaaatatattcaatgttactaatttttttataaacttagtcaaacttaataaagtttaattagaaaaaaaaaccagacaacttataatatgaaacaaaagggaatataatccagcgtcttgaaagctatctgatcagaaatgcaaaaaaagcttcacctgattaacatgtacatctgacttaatttggaccaaactaattgtgacgactgtacagataggttcggtacggccaatgtctccaacaacatatattcccaatggctaatgtatatcacaagcaatgtctttattgttataaggtgtatcactagggattgatttgcctggatgattcacaatttctgctttgatctaattgcagagacgcattatgtggatttgtggtggataaactcctggagagtggagatctaaggaattgaattgtctttccatccaaaaaaaaaggtattgaattgcctgtttttctggagatcactaagcaattaaattgtctcgatgaaaagccctggttgtagatctttctatccctttgcacacatggccattaaacacaatacctcgccatgaaacacaataccatgcatttgattcttcttcccgaagccctacagtacaccaagcattccttcatgttttctcccacagttactaggtgattcgtagcaagataatgcccaaccccagccagcaataataatgaagggaaacatatgcagagactgtaatctctccacagagcacacttgatcaacttatcatcggaaattgcaggaaataagcaatgcaatccagtttatcttcagattaactgaatatataaccaaattaattaagtattctgtattgaactttccagattaacataattaaaaatgttttagttcaagaggcaattgaggatttaaaatacaaggctacaagttccttcctacatggaggtaacaataactgcaattgcccggccgggcatctagatcacgagaaacaagatgagatcttcataaatcaacccataattctgaacttgtcgagattgttaaaaagtgcatctaaagcactactctctcaactcacaaactaagattgaaaccttaaaacaaaccctaaaatttttctcccaaaaggtaaatgtacttttagcctcaatccctcttctattacccataacatggttgctcctagccacgaatccaagcaaaactaggacacctaatcacatagaaaacctaccaaatcagggaaacagcatcccatacaactccgcactccaaacttttcaaatttggactctaatccaaacttcacttatctttccatatgcacacaacaccatgtgtatgccataaaaaaaacttcacctccacatgcattgttttcaagcctgagcgcctcgcgtagacctcaacttctcctaagcccaatctctatccatcaccgactatactctcatggtctcaagcaacacctgcacatgaacaacaaagttggaacatcacacagatcaaaaccagattaactacaactactcaaaacctgattaactacaagtacttaatgatgatctaacatatatcaacatatgtcagcaccttaccatttgatgacaccgcaagatttgtaatcttattctggaacttgtttaacacgcatggtaggcatatcaggcctttattgagagaaaatcccttgcagcagcctgaattttgaaccaataccttatgtgtttatgattttttttctcacacccttgtatgcccctaaattctgatttttttttatctcttccatacaaatcatgtcgattgaccgctttaagagctattgaaaacaattatgtccttaggccctgtttgattcagcttaggattattataatctggattattaggagtaagctgaaacaaacagatagcttattatgataaattattataatctataagccagattactataatctggtaagccactctaaaggtgcttattttagattattgggtggctaacaactaacaaacagataataatccagagaaacaaacagctagcagcttattctatatcggcttattataatccagcttatagtaatctagttttataatctagattacaataatcttaagctgaaacaaacagggccttagatgtgaggaatcatctcacctgctataccatttggcgattggtgaagttggaacataacccgtatgtggtctgagataagcttgaacttgtgacgttgttgatcgaggagcatatataacagaaggccacttggttggccgaaggagaaaaacttggttgtctagatctctacaagttggaaggcactggttgtatttgtgcctttcttggaactcacttggttcttctatcacggtatatggaacagatagggtgtaagggagatcctgctggctctcaaacctaatacgcattgttagtttgagaagcaaattgttggcatctgcttgccaggttattccttgccttctgctatgcatgagctgctctcattattgtccttgtgttgctctctctctctctctctctctctctctctcatatacaacactatacaagcatacatacatacatacatacatacatacatacatacatacatatatatatatgtatatatatgcttgtatagtgttgtgaacggtaggacaaaatgtgggactgtagacctggttaaaagaaaatgggccagaaccgatgaacgtttggttcgtttcaaaaactgtcaatgcaattagacataatatagagattactacaaaaccagagggtttggtatgaaatgaaacctttgctagctacgaagtggggtgggttagatttagagtaatttattttccttttgctgctctgttttaattttctactccattttttagatggcctccaatttactgacttgatatagtagcaccaacccaacataacataaggcagttattagattcaatagctttgtatcaaaactatctaaaatatatttccatgaggattcatgtttatgttgcatccagacggtggtctcttttgatgctaattaacaagcacacttctactaagtatattaaaatattgttgaagctttcatctcagcagtggccaaaaacaataatcgttaagttgagcaatccccaactaagctcgacatgccagggcagtgtacatttgagaaaactcgtcgccgagccaatgctagggcttacatatcctgggcatcgtcgtagcgacgtagcgtgcttgcggtgtgtgctcgtcatagctaacgaccggatcacttgaaggctgcatcgtgttgcagcggagggcctctggtgcacgatgcttgagcaagacggtgatccaccggcttcgtataggaaaaacagtggcaatcgaactcgctgcactgccgctgaaattgctagttcgatcgtagttaagcatagaatcacccagcaaagggatccgaggcggctgaatagtttccagtgcctcccatacctagttagcagagcgagctaggaggagactacatcgatttttacctcctaaaaggagtactgcaccagtaggagactaacagctctcaaagtggcacgccatgaaaattcgatcgagtgtctttatttatagatagcattacgtctcgagtgaataactattactagctagtatgtacctcagccctgagtggtcatcattacgattcgatatggtggagaaaaacgtcccatcgtttcacttattcgggcatatttaccaacgaaaaataatttgtaaataaaacttttatatgcgtgttcttagggtcttaaagcgaaggctggaaaataaacttcgatgaaaaaactccaaaatcaactctaaatttaaggttaaaaatttaaattttggctgataaacaaaagcataagcgaaaagatgaggttgtttaccgtaagttttgatacaaccactgctttgattctctgttattactactacatgctcacttgcagtttacaggaatagaaaaggcgaggctctctgtttatgttggcccagggttggtgtctgtcaacagttggcccagactctattatctctgttaacattttcattttctgatgagtttaactgcaagcacttaatgatgatctaacagatatcaacatgtgtcagcacttccctagtgatagtgacaccaatagatgtgtagttaatctggataatttatttaactttgcatacatatgagttcattagatactaactttgcatcgtgaacggccatcacagatgtgctcactggtgacagaccgaaaaaaatccacgttgaagattggtcctcaccgccgtacccgttacctgtggcaggctaaatatgcggcccaacacgggtcatctgtgatgggccacaagcacaccggatgatatgaaagaggatagtgcccaacaaagaggactatagtcatttttacggggtcctgttaacagactatcaatgatataagtgactatatatataccccgatacttggtgaaatagttatcacaacccagcgtactgttcctacttcgggtgctacttcgggtgggagggctagtggggcaaatatttgctcctcaatgaccactcatcaattaccaggccctctgtcaacacagttgagggttatcgcctggcacaaatgaccggttccccactagtgggaatttttcagttgatctattgtgtctgagtttttctcactctcttctatgcccatatattttgattttaatatcatttatacctgttttgtcagtagactgtttaataattattaaaaaagtcaattatgtatttgacatggaagtggacgttaatgttggatgtatagggatttgtgtatgatattaagtagccaactacaacaacccttgaaatgtaggtatggataacaggactcacaattcaatgttgagagcacaactattttctaggatacagtcattgaggcaatagatattccatttttgctttgatcctgaattgtggcttatggtgttgagaagtgaacggaattcagacatgtcatcaatgtttggaacttggaagttctagcaccaatatagaagacagttagtgaaaacatgctaggataggatgggtcaatgaattattctctcgtacggttgcctgattggtcattctgagttttgtagctaaaaggtttttgaacattgtaaaaggatcaagtactaactaaccaaagcaaaagccaaactgaagtcatgtttcttgtagtatgtaaagaagcaaaactagttcgtcctttgttcacatttcccttggtcttgcctaaagtcgttatgcatggaagttgatgcatatagctgagacagaaatgtacaggaagtatatatactgagtttacgaaactttgtcagccctcgattttattctgcttcattggtcttattcaagaattagtgaattcattgtatcagacacaatctctgaaactttgttccttccttaacttatgatccatttgttgtgactaatttttcttttcaaccaagagctttctacttgattcgcacttatgtttctgtgctagagtctgacggaaagctatcctctcttgtgaaagaattcgacaccgctatcacgtgaagaccacatcagaagtttctcccaaagacctcgacccagtgcagttatctggtgagatatggtggcagtacatttcatgttgcatcccatttctattgcatgtaactttttcccaagaaatatttagagagttcagacgcatacagtggttgttgctagtcagttataccaaagtgtagaacactaatgttggttgttgtgatgaaagttacacgtatggttctacgtagatcaagagtgcaaggatgggataccctataataaattggtagtaggtgagtctatattgcgttcaagaaaaagaacagagaagcacagcaattagaatacattagtaataattttactattagtacattcccagaatggaaacagaacattattaggcacttttgaccagcaggagaattggaggctttcaatcttaatagaaaaagttcctcacaaagaattttcaaaaaatttgagaagttcctataggatttctattaattttcaaaaaaaataacaattgttatctctgacggcatctttagatagccgccttttcacaagcagttagttaggttgtccgtatatgtaagtatatctaactatccacgggacaagtgggcccacacctttacccaggcatattttcaaagacatccacatgtgtaaaccgttctcgcaagcagattctaaagactactgcatgtgtaaacatattcacatattaaaaagttggatccgagtagttgaaatctttaagtttaggagtggttgagtatttccgaaatagctagcaccaacgcaattttttggcttattcacctccttcccccactagatttgtctcgccgactttgccccacttcctccaccttcactaaggctcaccacaaacaccacaagattttccactttctggtcacatatcatctaagtgtgccatccctgcaccacggctatcaacggctattaccgaagctgcatgcttgcgtgtatgataaaagttgcttgctttctgacttctttgtgcttgctactacagcatgtgaatggggtggcagtagatctactcattcacttgctcctttgcttgtttatgttgattgcatgagagatatggggaaatcacggaggaaatcagcctatggaaaatgtgtgcaaccaaaactctagcgagattaatggtgcatcagtcaaacagcttggtgaggcacagtgcgttgtatttttcttgttgttttgtgtcaacatctaggcactttttaaacatactccctctctccgttccaggttataagacgttttttactttggttaaagtcaaattgttttaagtttgactaagtttacagacaaatatagtaatatttaaaattagtttcatcaaatcaataattaattatatttttataataaatttttcatgggttgaaaatgttactacttttttctataaacttggtcaaacttaaaatattttgactttgaccaaaatcaaaacggcttataacctgaaacggagggagtatatgctatgtaaactcaatgcatctatgcacgtgtaatggcatgagccagatggttagtgcattaagtcatcaaattaacatataatggcgaatgagtgacattcaatgttggtttggtatgaaaagttactttaaaaaagtatttcaggaaaattatatatagaaaatgtttgcgcgaaatgcactgtttgaattagattgttgtgaagattattgtcacatgctatttacttgattatagggatggcttaaatatgttataaaataaattgaataaataacttaaaataagttgtctaacaatgcaattgaaaaatgttttctttcaaaggcatattttgcgaagcatggagcaattaatccattacaacaattcgatgaatatggtgaaaagaacaaggaagtatggtcgatgcttgactacagggtgctctgatcttttgcttacctacgtatttgttacaatgctctaagcctttgcctcctcttgaccgttagtccacaagtgaaattgaggaagagattgaccgctaaaagcaaatttgtaaaaacttatccagtaacaggggacagagattaagatattgaagcctaaagtactctgctgccattcctcgatcctttgccagaggtatcatctcgcctgtcataccatgtggcaattggaagttgggacataacccatatgcgacctgatatgcttgaatttgtgaccttgttgatcgaggagcagaaaggaaggctttttagttggccgaaggagcaaaacttggctgcctagctctcatcgaactagaagggccaggttgtatttgtgcctctcccggcactcccttgatttttctatcatggtacatgcaacaggtagattgtaatggagctcctgatgcctcttagacctaatatgcatgtaagttttttgaggagcaaattgttgtcatctgcttggcatgttattccttgccttctgctatgtctgagctgctctcgttcttgttcctgtgttttcttctctctttctttctcttatggtcatttatatggactcttcgagacttgtagtgttgtgaatggcagtacaaaatgtgggaccgtagagctatttaaaagaaaatgagccacaattgatgaacatttggtttattttaaaaacagtaaatgcaaatggacagaacatggagattactatgaaagcaggcgatttggtatgaaatgaaatctttactgtgatgtggggtttgtcaaatttaattgccttttacctctctgtttaattttctgatctattccatttttgagatggcctcaaatttactcacttgatatagtagcaccgcatagaaagcagttattaggttcaatggctttgtatcaaaaactatgtaaaacatatttccacgacggtctatgtttattgtcatattaactgtagtctctttcctgccagcaaacacagttctactaattacactgaaaaatttattgaagccttaaacttagcagtggcaagaaaaactccttaagctcagcaatccaactaagctcgagacggcagctgcatccactctagggatgaaaacaaaatggattcggatagataatgttcataccagtatagaaagtagatatccaatcgggctatgatcatgtgagagagaccgccaagccaggccacgaagggcagccggtaccaaggggaaccaccggctacatctacgatttctatatgagtcaccattagcttagattatgtgcaaccatgttatcagtttttccttagaagttgacccataatatcaactgcagtattagatcttaattagcagaagaaacgataggattggtggccttgatggcccatcctttttctctttcaatgtcaccatatatgtcattaataccattagttgttcttttaaatcttttttatatccttagacattctccttattatttttttaatgttctgttatatattgctcgctatattttcatgcagtttctttcatcaaagagcaaatcacgctttcttagtatgggttgaattaatcatataatacaaagacttattttcatgctatcagttgtactggttactaggtccaattatagatatgttctttttagttctttaaaaatgcatcttaaccgctgacaaacactggtaagagagattgtagcttgaaacgatatttttaggtatttctccaatgcccaccttaacacgtggggtatcatcttgtataggaaatacacaatggcaatcagacctgctgtgctgcctctgagattacctgctcgatgctcgttaagcatagcatgacccagcagatagattcgtggcttccgatgcctcccatacatacttacatagcacatagcagtagaagactaacatcgatttctgcattaacaaaaaggaccgcatgtagctcactacttaaaaaaagcatttttttccgacgtggggtctttttttcgcaggcggacatgacccttggagccaaatgaccgcctacaaaaatataaatcgggtgaagttcgttatccacctacgaaaatctattttcgcagacggaccacttaagcggcgtctaaaaaatgtttttttgcaggcggaccacttaaacggcgcctgcttggcgaaccttatgtggtccgcctgcaaaaatcctacctacccaaataaaatcagtcatccttatcttctcctccttcatccttatcctctcctctccaccaccatcccctcctctctctctcttcccttcccatcatatcctctgctccctcccctccccttccttccttcctccgtgagagagagagagcttcggcggcggcgcgggcaaagggggccgccggcggcgcgaacggagggcggcggcagaggcacgagtggagggggccggcggtggcgtgggcgaagggattcggcggcggcggcgcggggcggagggcgtcggcgatgatgactaccgcacaacgacgatgactaccgagcgacgatgactactaccgccggccacgtcgctgcccctccccgcgacccctcctctcatagatccggcggaggggatgggtgtcggcagcggcgcaaggcgtatgggtcggcggcggcgcgaacggaaggcgtcggccggcggccctaccgcaagacgacgacggcccaccgcgcgacgacgacgactagcaccggccgcgtcgccggccctcccctcccagatccggtcggaggggggagggaggcggcggcggccaccccatgcaacggaggagttcgccggcgacgacgactcagagacgacaacgtggtttttttagtttacatgtacattgatgttaacttgatgtgaatttgaatccaatgcttttgtgatgtgaatgtctgtgattggattttgtttcttggatgagatttgtgaatattagtgatttgtgatttgtgatttgaaaccctagggaggggtggggctggcgggaaatatttttggtgccgagggtatttttgtaggtggggctagtgtagcatttgaggtgcctgggaagatgcctgggaagattcgaacggctgccttcgaaatcattttcgcaggtggtgctttggtccgcctgcaaaaattgaagatttttagcgtcgtttggatacaggcggaaagttttgccgcctgcgaaaatgtgttttgaccacctgcgaaaaccttttttctagtagtggctgctgcagcttcactagttcactatgtgcactatcagcgctgctctcaatgtgtcaagccatacgcatattggagtatcgtctttatttatgctatctatgcacttcgttttatatcgtctcaagagtataactattgctagtatatggttgacactaccatccaatatggtggagatagaaaaaaattgtggttgcagactgtaagttttgaaatttcagcctgaaattgttcttttatggtctagcaagctctacatatatacgtcacagggtgtctttgtgctatgtttatgcaaacaaaaaatcttaaaagaacgtgaaaattcaggtaggagaggaagaaaagaaagtctcaaaagtattgagatcctctgctgtattgcaaagaacatgcgttcgtcccaaaaacttgtaaaatcattaaaaactcttctcttattcaacgctttcagcaaagttcactctcctcaattctgcagtatgtgatatgaggagcttcatagactgctttgtatgaacgttttctgccaattttataattctgataacatcgggcagcctttatacatagatacatatagcacccaataaacagtgagtaaattcacaaaattacatatactatgataaatctatcacaaaactatagatttaaccacgtgtatcataaaactatagctttcttcacaatactagaaatttaaggtatcaaaaaaactacaaattaaacatcagttttattataaaactactttgtaagctcactagtgctatggatatgaactttaaagtctgtagttatttgataatttcatcactacatctgtagttgtgtgatacgatgctttgtaaaatataataattttggtgttaaatctgtgattttatgaaacacatctttaaatatgtagtttggtgatagtttggtcaaagtatatgtagttttgtaaaaagaaaaaatactcgtaaacagtagtggagatatcatcttatagtttcatgcattgttggttcgagacaaatagccttactggcataaatggggccattgttggtgcacctcctggttgcactcatgatgctatcggggaagactatgcaaccatggacttgactctcctcaaatgaccactctcgatgttagggcttccacaatgtacttcaaaattagtccatagtcaataaaataagtaaaaaagtactaattacccccctaactatcgcggtcgtccgaattactccctaaacccaaaaaccagacatcattcacccttaacttttaataccggacaaattacccccctcgacccaatttagagctgttttgcctacgtggcgtatatgtggcaatccagtcagcattttcttattaaaaaaatggtggggtccacctatcatctaccctcttcctcttctcttctctctctctcatccacaagttgacaagcgtggacgacggggatgagcggcagctggaggaggcgtggcacgcggaggcggcggcgctggcgatggccgagatggagaagacaagtgccgcccggccatggaggcggctgaggcggcgcagcatggcatggcgcatggcggtgcggggaaggcagcggagggcggtgcggccgacggtgggcgcgggcgatcggcgcggaacggcacggacaggcaggaggcggcggagaggcggggacaaatggggatgggcggtagactcgtcgccggagtagacgagtggctgacgagtccgtcggcggcggactcgtcagcaccttcagcaggatgttgcggtcgagcaggatgttggccggcttgaggtcgcggcgcacgagcgactccggcttggtctgatggaggaacagcagcgccgtggttatctccgccgagatcctgaaccgctggctcctcgggatcgacgggcgacggcgtgccggaatcttttttctttttatttttgtctctgcccgcttctgaattttctgatctgatttggcgccgcgttttggactttgggaatgtggttatgtgctgcatatgtagtatattggtttctctttggaatgttgggtaaagaattttgtcgagagctaacttgcacacttgtatatatgcatggccttaatttgcagtcgatggcttgcatcatcagtgattttgcagccgtccaccgaggcgcggcggtaccagcagccgccgccggcgtagctagacacgtacgtggtgcagatgcccaaggtcaaggtgttccgcgtcccgccgccggagaacgcgcacctcttccagcactacacccgccgcgcgcgccaggcgccacgcccgctgctcctgcgtccgcgtctgctcctggctcctcctcatgctcgtcttgctcatcgtcgcgctcacggccttcgcccccgtcgtctacctcgtgtttaagcccaggcagtcggactacacgctccagagcgcgaaccttctcgtcggcctctcggcgttgcgccgccgctgcgcctccaggtcggccagctgttgcgccgcctctccgccgctgcccgcctatccgcgccgttccgcgccgaccgccctcgcccaccgtcggccgcaccgccgtgcgcgccgaccgcgccgtccactgccttccccgcaccgccgtgcgccatgccatgctgcgccgcctcggccgcctccatgaccgggcggcacttgtcttctccatctcggccatcgccagcgcgcctgctccgcgtgctgcgcctcctccagccgccgcccatccccgtcgtccccgcttgtcagcttgtggatgagagagagaggagaagaggaagagggaagatgacaggtggaccccaccatttttttaataagaaaatgctgactggattgccacgcgtacgccacgtaggacaaaaccgctctgaattgggtcgaggggggtaatttgtccggaattgaaagttgaggggggtaattcagacgccgcgatagtttggggggtaattcatactttttctataaaataatacattcagctacctaaccacattgtggaagtagttcataggagaaaaatagccaaagtcatccataagcatatgagctgcccatatagaataaaatatgtcatttgtctctatttcctctctcctcttcctactacttactgcctgtatacattgtgaatattgcaatagttaaagtgtcccatctatatgtactactttagctatatgcattgatgttgcctttagcacgtcaacacggataaattattctgatggttgtgtgcatcatcactcgtactcaaccgaacaggcttatatcggaaaggacgcggcggattgccactacttaaaaaaaagcacatagagatcggcactataggtaccgaaagtgctaaaaatcggcatctatattttttttctcacctctgtggattgaaaatacaaaaactgacacatttaaataattatatgtattggttctaaagaaaaactggcatctgagataatggtttttaaaaaatagaacctttaatatattataggtgaccattaattaaaaactgacaaccctaatatattataggtgttggaatttttttttaaaaaaaaggcactcctaaaatcgagtcgagccgaacaccggtggcctcccgtccttctcctcttctcatctctctcttctgtcattattctctcctcctttttcctccactgcaccctctcctctctctctctctcttggctctctctctttatctctctctcagtccccctccccccctctctctctctccatcggtccccaccgacccggcgtaagtagcctgacgcggcgccatccactccgccattcagagttctgaactctgaactccattttagtttttcgctcctaacactggctccgtccctagccacgccgctcgctactttcctccaccgccgatgtctctatccccacccaccccgtagcttcggtagcctcatcagggacagaagggcacgagaaagacggtgaggagaggaggcagatgaggccagcgacgctgccgccgccgctcaaagtatccagatccgagatgtcctcttcgattcctcctgctttctctcggccagcatcaccttgtggctatcagatctagcgacagtgagttcggaggtgcctaatccagcagcccaccctgtagccactgaagaagagggtgaagtccctcaggcggctagaggtagagcaaatattgttttcttatgaaatttttgggtttgttttcttaagcttcggttcttgtttttggcttatggtgttatccgatttggtcatattgaagctatgaaactttacgaggattttgttgtattaacggatacaacttggtttccttttctcctattctgagttggttttcttttctccgattctgagtatgcaaagaacaactgggattcaaggaggatggcatgacacgctcgatggagaaagacgtacacgacagatgaaaacatattagtggattcagggacaagacaacggcgtgatgcgctcaacgaacaaagacgtaccacaacagatgaaaacatcggcatgacgcgctcaatagacaaaggcgtaccgcaacaggcgaaagcgtattagtaccattggaaagttacaaatgtttttagtagttaagataagaaattgaggttcggttggcagacgaacctcagatttatgctccaacggacacttatttgtcacctattgaggcttatttcaactccttccctcattttcactcaagttagtaacagaaaagatatccgttgtttgagtaatttccgcgctcaactactccctttctctgcaacaagttataagcttatcattcttacatggcaacaagccaacagcaaaatcgctgaggatgaataccaatgtcatacaaaaaattgtgttggaattgacagcaagtgagaccaatcgaatggagaatatatccacatctacaaaattgttactctaaagtgaaagcccttctgggttgtgtgcttcaatgtcaacatgtttaatcccaggcacaatcttttggatctctgactccagccgatccacttcatacccaagagcttcgactacatcctcacctgtacaagcagtgtttttcagatagagataacaagcataaatcccttattagagcaacatatatatattgcataccgtagttagacatgacccttattaactccgtatcatccttggacaatgaagcctcccggaactgtaaaacggaaaaagcaagaagctcagggatgtagaaataatgcaaaaccaaaactgggtgatcataatgtcctatgtccaaaacagcacactctcctgacaaggtagagtattctgtctcgcctgtcctctcctcctcaaaattgatttaggacatgaggcttcgaatgatcattcgtttcctctacatgtgtgtgcagaacacaagaaaatctcacgacaaaatgaggacttttcattcattatacatctttaaattatttaaatactagtttaagagttttaaacactgaattacataattcaagtgattttgacactgcaaagaaaaggcgagggaaaacaagtcaggtgttaagacttgaactcacaactaccatagacataaggtctaccattagggcacttgagtacctaaaatctcattaaaatcttgtgctacaagtacaaaaatcacttatattgctagcatgaatattgaaatcttgaaagtaattattaaaatcatcaaaaacaagtaccagagataattaaaaccatgagaaatagcttttaagtgtacttggggattcgggttgtataatgttcactaaactcatgtgtggcaaagtaagcaagtaaaaggcatcgggggcaatttgaaaaagcagtgacttatggagggttttatatttttcttccaatttcctattaaggctaaacagcagtagaaaaatatcagtaacaaatatctagtatagttgtaacttgtaggtgctagaataatatttgtgttgagcacgcaagttaaacccaaacactaacttatagctgaaaatttagctagcatttgaatatatcagctacaaggcattacgtacaatttaaacaaatatagctgatgaatgagcagttgtttcactaaattagcaactgagatataccccgtacaaaaaacagcggccagcaaccactaacactaatcaaactaattttcagaggagaagagcacctgttttgcccattctccacgtccagtcctttccaaataattctgcaccaggactactccattgaaatctatgagaagattaggccagaaaattgtcaagaaaagagccgtaagggagtatgcgaggtaaacaaaataagaaagtaacaggactgatgttatagatgagttcaacaaatcaataagcaatgttaatgggaatagtcacttgcagacacattacaccagctcacatgaggaaaaatccctgtgggcacttgctatcatgggaatttcagatagttctagactcaagtaacacaacactacaacagtacattaatttatcatctgaattggagccaagtcatgagttagattaacgaagaagtataccatattagtagtaagaaatacagtaaatggttaatagaaggtacaacaggtctctgcacatgaataaaaccatcttgatcatttacagatcaccagttcatctcacagaaacaagattgactgtaataagtgctctagtatgactcttttaaacaaaaggtaggcttaagaacaatggatataatcataaatgaagacgtctcaaactaaaaatgacatgcatcacaagtactaactgaaaatgacgacaaaaataaaataactgccttaaatttggagaaagccagattataagagctgtaccaatttcagctttgaatctaaagaatcctggtccaatcacctcacttttgcaatcataaagagcatctacaacctgcatgatgcaagaaaatcagctccataacatagatccagtgtgcgatatggaataaggatatccacaaattttcaccggatcagccttcagaaactcaagaacacgctgcatgtcatgatcatcaatagcccttccaattaaagcatgcctgtttctctggattagaaaaatagcaacctacagagagcacaatagtttaatttggaacaaggcatggacagggatgagaaaattggagaagcaaatcatcagcaaactcatatgagtacaccttttgcactgtgcacaattttggtgattctttggcaatagacttttaaagttcttgttcaatttgggtggcatttcatgaaaacaagattggctaaagctggttttcagtcattagtgtttatgttttgacttttctgaaaatcaggaaaaggtggtcttacagaaaagaatgcaattatatgcttttagagatctccatgttgccccaaaccaatggagacaagatttaaggtggttcaagctagaaacatgtttaaccaaatctagtattatcagaactgtctatccaaaatctcctttaagactacagctctgtatggtaaaccataaattgttccaggcaaacaacagccacatgcatatctgacctgcttactttttagagagaacttccttgggaattggacacgtcatttttaagtttaggaggagttgggtactactgcagattataagcagtaagtgttacctaacagtatcgactgtatacgtgatacctgagtacccgacaacccatttatggttccaattatgtaacaatatacaaatgaattaggcttttttagattttagaaacacacaaaaacatggatagcatccacaattttagtatgagcagaatacagaatatctgaataaaatatacttcagaatagatgtagtcaacatacaagaaatacacatcaataaacaaatctttactggtagctatgaatcttttggtcttggggtttcacaaactgctgatatctgaacatagtgctcatctgttatgatagccaaaatactgttttatcttgcatagaaataaaaaatgaacaaagcaccatttggcccttcctagcatagttgatgggcattcgatgaagtgtagacagcaacaatagaaatgcaagaaataagaagtttaacaagataagtgggataaaagatttagattgtcatagtttatttaattataaagaaacgaggacatgatatttgtgtcagactaaggggtatacatgtatccaataccaaatgaccattcaataaggcagaaaacaattgaacaaatattccgttacatcaattagtcacacatagcaacagaatataagccaagaaagataatagaataatatgaaccgactatgttaacataccattcccagtaagttgccaacaatgatggagccaattggatcatacatagcattgcctgtggtttgaacagccaccaaagatgctccagcaattgcaagacctgtaacagcagcaccatcctgtaggacattatcagggcatgagaaggaaatcaagtagaggaatagcaggtgagtggtaaatgaacaaaacatttattgatatggcatcaccatatgatacttatgagcaactgaagcagtcatcaactgttttagaaacaaaatttcatttcgacatgaaaaaaaaaagtattgaggtagtctagaacacatcactcacttcagtcatgacagcaactgaagttggatcatgaccacgccagatgtagtccctgatactcattccttctgctgctgcacccttcctaacagcctttatagcaaccagcagtgaagcacctaagaggcaatagggtgactcaattataacaaagtaaagacatggttagaatgtcatgtagcaagcatgtaataccttcaattaggaaggacccaccaatcactaatgcagcatagtggatgttctcagggggctgtcaaataaatgtgtcacgatataacaactgtagttaggtaacaaagattttctaataagatggagtgcatgtgtaaaatcttttggtgaatcaaatgatacatttgcatcatacttgcgaattccataagttttgaactccatgcacaatggtagcacctgaacccaaacaaaatattccaactgcagatatcaaggaccatacaaatctttcttttgaataaccatagctgcagaaagagaaattaagacatggggcaggcagcatgtcagtttatggcatatcacaaatagccttaccactgattctattgtgagtagcatttagtggtatactggcatgacaatgaataacaggattccctgtttatcttcaattcaagacaattttactctggtgaaaataactgattttccatgcagaaatgggactaaatttatggtacagagaaaataacagtaatgaaagaaagtgatatttatatgtcaacaaagcagcatttccaaattgacaatcgatacatacgggtgtagagcatctggagcacgtcttgagctgctcaagccatatgcaagaagagcctgatgtttaatcaacaattaagccctggacatgaaccttcaacaaagcttacaaaaaaagatagcaaaagtagaagcatcaactacctggttagcgaagtctgcaactgagtgcactagctcagctagcataacatgactagatgttgaaagccatacaccaaacttcaacgaaaagacaagaaaattacaccacagtgctgtgttaaccgctcgatggctgagatcacattccattagcatcaacatgaaacaaaatgtaataggtaagcttgtgaacaatccaaatatgtaatgattaactaatcgtaatattggacataaatctggcaacatatgcaatgaagaactaaaatcgaatactcttcttgccgttgttttattttaccacatggacaaaaacataaagggttatgtgcaacatgtttttatcagtaagcatcaggaaacatatttcacttgaaccgtacagaataggtaaagtactccacaatcctttcctctcaagcttacaatagtgctacatccaatccccctcccattgctatcaatgtcattgtgtaggacgatcacgaataacatttatgtccaatcacattatagagccaaaagcatttctgacgcatatattccttgaacactcaccccttcaacttcaatcagatagaaggtatcaagtaaccagagcacacctttttattgcaatgcttccaatatattaaaagtaaactaacaagatcatacctttaacccgaaaatcaatacgactgcaggactgaaagaaggtaacacgctaagttgcttgcacattgcaaatagaagacgtactacacacgaagcttagcacgccatacaaaggttctaacttgagcgggggaaaaaatggggcatatccgtctcacctgtgctcatcgtcaaagtgcgccttcttcttcgccttggcgacacgaagagaataacctgcgccacaacaacaagaagaatacgcaaagagagaacctaagaagcccgcaacaacgaggtgagagaggaaagagggaaggtgagcgaggcacccagtcttactgcgggagagggtgagccgtacgggaggcgcgtcggcgacggggccgcgcggcggcgacggggccggggggagggcccgcgcccgcgcccgccaccggcttagccctaggacccccgaggcgaggagcgggcggggcgagaagggaggagggggcgacgggtggtcgtggtcgtggtggtcgccgctgcggcgggagaggaggaggaggtggtggaaagggtatggcaaggaggggaggcgggggagggaggaagaggatgaggaggaggagctagaccaagagaggaggcggaggcggagggccgcggcggcggcgaatgggcggcgcatttaggggtaggggtgacggcggcggcggcgaggctgctgctgcggcggccgcgggcggggcgcggcttccatgcgagggaagcgatagaaaaaggaagcggggggagtttgggcttggttggggcgtggagagtggagacggcgatggagtggacggtgggagagagcgatggacccgacggtggggtggagctcgtggacgctagggttgggccaatctctgtcacgacttctcttcccggacaacagctgccatttcttgccgagggcctatttggagagcctccttctctcggaatcaaaactctagattttttttagaagttaatacttatagaatccaggaaatgaaattaagatttttttattctcagaagcttaagctcctccaaaccggccataaaacttataactagtgttttactacgtatttatttaccctgtgataaaatctgatttatcctgaaacgtgatattcctaaaagttttatcttgcgtgataaatacgtgactcttaaataaacacatgtactaattgcatgtttgttcggatactaactttaccataatccccctgaaaaaaaaaacataatccaacttaccaaagataaaagatgggacaaacccacacaaattgtgaccaacgacaaatgtagcaatgtttggctaagaaatgagcctatgacatgtgggccagtaagttagtaaagtatggtttgtcacagatatagcagttagtaaagtatggcttgtcaaagatataacaaccaaccaaatacttactttaactaaagtgtgtggtacgtctaatgtgtgacgtgacaaactatggcaacaaaaccaaataggtcctaagcagggttggccctgcacttaggcgagttgtgagaccgtctagggcccagagcggagggggggcatcaccaaccccatcccacccccatcctagcctaattgatacgggtaaggcttcctctttcacgtcgcttcctttttatccccgatttgctccttgaccgtgacttcgctttgcacccatttgcaccatctctccatctctatgcgataagcaggcaacatcagtgagagtcggcagcagcgaccatcaggaaacccacaacttgccccttgcatcatggtgactgcactaggtattctcattggcatctatagtccaaaatttaggttagttttattttgttcttgatgattaatctactatgtaattttaggtgttagaatatttcataaggagcatctttcagtactcacaaaagggaaaaaaattgcatcaagaaatgagacattggatatctgttatccccaattcaaggtatttgtactatttggtttatttttcatgttatactatcaatattaattatagagaacggaatattgtattgcaattatttggtttatcatgtagtaatattgattttgtcactttgtagaggatgtatggcttataaaatatatttacaagtacaagaatatttagccctaaaggccttaacgttgggttcaccgttcgcctaggaccctccaaactatagagtcgccctggtcctaaggtccacatatcatcctctcatgttttatagatcacatccaagcaatgattatcgcgtaaaacccttcgacacccacgtacaagattccaatcacatagtggattaccaagtcattgatgatttgtatgttacatgtgttgatttctatggagtaatattaagaaatttacaaaacccaatgtttttatgctgctaatgtcctagtccctacatataagtatttgtgaatttttctctgattaacataacaagaggaggtagcgctgaaagttaataaaaatatgtgtgttgcaaaaaaaaatatacctaacaaaatggtaacagatgaggacagtggagaagcaaatgttgctatgaagaaagcaaataaaggttgcaacaaaagtaaaaacaacaaagtatagtacttactttacctttatcaaagctacttttttttttgaaaggaatcagcacgagactgtgctatttcattagatataggcgtaaaaaaatacaacccctaggggcaaaaaaaagagctgtacaaattacataagcactatgattaagctggtaagaattcttcaagtcgccttgcgcctgctattatccaggttcttgcctcttcctttatttttgccataaggttgggggccgccgtttccttgtgctcgaagattctttggttcctttctttccagatttcccaggctatgagtaggattaaggatcgcagccctttcttgggcacttcccttttgttggctaacatttcccaccattcgtgtatgctttagcatggctcccaattgctcggatccaattgttgataagccacccagttggccgtcagtctccagatccttctggtgtatctacaggaagctaaaaggtggcatgccgtctcgttcgtcatacggcatagggggcacactccgctatttggccatcctcttgtagctatgtcacatcctgattttcgttttaggatttataaattatttaataaattattaatagaatttatattaaatgttctttaatttacaagtgaagttaaatgtgggaaataaaatttcctaaatataaagcatggatggatttaatttttattaaattctccatgattaagtcaattctctgaaattttctcggatttttcggagctcaattcctaaatgctacaaagaacagttcagtaattacttgatcaataatgatctaattataattgttaagtgcttttcttgtttaaaatccttaaattataaattgttgtttaaaaggaattattagaaatgatcttaaaagcctaaaagagaagatctaatttttaatttgttaaatctcaatataaaattgggctagataaaattttgttaaatactttgcttaattctataattcctagatttttctgggatttatttgagctaaggaagtatttttaataaatggaattgcatttcatgaataatttaaattgaaaaaggtttttaaaagtctcttttggctttgggccgaaagccggcccaaaacctctctctttctctctccctcggcccagtccggcccagtccgccgagccgccgctctcttctctctctctgtcgctgacaggtgggccccacctgtcggagccgtcttcctccttcggccgccgccgcccgaaaccctagccgagccgcgccgccgccgctttccaatttggccgcgcctttccttctccggtgaaatcgattgaagggaaataatctcctcgatctcctcttccttttctcttatagaaactccggtcaatttcctttggaaataggcggattcgagtttaattcggattcgtttttccccaacctttccatcccgccgccggtcgccgtgggcctccgccgccgcctccttgcccctttaaaagcacccccggtgtctccgctacccgccgcctctctcgccttcgcccgccgtcgtgtgtagcgccctagcctcgtgagcttttgcgccgccgtcgccgccgttcgttcagccgtgcgccgccgtcgctacggtcgtcgtcgtcactcgggaaggccaccgtcgggatcgccaagtcgtcgccgtccccgtccaccgcttcgccgccgctagagaccgccggagcaccgtcgccgccgttgacccgatcttctccgctgcttcgacctcatcgccgacgccgtccgttgctcctccgccgttgctttggtcaccggtgagttcgccgtgccgtccgctacccgtgggtgctctccgttcgtgccgtcgtgccgtcgttcgccggcgagcatgtgcgcttgagccgccgagttgccgccggtgctgacgtcattgctgacgtcatcgctgacgtcatcgttgccgttccccgtggcccggtcgtggaccgtttgatctcggccgtccgttttggatcaagtcgatctcggccgtccgttcccgtaaaccgttgccgtgcactcggtccaccgcaaaccctagccgctgacgcaataatccttcttttccttttcaaaaataattcattattgcgtcataattcaataaaaatccatataagtgttttaatccgatttaatctttaaaaattcataactaattcatcttaactcagtttaatgtggttcaagttgcaaaagttgtataaaataaagatctacatattaaaattgtccataaattgaattaaatttatttaattctttttaaatgggctttaaatagatttaatcttgtaaaattcataataaattcagttgaagtcagaatgaggccgttcaagtctcataattcatctaaaattataatctacatgtttgtttactttttatgtattgtttatttggtttttattagtcttttccttgttttgcgtgttagcttgtcgtttccgtcgttgcgaaggttcgcgagtgcgccggaagtattcaagaagattaattgaagaccgattattgcaaggcaagtcacacagatcctaaacacaatcctttgagcatgttgatcctatatttaaattctctatttatttcaactgtgcatttattttcgaatgtcattgggtggaattaacctattctttgttatggcccttttgttcttgattactttattccttgataccttgggtgattataattggactagttgagctttatatatattggttctactagatattagatataattgcttagccatgcttagaaacattagcacactattgggataacttatgactcactgttatttaatgatggcttaatggtagctcacgatggttaatcgtgttatgataattaattggtaattaaaatatgattaatggtgggttgtgagcacatggttttgagagtcgtgctcatgacaattaaggaccggttcgcgagctactattgtgaaacattaaccgtgccaaccacaagccagcgtgggcaacggctttaccttttgtataacatgattcattgcggagcaccagactaagaagtggcggagataagcccacgggggtcgctggggagtccatgcctctggtttttgagggggtgattatgatccaggaatggtgcactgtggtgagttgtgttgtgcagagggtattgtcacagcctctattcgggtactttccagtatcgcgacgcatggtagacatgatgttgaggctgtgtcttgtgggtacagtggtacacctctggccagagtaaaactattcgaatagccgtgcccgcggttatgggcgggttgagcaatgtttttcgtgattagtctcacacctctcacaataattatggatgttataactggtaataatttgcttagctcctggtttggagttagatctgtacagccgggtatggttgttcaggatggttgggcctgtgcagcatgggtgtgttgttcagtgttgattaaaatttctgattaactactccactattttatttctcttaaatgttttgctaaatgctgcttttgcaaatgagcctatattatgccatcctttggtatccttgtgcacttgcatatttgctgtgtggcttgctgagtatgtcatatgctcaccttgcaataatcaatcaacctcagttgaagacaagttgcgaaggagaagacgtttggcttataccccagttgagctgcctgtgggagtggagccggagcttcgctagattttatttttccgctgcagttttcttcatggtgaggactaagtgcctcttaagtaagtacttattattttagttaatttgatgaatctgcatattaaattgtcagtttgtgtacctcggctgattcctggacgaggattttatgcacaaataagtttggaaattacttgtgaatttccgggcatgacaagctagtcgatcggaagtccagactctattttgaatcacaagccatgcataaaatttgcattttgcaggggcccaagatttccaaattaggggattgaagttggtgccgactgttcctagacactgagccttgtatgccgaagaggccgagtattctccatgattcgagagcttccagacgatgtgatccgacttattttggtttagcatgatgtcctgggttgcgctccatagggacacaagctggctaatcagttccactgtaaaagtagtgttcccatttagctctaggtcatcgatccaggtgtcattttcaatgccttcacgtagcgatttgcttcttttcttggaaattgcatagacgagcggcatgctgtcctttggtctttgcccgtccagccaggcggactcccaaaagcggatcgtgtttccatcccctattgttattttggtagctgcggtgaagagaagtttgtccgtttcatcacacggtgtatctagtcccacccacggcttggtggggtctttccattcatgccagagccatctcagtcgcaaggccctcgtaaatatctccatgttcagaacccctagtcctcctagtgcggttgggaggcacgtccttttccagttcaccttgcatttccctcctgtaatgtcccccgtccctgcccagaggaattttcttctctttgcatctagaacgcccaaggcttccttagagatcttaagggcagtgagcaaatagataggctgcgcagtcagtaccgacttgactagagttgatcgccctgccggcccgatgttttttcccctccagccggtgacccggtttgctattttatcaaagatcggttggacgtccgtcttgcgcagccttccaagtagaagcggcaatcctaagtattttatggggaattgggcccgtaacgctgggacgccatcaaggatggagtctagatcaatgcttgcacatctgattgccgccacctgtgatttttgcatgtttgtgaccagtcctgtcgcacgtccaaaacgcatgaaaatgtcggtgaaagccttgacatcctctctaaggctgtgttcgcatgcaccttttcccatcccctctccttcgttttccgcgcgcacgcttttcaaactactaaacggtgtgttttttgcaaaaagtttctattcgaaagttgcttaaaaaaaatcaaattaatccatttttgaaaaaaaatttagctaatacttaattaatcacgtgttaatggaccgctccgttttccgtgcacaggagttaggttccccatctcccccatccgaactcagcctaacagggtttatgaaaaccactgcgtcattagcgtacatggagattctgaggcgagccgctctacctcttagcttggttatggcgtttagttccgttgctttggagaggatccattgtagggggtcaattgccaatatgaagagaagcggtgatagcgggtccccttgtctgagtcctctgccatgcactatcttttctcctggtatcccgttgagcagtacttgcgaggtggaggtagtgagtatggtcgtcacccagtctccatttctgcgggaacccatgatgttgcatcatggctaaaaggtaatcccaacgcaccgaatcgaaggctttggtgatgtcaagcttgaagagaagcattggccgccttgttctatggtatcttcttgccaaatttctaacatagaggaagttgtcgtggatgctcctgcctttgatgaaggcgctttgattgactgtgacgagggttcgcatgtgtaatcgtagtcgcaaagccaaggttttggagagggtctttgctatactgtggattaggctaatgggcctgtagtccgtcacctcatccgcgccttccttttttggaatcaggacgatgttagctgagttcagaaggttcatgttcgcacatctcagattattaagcgattcgaagaccgccataatgtcccccttgataatgtcccagcaaactttaaagaagttccctgtgtagccatctggccctggtgccttgtcagctggcatctccttgattgcccgatgaatctcctgttccgtgaaaggatcgtccagatgcgagaggtccgtcgttggggcatgcaaggcttgccagttaatatcgcatgttctcggttctggcctcctcatcatcctagaaaaatgttcgaagataacatcatctttgtcttggtggctcaccgcccagccacctccactgcgaagtctttggatgtaattctttcttcttcgagcattgactttgaggtggaaaaattttgtatttgcatctccctccttgatgtgcattacgcgggaagcttgcctcttccttgcgcgttcaagcgttgccaggccaagtaggcggcgtttaagtcctgctctcagccggtgctctagcgttgtgagctctctttgctcctatgcggagtctagccgctggatgacgtcaagcgccatgtggaattggattttcgcctcagtgcagattcccctggaccactctcgcagactttttccggtaatttgcagcttatgatttaaccgatgcatgggttctgtgtgagttgtctgcttgctccaagccaccgcaacaacgtccttgaatcctggtatccttgtccaaaaactctcgaacttgaagggacatggtttccgtggtcctgaagtattgtaaaggagtagcgaacagtggtcagaagggcctgacggtagagcatttaggatgtgctgggggaaagctaggtcccaagcctcattacaaaagcatcggtccagtttcaccatgatcggccgtcgcctctcattactccaagtgaactttctgttctgtaagtggatttcttttagctcacaatggtcaagggctaagcggaagcgggtcatacgcgcaaggttaatgttctcattgctcttgtctctagccctgtaaatcatgttgaaatctcccaggagcagccagctctctcccgagtttggcttgagtcttcttatatgccgaaggaaggcatcttttagccggtgccttgtaggcccatatactccggttagcatgaaggtagtgtttaattggatgactgtgacatctgctgagatagagaagcgaccgactcggacgttttgcacatttaatgtgtcactatcccaaagtagcaggattcctccctttgtccctctagctggtttgaagtcgaagcgatccagtttgtatcctcctaggaacctggcgagtgaatcatccatgttttggagttttgtttcctgaaaacatgccatgttgcatttcgtgtccagcatgagctcatgcactgtgttgcaccgcacagcggaattcaacccccgcacattccagttaactatttgcaagttttgtgacatttggaatgatggttgcttcactgattctgctcggcccaaacagccagagtttggtctagcttaaaagggcccaacttgctagaagtgatggccatgtggtttcccggcccaacccgcaaggcccatggggcacggtggcgcagtactcgtgtaagtgcgaaggtgggctttgtgttgggccggtggcattagaggaggagtaggaaggcttttttcctttttctagcggcccatgcactctgtcgtcgtagattttttggtgatgcactcggtcgtcgttttggcgatcgctgaggctgttgatgccctgagtgcactgcctcgttaccacgctcttttcgcgattctgcgtcgtagaaatcacagttgaaaacgaagaatgtaggaggttcaaatcaggcttatgcccgtgccgacatcggcgatacatgcaacacaaatgaaggaagtctcgatcggctggaatgggcgcgcgcaggctgccgagagtccagctacaaaagagtagtctggcatgacgatacatggagattgcaatctccagcttcccctttttggtagaagcatcaagcgatgatctccttaatctccgcggcagcttcatccaccccttctcccaccatctcgacaagggagtccgtggggttgtcgtcgtcttcaatgtcgatgccgaacaccgccgtgagcgccgcgatggtgtgctgcaggagcggtccctcgaacattgcgacatattgagcaagcacctcctccatcgaagcggcgccgtcaccgccaggcagccatcccattcgcttgaagaggacgcgctggcatcgttccatcgtcggcaatgccggctgcttagcgatgcgggcactccgacgtttggcgccagtgttgtactgcttgcggagcttgacacggcggccgactgccacctttcttattggcggcggcatggggatgaccgccattggtggtgttgcaaacaggctgtccagggcgagctgtgctggcgtcactgacgtcgttgttgtcgtcgtcgcaccgcttggcgtgttcgtcacggcggccttacccacgacattctgtttcggcgactacagggcgagaatgtctgccttgttcgcaacagggagggcaagctgtgtcggggtcactgacgtcattgctgttcttgttacgcctcttggcgtgttcgtcgcggcggcttcagccacgatattctggcccggcgactgcaggacgatggtgtctgccttgttcgcagcagggagatgcaccgccgtccaacacggtgattgcgggctcagcaacggctcctcagtcgccgccgccaccgccacttccattctggcaagtgcttcttcaatctcctgccgtgtggtctcctgtggggagacgtttgccggcaggtcacacttgatacgcgccaaaacccggctcaccgggattggttctagcagggaccaggcttcatccccttccctcgccggttcttgaatcttctccatcagagtggtggtctggttgaactcctcagccgccaggttgtccttcaagacaggggaatgcatggctaggagaaattgaaatttgcttaccatagcgtcattttccctctggtgcggcaatgtcagctcaggttctgtaggctcgccatcgccttccacacctcggttgcgccaccccctgtagcggttgctgttctccttatcgcgtggccgcggtgagcgcgtgcgctcacggcgatacttcgcttctccgtgcttccaagactcgcggccacgcgcgaggtcacggcgtccacggccgtcgttgtcgtcgtcgccatcgtggtcccgccggcgctggttgtcgaagaagctagggtggtcgtcgttgtactcgcggcgtcgccatggccgctcgttacgacgccccccacggcctcgcctgccatctcggacgcttcgttcaccgcgttcatcgcggtcgccgcggtcatcgcggccgccgcggtcatcattttcgtcgcgtccgttgcgctcctcgcggctgcgatcgcgaccgcccttgccgcggttatcgcggctcctcctgtcatctcgaccgacacggtcgtcatcatctcgctccttgttgcggcccaagcgttcatggaccgagcgtggcggctgcgggtgatgcgggaacgtctcgaaggcgcgagctggcaccggctcaccatcgagcacccccaggttccagggtggaagtcggcgccgcgtcggctggcaagtggtttcatccgtgaggataacacccgccgacgtgtagtcgtggatctcctcgaggtggaaggggacagggtggtggacgcctttctgccaatgcttaggcggcttctcttccacgaacagaatctctgcttgcttgtcttttgcacgtttggtaaacccgagccacattcgcttggggattgtgctcggattcacagtccatgcccagagattgatcgtgcgggtgttgccggactccaccgggtgcacaaggtcagtctcgatttgctccagggcgcaggtgcgtccaatgagccgctcggtgatgtccgccgcccacgcatgcataggcatgccatccagacatagacgcactctgaacatcagagcaacgccaagggcgttttggaggctacgccacttgatgaagtgcacctcgatgccgcggcgcttggcgaagcccttcttcaccacgtcttcacagtggcggcgatgctggaacttgatcaagaaggcttctgggtggtgcagggagacagccacctcaccttgatgaagcttgaactcctcccggattacctcctcaatttccagggcccctgtggaaggtggcgcacggattgcccatgaaacagctgcagtgttcccccactctctcagctcctcgtcaatggcatatgacgtggggatgaagcagaaatcttcctcagggcgcgtggccggatcaccgagctgtgccattgtcgtggatgttgacctggtaggcggtggcgggatgacaacgccgacggcctggcgagtatggatggaaggtgtcggcgaagcagtgcggcgacggtgagttggtggcagggtagcagcagattggcgtgtcggggtggcgctgatgcgtgggcgtggcgaggcgacgttgctgcgcgttcgtggcgaggcgacgcttttgcgtgggcgcggtgaggcagctcggcgacggtcctactcttggacagcctgtcgcgagcgcgcgcgcgacgagagtgagtcagcgcggcggcattctctcgctctgtgccccgaccgacggcaggtgaagcagtggattggatcttggcactgggcggctcggtggtctttggcgaggcagatgaagcacttcccgctcgtctctgcccagaaggcgcagtgggccgcagagagggggaggtgtgatggacgttcaccttgacgcgatgaatgcggtcgttggccgcggcttgaaatctggagtcgttgggcctcacttgaatgctgctcccttcgccaccaatgccgccttctaaccggtgtccaaagcgaatcctctgctttgctggctccctgttcccggccggcgatgtgacgccgcggtagagtagactcgtaggcattactccggcgtgggggattggagttggccgggtggtagctgctccggacggggataataaatgaatatttcaatttggggcactgtctctgctcgaggggcaaattcaaatctggctccagatccgggcactatctctgctggggaggcaggaacgagacgcacccaaagcttccatctcgcccacgaaccacctcggcgaaggagcgtggtgccccagctgactcagatctgggcagaggtgagggctccaagcagtaacccagccatggtgaggcttgcgcggcgccggcggggtggccagggagtcaagaggatggccaggtagctgcagagacgtctggggacctacggaggaggcggacgggcgtgggcgacgccgacgggagtgtcggcgccggcggatggggtgggagcggcgttggcatgagcggcttcttttactactactaattcttgattaggagtactgtcatagtgttacacactcaaagctacttgcaactctaaggaaaagcctggagcaaattaagatcatatatgtatgccatagaaaatattgttaagtagagagtacgagcacacaataaggggttatgtgggaagaaagtaatagttcgttaactcataggtagacgcaagcattgaaataactagactataatttaatataatttgggtcaagatagtttactttggtttgggcttcgagctaaaagcttgttggttgaaattaattttgaaaattcaagcgccattaatttggttttggtgattaatgacaaatccaattccatgagactaatattgttgtaagcatttctttgtctagtctcatatggatatgaaagtggagtgtgtgagaggtgattcccggacttcatatgagttgagatagaaatgttcattgatggtggaactaaatcacaaggatgaaatgcatggagatcaagctatatgtatcacactttctctccatgtacatattgatatgttcatatataatatttccacgtgattgacatatgcatatgagactaatgttttatttgagtcttatctcttatttagtctatttacattgagaacgtggagatgatgaaggtatggttttattttaatgtctatatttgagaaatgccttctattcttgtattggataagctctcaatgtggcatatcttgttatgcatactcttgcttcacacaaatattttgtatgcatacatttagggggagcaaatcctatactttagttatgcatgaaatcgatccaagttattcactttcatttaattgggatctttacatttgagcatatatttgagtatataacacttgtggtgttgattaatactcatcatttattcatatccttttatacatgcgattgattggtcaatgtgtgaaggttgacaaccgaatcattgggactaataatttcacttagttgaataagaaaaataggttccaaggattgaaaagatgttgacgctcaagtgatatgattacacctaaaataccaagaataacaaagcgaagatattgaagatgtgggatacgaagtggctactatggcaagacggtgaagggcaagcgatgctcggtcgcgatggaccatgcgacggtgaagggcaagcaaggggcttggctccgaagaaccaaatccggtggtaaagggcgagtgacggctttgtcatgatggactgtgcgagaccatttgaagctacaagtaactgcatcaatcatttgaagaatatacggtgaaatggttttggcgttggcgtcccttaagacaaaggaaggaaatggaaagaaggtattcctattggtataattctattcctatttatatttgagtatagaaatgccatactattaagagggatgcaacgtcgatgcgtttgtttatgtctcggtgctcaaagtaacctatcatagtactaccttgagagaaacccaagctttaacctatcctttgagtggttttagaccttgttattggttgagttgggtagtcctctaagtgagctttccatagagtccaagatcatcaaaagagactcccgagcaaaagttatggtcgttttactctgtgcttttcagaagttccgaaaatggatgcgaaactgagtttagcttctggaaattttaggaagttctgaaaattcctgtctttgcctccaacagctagtttttgagaggctcgggtatataaactcctctacccctcctttgagtggctgctgttcttggggagtattagacacatccaaagcccaatagccatccccatttccctacctttgtggtgtctctttgtgagggggatttgagaagagaagagagttggattgagagagtgaggagtttagagctagtgagcttcactccatcctttgtggtgcttctttgtgagagggatttgagaaggggagagagttggattgagagattgagaagttgagagcttgtgagcttcactccatactttgagcactcgagttcatagcaagcaaatcttcgattgtgtttgttactcttggggactaaggtctcctaaacggctaggcgtcgccggtgagtacccaagcttgtggtgtgccacggaaagtttatgaaggcttcgatttcgcctccgcaagggaagaaatcaagagtgaaaccgaggagtgcatttgtgcaacctcgtgaggaaatggttgaaatagacccggcccttgtggcccctcaacggagacgtaggatccgtggatccgaacttcgggaaacaaatcaacgtgtctcctctcttggtttgctcgttcttgccatctctcatattgtgcttgagcttgttttgacccgatctacttgcatgcttaattaatattgttggtgaccttatatcttgtttagattccttgtttgtcaccttttgattcatatacattttgctggtggctggttgatggagcaatgaagggactatgggaatggataggacttagggtttagtattttcatgggccttttaccactgggcattttcttaggccatttcagtcttgttggtctgctatgaaatggtatgattgggcctgtgagctaggcatatttggctcatgagtcagctcgagctggctcgttatctctaacaagctaaaacatcagctcggatcattacaaaagtgcaacgagccaagccgagtcaagccgagctaacgagccacgagctttttgttcacccctaaacatggggcatgggccctaaggcattctctctctctctctcttcatgtatatatgcaattttcactattaaagtatacctttaatccattcatatgttaatcacaatgaaaataaacattgatagcatcacgtgtatggcatacccatatacatgcacttactattactagaaaataccacatggataatagactaatagtattacttatgtttatatgtatatatggtgtatcacattgtgggtaatagtcctagttaggttccttaggtttatcccattgtaattacattatagagttattgggcaaattacattctcaaatactgtggttgggtagcactcgtagaaatatcaaataacaaagaacataaacaatggaattgatatcatgatatgtggatcaaactttggctattctatcaattactttcaagagataacaaacattacaatacctaattacaatgggaaatgataaacaagaacccatctacatatccacaatcttaatgcttgactaattagcagttcaatacataccagcggccatgtggcttcgtcaacagtgaatgtggggaacagtcggatgatgatacaattgcttataacagttaccactcaatagttcgttttcagtaataatgaacactttaacatctaataatttagcacatttgaggaaggaacccaactttttttttggaaacaaaggccaactgaaaggtcagctagatttgtacatatgcccctaaagaaaggacatattacaacttgagcacagcgtatgcagatgaggaatttaaaaagataagaaaaaagcaaccaggtccttattagtcttgcttcttcccctgcatcagtaccatgatcgatgatggcaacgatggggagctcgcaaaaaccatggcaagctgcataaggttccgccaaacaataaatttgaatgggccttctagagatgaaggttacaacttggaaccatgggagaacttcagctgtcgttttaagacccgtacgggaggcaaagaagaggaccaaatgcaaagcaggaagatcgctggagaaggggctgtcgaccagcgctacctggttgatgtttagattgaggacgaagccaccaacccaagcagatatgttgttccttcagctgccgacgtcttggagagacccgacaactcatagatagaaggatctcgtcggcaagttcctccatcaccggagtttcttgggacaagtaaggccagacactgacgacctccttgaactgcacaaaagaaacgggatgaacctgaaaaggggaaaacctaactacacctactactaagcagagaaggaaggtctgacccctcccctcccctcccctcactggtggggaaccaccggatttgaggagaaagaggggttgaagagaataagtgatttactgtgttttgcgagagatttccggatcattggattgtatccaactcattttcaatactaatagatattgaattatactccctccagtgtgaaatttgttgacgttttagctcttgaagaattatatgatatttcttgatgttttagcttttttttttcatcttggaccttcttgcccctgcatgcagccggccattacacccattatttccaacgtcatgcatgcatgctgcgcaggcgctgttgacttctcatttcctgttcaaccattactctcgcgcgagcggagtaatttccttcttctatggctgtttgttggctctttgccttctactctcctccttgcactactttcgccatggagcaggtcgtgcaggacacagccaccgtcgccgccgtggagcaggttgacgctggcgatgtggtggtgaagctcgcacaacaggtggacgtcgccgccgttgtgcagaagtgcaggacatcgacgctgcggctgtggtggtgaagctcgcacaacaggtggacatcgccgccgttgtgctgaagtgcaggacatcgacgccgccgctattgtccaagagtcgacgccgccgttgtggtcgacgctgccaacagtcacacgtccacaatgccatgcaaaaatatatggccactaagaatcaaactcaagactaatagcttcagttttgcatgcgatggccactcaaatcaagagcaagttgtggtttggtgtgcctcgaaaccgtatttattaggggtaaaataggaagtaggaacactaattaatcactcattgatatgtgtaatcctgtctagaacgttaacaaattaggaactcgagggagtagtcacttagtacttcctattcatcaattaactcccatgacacatgtctcgttatctcctaaacatgtcattacactggaaacatcttgtacacctcctttcccataaaacaaagatggaacacaacatttctatgccagctcacccgtgacatggccctctcctattattatagcaaccgaaaacccggtcatttgcatcatctcctcaacagcgtgttacaccacagcaaaaaccgccgagttaacaacggacagattcgctcgcagctcgaataggaaaacccgcaacgtcggcgtcgctttgcctgtgtgctcggcggcccatatttacgcacgcaagcacgcacactaggcgccagcgcgaccaaaaaaaaaaaaagaaaaaaaaagagcgacgcgacgcgacgcccaaacgagaagcaaccgggcgcacgcacggcgatacgagacgatacgccgccccaaacccaacccggaggaggaatagaaggggaaaaaaaaagaaaaaaaaaccccacgaaaaaaaggtgagagtccgaccgatcgccggcgacctccgccccgcgttcgcggatgcgatgcgccgcgcgccccaccaccaccaccaccactgcgccaccgtggtgggccgccgccgccgacgacgcgcagggctgccccgccaccgccgctgctgctgaggagatccgtcccgccccgccccgccaccggctcgcgccgacgaccgccgtctcgcgcctccgccgccgccgccgggtggcgcggcgggcgtgtccccgccgacatgtggctgttctggcgcagcaggaaccgcttctccctcgaagagctccggtgcgtgccccccccctacctacctgccctccctccccgtcccgttaggtcttcgtggggagccgccgcgcgcagatctgcgccgcgctgtaggctgtagccggaatcagcgcgcaatttcgtttcggttgcgtccaactaaaacctcgtctccgcccgattccaatccaatcgcttcttaattttgtgctaagtaggccttcatgtctgtgttatctcttgttgtcgacttctctatgaactgtacaactattaagcttggtttagaattgaggagtcatggaagtggtaaaccaaccagaaccgaggcatatgtaaatctacagtacaagagaggggattcttcttcctctcctgtcccctgatggcatgatgtaatgtcctcaactgcttaatactgtttgcatttgctgttgttgagtacaaagtttgtaatacggaggagataaattggagaacaactgtttttgagattggatatgcaggattagtcatgatcaaagtagttcaccttggaagtattatttacttctgtgggggtttgtctgtgcgatatatattaaaatcaagaatcacatgagctgtgatggttgagcagcataattacactaagaaggttgcacaagctacaacgtgcatttttataccataaccttgtggaaatatcactttgtggtttgtgcctgcttccttgcaattagaagcacacagcacaaaaggggcattttaactaatataaactttttattatagtttatttgctagtaaaaaaagaaaatgcctgcctgttaagaaccctcaatttgtaagttcattattattctaatgaatgataaagtaatccatagctgtttgggacacatatttccatcgtgaaccatctttccttaatttagtttgtagtaagtgttgaaataccccaggtatttttgtgtgtgtgtgtgtgtttaggggggggggggggggggaggcataaacaacgcaaagccacgaggcatgatttttcttgtgtttagttacaattgttatgctcaatttaattttgatatttgttcaaagttacatttctcattccttttctaatgtttgctaaatcaaaagttgttgcatactcatatgttaatgctctatgtaagtttcatccttggtttttattcctatacttgttgcatatcttatgctgagacaggtcctttgctgcaggtatctaacagatcagctacagaaggttcatattgtttatgaagctaataaggtatagttgatgttcctggttatcgccagaatttttgtgacaattttaagttgattggcctgacgatctttcttttgaaggattttgttgttgaagcattgagatcaattgcagaattgatgatctatggagatcagcatgatccgtcatacttcgagtaagtatttaatgggatggtatcttggaggtattatcagttgatctatttgtttaattggtatctctttcagatttttcatggagaaacagattatgggtgaatttgctcgtattttgagaatttctaagctctcaagagtgtctctacagttactacagacaatgagcatcatgatccagaatttgcggaatgaacattcaatttgtaagtcactacagacaatgaatattcactcaataatgcggtatctatcctgtgtctacactattttgtttttgaaggttctaatctgtaagcaattatattttctgcagactatattttcagcaatgagcacatcaacttcttgataacgtatccatttgattttcaaatcgatgagatgctatcatattacatttcctttctacggtttgtaaaccagtccgaacgtcactgacatcattcattttttttatatatattggcttacttgatttttgtttcatgaagggcaataagtgggaagttgaacaagaatacaatttctttgctcgtgaagacaaaaaatgtactcatccaatccctttttatgcactttcggtattgttttccttgcttcttttgtttggataaataaactaggattctattctgtatttactgatttgtgtgtgtatacaataggagtagctcacgacaaattcctagctgccaattacaaacagaccttcagattgaatccgacaatataattcgccattattgttatgtcattcttgacaccccatcgaggccagcaatattatacgcatgcatttccttccagtgccatagtttctcttagctccacttagttctgaagacagatctattggatctatttttctggtctatttacattatttgctacattattttttttggatcagttgagctgtacatgttatatgaaacacagtcttgtaacagattttctctatactatatgcaggatgaggtcatttcctttccgctgtatgttgaggccttaaagtttgcttttcatgaggacagcatgattagagttgctatacgtactttgacgcttaatgtgtaccatggtaggttggatagccttgatggccattgtatgtctgttatgcaagttcttaatttgcatttgtgctgtttcttaccagatcgttcttttctttcagttggagatgaatctgttaacagatttgtctcacgtgcaccactgtcagactatttttcagacatggtcaatcattttcagaaacaatgtattgacttggataagttggttgttcgttctgttcggtaagtgtgccactcatttcgccattcatggataaatccagaacatgtcactaaggtccatctgcatccagaatatgccactcatttgatgataacacgttggcctgtgtcctcgtgctgttaagacatcgatgtcataaaaacggcttccttctgcattgacagttatagtaaatgtgcaaaaataatttattttcttccgtctgtgttctattctacagaaatgcagattctgctgtgccaacagcctctgttgaggatgcaattgtgcaaattgaagatacactctattatttcagtgacgttatgtcttctgggattcctgatcttggaagattcatcactgaaaatatcttgcaacttttggtgtttcggttcttactcccatcgttgcaaaggcagagcactgtaagtttagcgagaaatattttttgcatcctatttttgatacctaagcttcctatttgttaaaatttattatgttcatgttcttttgtctaggatttgggtataagtgtcactacttccatgtacttgatttgctgtatacttcacatttttaagaacaaggatatggcaagcactgttgctgctgcccttttccatcaacctgattgccatgataggaagcaaggaactccaaacggttatacctctgagcatgagaatggcatatctgacaatcagggcactagcacctcagatatagaccagtcaaatgaagacaaatcggatatcttgtcttcatcaaacacgcattgcttgcctgatgatccatcatcaagtgattgttgccaaggcaatacgcttaggtatgctgctcttgctttgtttgagtttccattatgcaaactccttgattgtagttcttactagtactaatttgtaaactatagatggtaatttccactggaaatggggataaggcagtagtctgtagtatgttatatatttctaaacatggtacgtggtattgttaggcatataatggttgcgaagtacattttatatgctaaaatcgttagggatttattggcatgatcttccttgctaggtacattttatcttagaaattctggtagatttggtatattctgattaaaaggttcattgggatcttattcacgcatttattgatattttataatttgttatagttatgctttagttgtagaattagtagttcaaacttgttagtaagaatgtctatcatgtgccaagcaccactccattgctcatgtgcgcaccacaaacatgtatgcagaatgatcttgttttaccactccattgttcgatatttacactaactgtgttcttgaaggcttgaacccatttgtatcctgataaatttgtaagtttaggggcataagtggcacaaagattatttttagggacctactaaaatgatttttaagtttaggaatccaaatgacagcactaagtccttgtttgggaggcccaatttcttggctcattcacatccaatggccaggttttagttcatataccctgcccatccccatggataccccaggtttttttaacatcccaagcatgccctaagcaagtggggggctagtaatgctccaggcatccacatattttgagagcttccaaaccacacaaaaaaaaaaaaccccaccaagttcaaagttcaataaaaaatgcatgggagggtagtagcacccattaccttcatccttccacgcacacttcaactagaatgttaattttatattaatagattagcgaatttcatggttagacttggcatgttttcgatctgttgggttctctggtttctttggagatgttcatgatatcaggtgcgtggatgatagtgtggtcattattatcgtaagttgcctgtcgtggttgtccataaatataagggagatcttgctgcaattttcctgctgatttttcttttttaaaaaaactggactcaaatatcttgtgtatgcggtttggtagacctatgtttatgtggatattcaggacgttacagaaccttagtgcaattctcttctcttcatgcattctgctccccgtggctatgaaaaaaatattattgggacactgacatggtctccagaatgcatttgtaatgaccaatttgcactgttgtgacgtactttattttgcagataaactcaataaaattttatgaaattacagaatattgcatgagatatatctactcattccttagtatggccaatataaatattccctaatactttggtaagttaaaatagtttgattaaatgattctaggataaccttaggcactatatttatcataggtgatacagtagatagtgacatagacctttcttatgcatatgcctatatttacacagctatgaagatatttgtttttaattgatgtttttaatgttgctttgtggtatgttaaggttggatgttaagtagtacgtgcataattttacatattttgtcattctatatggtaaaatatgaatccatttccttatttgcagggaacatttgctgtcttatataataagtggggatgacttccaagctttaggttctttgtgcttattttctacattgttgcagacaaaaggtacttttactgtcctcatttaactaatattttcactgtggaatttccaaaaatagtaattatttgagtccatattgtctttctagaacttgatgaatcaatgctagatgcacttggaattctgcctcaaagaaagcagcataagaagcttctattagtaagtgctattcttcttcttcttcttcttcttcttcttcttcttcttcttcttcttctgcaacattagtacacttctgctattatcacacccagaattctgatttacatgtttgttagatgggccttgtaaattaatcatgctgtggtaatggtatctatgttgttttgcttgtgcaaaatgatgcatctgtttgtatgcttgaaggaactaattttgtgaacttttattattaatatagtacataaactcccttttttctatgtgacatttgttgctatagcttaacattcaatattgaaatgacataagtacataacaactggagccatgattaacttatgttaatcatgttaacttatgttatattgtacctttgttaagatcatgtgagctgtcttaggcacactaattttctgacacctgtattgtgaacctgcagcaagctttggtaggagaagatctagctgaaaggcaattattttcatccagtagcggtctagcagatgacagcatctgcagtgattttgatatgtatgtaaggaagcttcaggtatactgctggttctttcacacacacttggcaggatgcaattatacttggtgccgtctactactttccaaaactttctatgacatagtggggtccacaattaagtcctttactatcttataatatataagagaaacccacacgtggcctggtatctgactgcaaatattgtctcctgttatctcattgtataatatggaagacatgcaatggggcttagagccttgtacatgtaaaagaaaaatatcaagaaacacaagtagtccctgtagtatgttacctactgacattgcaacttcaagttggcccccacctgtgtgtactgagaaacaaaaagaaagtttatagtgctaacttttgtttataactttttaatttatgacttaaatgaatttactcttgttttcccaagcccctctttagttgagcctgaattttaaatctataagtttaatttggtgatagactattacaagatcacctacatgtttgttttgtcttttggtgttaatttcgtgctcgaaggggtgttatttgaactcgttgccctgcgcttcatcaacaaatatcatttatgattcttttcatgatcataatttgtcatgtactccctccatcccaaaatataacaacttttagagttcaagttttgtccggaatataacaaactaatacttgtaaaaggtgatttttactactaaacttcccatactaccccttggttttattatcaccccaactagtctgggcccaccagcccacacttcacccaccccaaggagacaaacaagtccttttacccctctccttaatagccgtgccaagggctaaaacttggtatattcttggtatgttttgggatggagggagtagaagataattttgaacttgccatcctagaatcagacagatttttaggacaaattgtccgcaggtccatgcttattaaattgagatacaaataaaactatcttgtttctttcttgttcgtgtgtttgtcaattattctctagtaaatttgttatcactatgctatatctatgcattttgtcttctttccacaggataaatacggtttaaagtgtcatcatccacggcaaatgacctctaaattccacagatatcaggtttgttttaattttgaaccatatggacattaccagtagatcctcatgttcgtaatataggtttaggttatttttccctcaaaaatggcatcattttttaaatttattttgattgtaaacttactgtcattaactaaaattgttgttccatcagtacatggctaatcattggtgcacactttattttgttatataagtatgggctacaacctgtagacacctcaataaactgtattatagatttaatgatttattattaactgagtaactgatacagtcatcctgatgtctctccaaaaatctatgaattttcttattcaagatgatctttttatcttgcttgcatctacatcaggttattttgaaagaatatatttgcaacttaaaaatatccacacctacatgaatcatgaacgcctgtttccgtattaatattcattcattaattttcgctgtagtatacacttagaggttgatgtgctacatatttgaatatgacttccaatattcaagcattttattttattatcatacttcatatattaagggacgtttctatcgtttgcactttgattttttgcaggtgctcgatgcattagttgcccttttctgcagatctaatgtatctgcagatgttcgcttagttggtggctggcttttcaggcaactgctaccccatggagaagaagagttcactgcttttcatctaaaatggctaaaggtatgttttgatgcattttagtcctgtgatgtttcaaaggagatacagcaatacatgatccctcaccagatcactattcactgggaacttggcagttctttcttgttgtttctagtcctgactttgaagcaagtgtcatctcctaatcctaatgtttgaaacttccccatatatgtcacagtacgcttggttgtggctagttaactagttgaatcactaaatgaaaggtacaaagatgtagtgatagagagaatatctgtatatgggatactgtccaatgcctttctaagaggacaggcaggctaccaactgtcatatctcgtgctcaatgttgtcagatttcatgtactctgtactgatcatggatgtgaaggttaaatcaagcatttatgtatccctccacccccaccctcttctttttctcttccacattgtcactaccctttcgtgtcagagatgaatccatgctgcccatgtatctggtacaattagcctaaatttctcaatgttgtcacaatgttttaatcgcgcaggattcgcataaggattacagtataaaacttttggacgaatctggaggatgctggcgggacttgcttgttcctattgttaaagaagcctggaagaattgcaagaaaggtagatttcaattttgaggtggaagatcttttttccacacgtactacaaatggttatctttgcttatacttttttaccttttccactggagttagcaatcgagacatcttcaccacctaaaggatccaagtctgctattttacccctggattcatgttcatttggaggtcagagctcgttgatcacatgccatgtgacctgtgttgtcctcaactgtactgtgttgaaccatgatgaaaacttgatgtactgaatcatatgcactgtatttcaggtgattcgtccattgccatcgcagagagaatctatgagatggtgaaggtatgtaaatattttcattttttttgactcatccataaaaattgaccgatctgaaatcataggtttgttccgttgatatgcatttctggattttattaccatcaatatgacagggcctgagtgcctgacacagaagtattgcctattttggttagaagtcctaatatccattggcaactgaataacatgtaagagagagaaccgaatggaaaaaccattgataaccatatccacaattctttgctggttgctgtgctggaatctgtagtaaatgtggccacaaagatttacttcagtcatcattgtgctcatggtcagtttttaaaaaattaaatggatgtacatgcatgataatcagctaattacaagatgataatttgtatttgttagtacaaagtttataattactttggagtctgcaaagttccttaccgtcctacttttgtttgtcatactggtagtataaggctatattttacattttataacttgtaatggttcgatagacatgctgtactgtgtgctcttgacacagaatatcaaacttcaaaatgttctctgaaatatttcgagcattaccagcagtgtaggtaatgaagtagattctgccacttttcagatgccatggatataaaaccatgaaaaatagcaattttgttgcacaggtcagaataaacacgaaacaagactgaaaaattctcctattaatggctcgaatacattaatctttacaattgatcatttagaagttgtttcttatttgctttataatcagatcacaatttgatttgcactgttacaatcagcaaaaactgttatttgaacacatacgcatgtcctgagttcttttatacatgcagttctatactcttgctagctgtagatctacaaaagatgcggaggactcccaaacacaatacccacccaaatgctgatgaaatcctctatcaatctccaagcatagaaatatccactgaccacaagcaaccaagggagagaactgagatgaatgctaacataaggcatgataaaacttgtgccatcacagagtccttgatgttgtcacggtaggatatgagagagcaaccaagggagagaaccgagatgaaagctaacgtaagagacgaagacttatgtggtcacacatagtcccagatgttgtcatcatagttgatgacaacttatgaaaggtgcactggtcgtaacaactgcttgtggttgactggttggggcgctgtaaagtccttgttgaggtatttggagttgcatgctaggtattttatggctgctggggttgcatgacaaagctatggaacttggctgtactggaatgagtttttagaagacaaatattatttgggttctttgaattcagttgaacgttttatgttgcatttaaatccaaatctactaagtggagtcccttattaacagaatctgaattaagtaattctttggatgtgaattaacataccaaataatggccctgtaaaatctacatcttggtgtttttgttgaataagtgtttattccctacctaccaatttttagtagtttattccccacgtaccaaacttttgtactagtttatttcccaactaccaccttttgtaccatgatttgttcttttgctactaacttaattttctttttgcaaaagatggcataatccattatattatgggacggaaggagtaaagtaacagactttgccctttaggctgtatcaaattcttatttgtatggttttaagatcccttatgttgcaaaatgggtaaagtgaaatgataagaacgattattggaatatgaccatgccttgttcaatattctatgagtgaaaatgaatgttttaagggatactctaattttaatggtgtaacagaagacataaatatagtagatatatgattgtaatagtgtatttttcttaatttgtcatcacaagtctaaaacaccattcatattatcaatggaggcagtaccaccataatacatatgttttgtgttatttttgacgtttagagagtttgtgttcaaggtttatctagttatctatctgatctttctgtaaatacaatgtaattatgagttgcacttgcatgcactggccagttcacccaaaggcttataagctcatggtgaaagtcagacaattcacttgcacatccagacctcacatgcaggatagaaactagcacagttcttttttttttttgaaaaaaaaaattaaattgcactgtattcaaattatagaacatttaattctgatgtcatattgagttgcatgcacctgacggttcactaaaaaacatagcctattgagaagggttggcaattgtcttatatttcaacagtaataatgccaacaagaagccctactaaaaatgcctctaagttatatgcagagtgaatgtcctgctaggttttattttttgtttgggaactcttgtccaacatggtaaaagctgatgcactaagataaaatttctaatcgccatttccgaaatgaaaattttaaagctgaatgctagttcagtgttcttgtcctatgaattttatcgagctgttggtagatcttggctagcaaggtggactgtgaatggtgcgcgatatgaatcaccaagacaggtactcagtcatggtggcatggtctcatggcaagtaagctgaggtggatggattaactgatgcagtgagagcgttgcgacacacagatgacagatcgggagcatagcagttgatgtcatactcatgttggcatgtgacagtaatggcctatgtttggtgaagtgctgtggagcagtgtggtgtggcttgtcagtaatggtgcctactcatgctgccagcaggcatatatggcttggccccagtggtacagcaataaggatttcacagtggccatggcaaccttggtgacatgacgacaacagtagctctatggtgacataagtggagatagtggcatggttaggaaggacagtaattcttattagaagcaagcagggccactctgggatttaggaaaataaattaccctgtctggtgtccaccttgcggagtggcctttgataagaatatataaaaacaatatgcatagtctgcattgtgcatttgtcgctttcagcagttttgaggtcactgaatttatctcatgttgagtccaatgatcaggtaagcaacatttgttgctcaggctataaaaagctctctccttttttttttcctcgaaataaaaaactctctcctaacaaatgtgataatcactgaagttgagaaacctagtgtttacatcattacaattactactcttaacttacatatgttctgacctgtatgctggtggaagaaacatcatgctgcttttgagtgaatttagatcttttgtaccctctgtgttttgctgctagagtcacaaattgaaacatgaaactaaatttctgagctttattttcaatgcgctatgctttattttttccttcgaaggtaaggaaagcaataaatttggaacatatgacttgttctgtcatagttgactatgcctctgcttaatttattggtgaaatggctggcctattaatttacatattttattaggaattaatgttactgagatatgtgatgattttttccagggttttgtgctacagcgtcaagttatcctcttctgccttggagaaactctcaccgaccagcctcctattttttccccaactgatttgcctgtaaataatcgagcaactttagcaggtttcgatggctcagtacccaaacctggacttgaagttaacttaggtctgagtttacctggaaatttaaactttttcatgcttaaatcatcacaagtgcaaaattgtcttaattctttcctgcacttactgatacttcgatttgccgcattgttgttgcagttgatgcggtcccttgtcgaatagcatttgagaggggcaaagaacgccacttctgctttttggctctatctaatggaacttctgggtggattcttcttttagaagaattacctctcaaggaaaaacgtggaattgttcgtgtcacagctcccttggctgggtctgatgtatgtattatcattacatggcaaatcttttgtttttttcatgcatgatgaaatcatattcattgaaaatatctagcttgtaaaagtatctttatttgtgagtaatctaatgtgaacattttcactttatttcagccaagaatagatgaaaagcatgcaaaatggttacatttacgtatccgtccttctacagttccctttttggacacagaaaaatacaaagggaagacaagaaagtaccttgttgatggaagatggacccttgcttttagagatgagcaatcatgtaaggaagcagagactatggttatagaggagatgaagctccaacaaggtgctgttggagaacagttgaagctattgcttgaatttgacatgcctgaggatggattacagcatccttgctcctctcatgaaaccacttcggatgatgggtcatgacttgctagaacatcatcgatgatcgctcatgccttactggaggtttcatcatgtgcagtgttcgagctttgaaaacatggtggcaggaaaaccccgtcgctgccatctccgacgagcaagtcggtcacgctctgtacattacatcggcagatttagggaggtccccttgttgacacactgtagagtttcgagttttgactgtttttgagttaagttagctcgataggattctttgtacaatagtttgtacctgtcctttgtaatgtcatacaaatcacattccattctttcataagcttcagggcagagttgggctgtgtacactaattgtttgaagaaatgtgcaggcaatcatatctgttgtcaaaaggatgccctgactatagtaataaaatatgaattttgagctcctccatgatttttctttgtagaccactgcttatgtatgaactatttgttttgtttgctttttcagagaagaactgttagctttgacaagcaggatgctcagctaaacaagacaaccagatgagcatcggttgtgcttgttgaattctaccctttgaactgacgcttggaattgagtttgatgttcaattgattgatgcaacactggatgtctgcttcacaatgcagggtcttggtaagatgatagtcttctgtagaccgagtgtttggactttggagcaggtgagcagccggttcatccataaaatactgccgttcatcgatcacttgtgcagaaaaatcttttctgatattattcaagatttgttctttggatcatgtctaacaagtagaggtacgttcatttcaccagagaaaaagaagatcgaatctgaatcattcaggttatactctcggtagtttggaacactcaaggttacattgtcctaaattaataagtactttggagcacccaagaaaatttttttaatcaaggttaaggtgaaatttaaatgaaaaataattgcgattggtcaagactattaaacgggtgaagaaatgaagtgagagagagttgcgatatgggattagatggagaggtagctatatttcagggcaaaattgaaatgctaaatttagttatatttaaagattggcatctgtcggcacagtttggttcaaatcttccgtatattttttttttcttccttgcctatccctactgataagtgtccatccatctcccttcacctctttttactgcctctccaaaggcaaaagtgggggttaaagctttttttttttttttgggggggggggggggtaattacaggaaaaagggagctttctgattggcctctttctgcaccgagttgccggtaaatttatgcacgcgataaaatggactgcaaaaaggaaaagcttcctctttcccgtgcttagcaacgacgacgaccatatagcatgcccgaccgaccgagagtgatctgatcttccttaaaagtgccacaaaaagggctgaaagatggggggcaaggacaccacaatgccatgagaattcagaagctatgcaggggttgagataggaatggataacccttctttttcccaaaaggaaaagcaaagaaagggattagcaggttatgtgtgcattgtgcaatgaggtttttgattttcttttttaaaattctcattcagttttctacagtttgcatcaaacatagttgcgacattacatagttggcatctatcaaaacatacaacagggtcatatagcctatttactgcagataaaaagtcgtggcctttccttttaccaaacaacaggctgtcccaaggccttttgcaaggagcatgcgaccaaagcagcgctctgcagctgagctgcatgcaggggaatggcaaaagcaaagcagagcagagggcagaggaagaggggatgcgtcgtcggtctggccggcaaccggcgacagagaggggagaggtgaataatgtgaatccaatccaatgagagacaaagtgaggtaaaaaatatgaaaagagaaaagcttggaggggaggggccacggaatttgtttgtttgttcgtccaattgtccctctcaagcccttggcatccaacacatgtacttcatccacagtctcaaaatttaagttgggttagcccctatgtactttgactgttgattttttttctccataatgtattatcaataactacgaaatttagcatcgtacagaagtattgcaaatataaatataagatataacatgacactaaacatgtaccctattagtttaattattagtaaaaaaatgaattttgactttttttctggtaatataggtggcctcatatttatattttagtatggagggagtagtatttacatgtagaatctactggctgcttcttagaaaaaatgattgagatttacacaaagagaaatcaagcaaccgataaataggccatccatttcactacggttagatatacgccacatttgtcaattgtattcacttacagtaggcaaccatatgccttacatcttattaaggataagtacatgtgatgtatatatatttaaggcggaaatcctaatggacgggtgatcgctcccccatccgcccagcgatcaccccctgcccctcccctatactcagatatactcctccctcttctcccccttcctcctccccttcttctctttctactacagtacaccacacaatttttttaaaaaaacaaaagttagaaaaatttatgtatagaaatactatatataaaaattttgaattcaaattcaaatttgaatcgggtaggtaaacttttgacttataaactttgggtctataaactttaggtgtataaactttagatgtatagaaatactatatatagaaaatatttgaattcaaattcaaatttaaatcgagtatataaactttaggtgtataaacttttagatgtatagaaatactatatatgaaaaatatttgaattcaaattcaaatttgaatcagatataattcaaattcaaatttgaatcgggtatgtaaacttttgacttataaacttttgttctctaaactttagctgtgtaaacttgagttgtataaactttaggtgcataaatttactaaaataggaaagtaatgcggtgccaaaaaaaggaaaccagttaggagggtaaaaatatacttcccatccattggcccgtataattttcatctctcgacttcatgtagagcctttccatcaattattaaaactatgtagaattcatttttatgttcttttatcagtataacatataaggcactgcattgaagagctaatgcatgacagatgaaattgagtttagtacgattattcgaagacagaaacaaataaaataaatattaaaagtttttttttaagaatgctgatgaacaaagttttttttttctaaatcttactccctctgtttcaggttataagacgttttgactttgataaaagttaaactactttaagttgattaagtttgtagaaaaaaagtattaacatttttaattcaagacaaatttattatgaaaatatattcaattattgaattgatgaaactaatgtataaacttagtcaaacttaaaacagtttgacttagtaaaagtcttataacctaaaacggagggagcgtttctagggatttccacctctgatacgtgagagtgggatccagacatccagtcagtttagattttttttaaaggaaagtttagatccaatttttacactacatgagtcaagaccatagacgaaatgggcagagcaaagtcttacccggttttaagacttgaggacgaattctaaggttgtatcatttctctgagatgtgaattgggtgtgataatcatctgaccaatttcaaatcaaacttccattttacctatcaatctcaacgacatgtttgcaaacaaaaaataatttatctataaaacttttatatacgtgttcttaacgatctaaaaacaaaagctaaaaaaaactacgatgaaaagacctacaaattaactctaaatttatgattgaaaatttaacttttggctgataagcataaacataagccaaaagatgaggcctaccaaaatttatcttcacatgtgagttgtgacagaaaaaaaaaacatttcacatctagtgatttagggggtgtttagttgtaggggtgtaaagttttggcgtgtcacgtcggatattatatagggtgttacatgggatgttcgggcactataaaaaaaactaattacagattccatcagtaaaccgcgagagaagtttattaaacctaattaatccataattagcaaatgttcactgggcagcacgttataaaatcatggagaaattaggcttaaaagattcgtctcgcaaattagtcacaatctgtgcaattagttattttttagcctatatttaatacttcatgtatgtgtttaaaccgatgtgactgggtgtaaaaatttggggtgggatctaaacatgaccttactctttgcatcacagagattgcattttgtttctgacttaagacatgaatataattaaaccccagataccctaacacaaaccaatttcaattgaaaaggaatttatataaattaaacccccccccccccccaattctccatttcctagttcacaattttttacatgcaaagaaactaaaactaaggacactagtagtctagtctagtacaccaaaaggggagcaaaaattgggtgggctcagtccacatggaccctactcggaaggaccgagcccatgaaccctactgactcgtgggccccacctccactgggccccacccccaacactacagccttcccgccatttttgaccgttgccgccgccggttcaaacacctccgccacccaccgctccatcacctcgtcgacgaagtgccccgacgccgccgccagcgccgccgccgcctcgccgtcgacgcgcagctcccgcccgccgccgtcgagccgccccgacagcctctcgcggacggcggccgcggcgccgtggtggtcgccgtcgagggtgaccacgcgcgtggcgatggactcgaggaggaggcggtggtgcgagtggccgtgctcgccggagtcgtcgccgccgccttcgtgggttatgtcgctcgggacgccgtcgtcgtcgtcgtcaacgtctccggcgtcgttgtcgtcgtcgtcgtgggcgaagaggttgaggttgaggtcgaggctgtggccattgccggcgctgcgccgtgcccgtgcgcgcttgcggtcgcttgttggtggtgaactggtgggcgtcttcctcttgaggtccccggacggcggcgactgctccgacgtgtacagccgtaggctgatgacgccgctgaccgctgcatcggcgagcttcgatgtcgtcatgaccactacggagcccgagagatcgagctcttggccgccgaacttgtccttcagagctccgctcctcgacgccgccacgagacattccacgacgtgctgcggcgcgcgctcgacgtcgtcaacgacgagcacgagtttgttgccgccggcggccgccgccatggacgctctcgcgacgacgtcggagcggaaatcgtcggcgcacccgaacttgttgggatcggcggagacgacgacgacccgatcagctgagccgcaatgcgtctcggcgatcaccgccgccacccggcgcacggcggcgtggtcgctccccttcaagagcagccagacgcccgcgcccttcgtcccgttcccgctccgggcgccggcggccaccgcgtcggcgatctccgccacggcggcgcgctgccacggcacgttcttgcgcagcctccgctccagctcgcgcgccgccgcgccgtcgccaccgccgccaccggaggacgacgccgagtccgagagcgggaggctgccgagcgcgagcgccgtcgtcacgtcctggcactccggctccctcagagaactcagggacggcagcgccgccgccgccggcggcgaccaccgcaacgcctccatgcccaagaaccccgcaatgctcggcttgccgccgccgttcggcagcaagcaagaagctgaccaccatgggaggaggctgcttggtccattgccataagctccagctccaaacgactgacctgagcatggatcgccgccgccgcagagatgaagctttctgcatagcctactccatttcctcttcagctcgatcaaatagttctcctaaaatcacacaaccaaaatatctcaaacatgaattcccctcactttcacaatgcaaattccaagaactctaaatcaaaacctcttctgatcgattcacatctctgtttctttctcctaccttgggtggctccggcacgagccagccggggagattaccggcggcgcgtgggccctcctcgtcggcggccgcctccgccttcaccgccgacgcctccctctcgtagttgtggctgcactcggtgcagagtaccagcagcttgtcatccagctcgttcctcgctgccggctcggcggccatggcgacgaaagggctagcaagctgctgctgctgctgctggtggttggtcgccaccatggcctgctgcacaggctctccattgctggacacatgaacagtatcagttagtcttaacagtagtacaagaaagtgaaactcagtttgaaatttgtctcaaaattccccaaaaattggaaaatgatacagaacggtatcccgttcagacgggacgacctggtacctcttgataccctattcggacgggatgatacctctgagatatcgcctgatatatgaggcatcatctctttcgaacgggatgccgtccgtcctatagcattccgagactaggagtgcatataaaaataactatagcagcaggtaagaaatctagtgtgaatctttatctgaatcctttaccctgaaccaaatgtgacttgatcttgtgcatgagagacgcatcattgcaaggaaaagggcaaaagacagcagcagcagcagcactggaataaggctgtgatgccttcgactactaaattagtgtaacatttgtaccaaaaggggagtgtttgcgccactgtttgctgcatcagagaaaagccttttttgccgagcagaaactggccaggattcagatggaatctctgcaaccccagcagagccaaaaaaagccagtactaacactaccacctccccacattccccatgaacaaccatttttcttctccctctctgaagcctgaacctaagtttttactacaacaactactactactatcttccagcatgcagaatctgaatcttgaaagaatgaagaagcccccccccattaatgtgaaaaatatgcttcaggcatatttgtcaacctgtcataatagcttacaaaaagaaactgttccctaagtcctaaaaatatagcaagctctacccttcaaaatttggcccaaaatataaactcatgtaactattttctcatttcaacaaatcacaaccaccccgtatttttctgcacccactctcacctcgatcttaattggtactaaaactcggatgaatgcttatattttaggacagaagcagtaagccgtaatagtaaatggatggatgttcagagagatggttcttgcaacatcagatgacaaagtggtcctgctagctgttcctattccagacagcaacacatcacaagcagcaaagcaaatgctaagcatagctgcctgcatgcccaacagtgagctgaccactgactctgatcagcagcagcagcagcaagggaacaacaagctagcaagaagaggagccaacacaacaaaacaacaccaagcacaagcaggaggaatggacagcgagagtgtgacagtgccagaatcaggctgctgggacacatgcagggacaaaggaatgaacagtaggtgttcgtgcaaatggcggacaaggcaagggcgtaagattcatgggggtgctcacgtacctcgtggtggtggcgacggcgtggaggttgttgagggccaggccggtgccggcgccggtggggacgacgacggcctggagcgcccacgcggactccagcgacgggcggcggcggcggcatcgcatgtatgtctggtagctcgccgtggcgacgagccagacgcgcccgcgcggcggcgcgctggctcggaggtcgccgaggaggcggccgagctcggcgaccatgtgttcgacggggctgtaggacgaggcggtgttgtggtggtccgcgccggggtggtggtggtggtggtggtcctcgtcgagcgcccagcggaggtcgccgacgtagacgaccaggccgccgcgcttgacggcgtcgacgctgcggcggagctcggcggccttggcgtccacgtcggcgcggctcatgaggcggacgtggacgtaggagagctggagcttgaggaggtgcgcgccggcgagctcgtccgggacgtcgccgccctccagccgccgcaggagctcgccggcgacggcttccgccattgacaccgagtcgccgaccaccacggggttggtccgcctcccctgcttccgcaccatcacctccaataccgccctcacgtcctccttgcacgacggcaccgccatgcccggcgagctcaagaacggcgccggccacagcatgaagccgccgccgccgccgccaccgttgccgccgacgccaatgctggggtcgaggaagaagtgaggtgggatggccggcggcggaggggacgatgaggtggacatcatgagcgcgctctccccctcgaggttgctcttgacggtggagctggagaagccggcctcgcgcatcacccggctcacgctgggatcgtcgaggatggagatgatgagctggtccagctcgaccttgatggcgagcaacggctgctgctgctgcgccgtggcagccaccggcggcggcggcggcggtggcggaggaggaggctgctgctggagcttgacgcaccgcggcgctggttggcctgcgcgcgcttgagcgcggcgacgagcgcgttggagagcgtcgggttaggctggatgagcgacgacgcg

SEQ ID NO: 24953 - DNA, 16697 bp, Oryza sativa
gtcgcgcgatgccgagcgcgagtttgagcaccgcggccgcctcggcggtgagagactggtggatggtgtaagcccccgcctgcatcgatccgtagataaccaccaccccccaccccccacaccaatccaacaacaaccagctcgccttctcttctcctcctcgaccacgtcgtcttcctcctctcgccaccaccacctttgcaagctgaggcaagaagctcactgccactgacttcactagttcactactactccttttatcagtttcactcaagcaatgcactagtaatctactactagtaaggctaaggcagctgcatgcatgagtagctagcttgtctttctgcaaatgctttttttctttatctttatagactgcatttgcatggcaatggccaatggcaagattctctctctctctagtttggagaagtaggaagaaggagaggggattgttggtttgtttgtctctttatcgagaggatgtgcgtttcgtcagcctttgctccctcactccggcctcggctactctcccttcaattctcttttcttctgtctcgtgttctcttctgccatagcataccactatgcattgccatggcgatggctttggcatgcatgcggcacgtttcctttgcgaattaggccatgcatcgtcgatcgttcgttttcaattcaacaaacagctgctgctggctgctgctgctgcaaatgctaatgcatgcacaaagtgcagggggtgttcccctcccgttccatccattttgcttctccggttaaggcacgtactcaccctccctatgtaccaaaaaaatggatttctgtaaaatcccaatgcaacggtaataagtagatgaaagtaccaaaatagctagtgatggagccagaatgatttttgagacctagcaaacttcaatataactatagtatttattatcttcttggaatacacaagatgcgcatctttgtattaggagaaataaagagtatttacaaatggagccaaacaagaaaaaaggagggggacgggaagataggagaaggaccaacaaacttaagcctattctcgcgccaatataaggaaacgatttaaagcaagacctaaatggttagcaccggcagcgccgtgtgtgccaaccgccagagagttgcttccgccggagagttataacaaatataactagtatttgttatagaaatttcattatcaatttacttatcaatattaacatttaatggaattttcggcggcgagcactggcgattgcccgagctagctgggcggtggcttcgccacttaaagtatcccttatcctatcttattataaagttagaacctactgaatcctaaaactcaacgtgcaaagatgacacatcatcgttcactaacaattattacatcttaaatatcttgcaagcatgctatattatctataattctattctataatttattaacttttagagctttaaaatacaagcatgttaaatcataacccacataattcacataatatttcaatatatctctccatcatttttataatatcctatatacctgtatattttatcctcacttagttaatattatttctctcttctatcattaatccatattacatcatttgtttttagccattggatgactaatctatagttcaaatatcttcatcctttcttctctcattaacatatatttccccaattgtttttagcccttcttttcttctctcataaagccacatcaccttacttttacatttgaatcatcattctatatactatttaaatgatcataaaccacatcaacttatttaagcttagttcgtctagctatttacacattatttctacctattgttatcatactaaatttctacagcaatgcgcgaggttttacctagttaataaaaaagttatattgaatggtgagttggtaggggtatttaagggatgatttttttatttcgtgcgccaaaagtaggtatggatgttgaatttaattctttttggacaaggttcaaattctagagttaatttatttttgaccaaggtagggagtacaaaataatagcaacattgtttaaaaaaagggtatccctttgccgtggctgagtttaggaataaactcttttaacttcttttaaccgagaaatcaactctaggttaagtataaaactaggcattttaaaccccacctatatacatccctatacaaaaccattttggcaaataatccttttgactttataggtggtataaaagagaatctaccattgcagtaagctaaggtagcccacgtcatacgtatcatctatgaaaacttattctagaggcgattgctattagtgacggcctctacaaattagctttccaaaggctgtcattattagtaactacgtctacaatgtccctctcttgcttctctattatcaatccctctcgagtctgtatctctctggccttgtacactctctatgccttcctctctaatgtcagggaacctccactattctctctcgctccttgttggctcaccctttattagtgttctctctctcaccagatccatgcttttctctcactgcagcttgggacacggcactgccggatcagatggagggaagagggatgtatgtgtgtgtgggggtgtgtggggtggggggggggggtggtcatcgaatccttatgagaagcatgtgagggtggcagtgctagaacaatggttatgagctaacgtctaccccatccctcttccttgtctacgctgcgatgggagatggagtaggagggcaacaacctcgactcttcgatcccctaccttgtgttggcagtagtggtggcgattgtcggatctggtcttctctttcaagctaagtcttaatttattcctcctctctatattatcctatctcttagccttttctcctaaatagatcgggaggccgactggaatccacatgaactcatccacggcggtgggggtagatccacatgagctcatccacacggtggcaaagtggatcaatgcaagcttgtccccggtggtggcggaccatggcaagcctgtccacagtggtggcgggcgaatcgagcccatccatgatgggagtggtgatgccctagcagcaatagagtacgagtgagtttcttttaggttatagaatgattaccacgagcggacctcttataagaaattaaacataatttagcagcctgtgaaagtaactgtttgagtagtcagtaatgtataacattctattataaaagatgtataaaatagttccatgtcagtaagaattagattacttacatatcgaaagaaaagtgccattaaaaaccagattggattgaccttaattaatactccctccgtttcaggttataagttgttttgactttggtcaaagtaaaattgcttcaagtttgaccaagtttgtagaaaaaaatagtaacattttcaacccaagacaaatttattatgaaaatatattcaattattgatttgataaaactaatttagttttataaatattattatatttatctataaacttagttaagcttaaaactgttttactttgaccaaagtcaaaatgacatataacctgaaaaggagggagtatgtacttaatggacatggttgttaagggttttattccggttttattggtgaaaatcggtttctaaagttggacatacggtgattgacattggaaatactactggaataataatccgaaatacatgtgaagatcgttataattaaaaggtattcttaaaacatgggaaatacaatcattaatttttcagcctttaggtcaagcaaagctcgtgctagcttgacctatcaacgatgggattttctacttcgtttgacccaactttgaacactcagagtgcatccactcaatgccagactcccttatctatcacaatgtccatacgaccgtataggagtttatttatttatttatttttgaaaactatatgctccatcggtttgtcgtcaagcaaactatcaacaaaaaccaatggaaaaaatagaaaatatgtaatgatgacaaaatttggttatccatttttatacttttttgtaaaaaggatgaatagaaattaagtactaaattaatatatactataatagacatatattctacattttttttggaaattaataaataatacatatttgggggagttcctagtcattattaaccaaacacataccgaattatttctatcattgaagtggtatttcaccatccgtctatatatgcggccaattttgacgaaaattaaactgcacgagctctcgtatacaagactgtcgttatatacctagttcgatacagttacaaagttgcatgcctaatctttgttgggagtacttgaatgcatattctctttttcttctttttagtaaaaagaagagcagcgcgtgataaggtgatcagaactttaagcgccagaaattagatggcctttgtgtttcagggtgtgctctttattcaaatacatgcactaatatatttgtacaattctttattttgaaaaaaggaacttttttgtagcggcttttgtgtttgcagttttttctcactttcttggtagggcaaagctaatagaccctgaccttggaaaaatgctggtcagtatctattttctgggccttttttaacattataaaataagttaactaggtatgtatacttataagttgcaaagtgggaacaaataaattcgggagtggtttctataattgcctggtacaggaaacgtttatacatgcgtctaatatctagttttcaaaggcgtttagcgagcctatgtaattcagcttatgtagaaatcggttattccacatgcgtaaaatagctctcgtgaaaaactatttacgcaagcgatattttaaggaccgcctgcgtaaatgggtcgtcgacatataggtgacctataacatgaggcagccctaaatttaagctccctatatatggaaaagaagcacaatatacatataggtgtttttctcatgcatattaactctttaggagttaaattggttttatgcttaattaataatgaaaaatccattctctttaaaaaataatttgacatgcttctcgtaaaattcctagtcagcctttcttctcgtttatttctactaagaattgtacaatagtacatcttgattttatttttctatttttattatcacacaatctatttaatttatggagagagccagccatttttctgctgcattttattaccttgatcacaaccgttagctaggaaagatgtcgctcattttgatgctaattaacacgtttcgacaaagccctagccgatgacgaatagagtaatgtatgcccaatgtcgtactagcagtagactgatcgaagccgtcattagcatcaaggtagccttttaatttggttcagacattctgcctttttgaggcttttgctaagggatattcagaaatcgagctgggctggctgggcgtgagagctaaagctgtactgtcactcaatttccaaaggttgccgaatttgacgttgtaatggaatgtctctttttgttcccctcgaaagcacaacaagctcactaattaaggagctggtggtatggtttagtgtgtaagtggcagacatcggacaatggtgagattgtacaagataaacttaggacagcacacctcatagtcatccatgaatgacttatggcctgatcttaaacaataaataaattaatactccatccaaatatcttagacgtatttttttaacttcttctcttaacatgttttgaatgcatggatgcatggagactataaatacaactatcttatttgaaaaaaactagaaaataaaatataattaaaactttttggatggagggagtaataacaacaacaacaataacaatacctaagctgtttagatgccactttcagaaaccactactggagaactaatatttcattgtggtactcaaaatcacaaatatctcggctagattaagaaccggtacaaaatcagatgtgtgttgtaggtaggatcataacgtgcgtgagaggtaagctgagagatcttgagttcaattcccacatcctacaaatctttttgacttggtatgttatctttagtaccggtactaaagatcgaaatttttagttccgatttacttgtcactgtttctacaaccggtattaaaggggtttctaaccggtattaaaaatcgtttcttcactagtgaacgtactattttgttctccaggtgaatgttgtttcattttaagacagttataaggtattggcttactctaaaaaactaaaaaaaaaccaaaaacatcatttaattttttttgcccggcctaaagttttttaaaagttcaacaatatcatgtattattatagatatcaacgacatatagtccataagattaataagaggatcatacatacagatgatatagcacattcaacacaccaattagtaaccaaccaagcaatctcatgataagagcgaacataagagcaagtttaatagcatagccaactactagctccaaattatctatatccaatataatagccaattcatacaatagttgcttactatactattaatacctgatcccacctgtcatatgcacgttacgtcttggagtccatgctgcagctggctatagatctgtagcccgctgctcttctctctctttttttatctctttaaaatatgtttatagctagcttatagtctgctattgtacctactctaatgttctctttcctaatatcatgaaaccaaaatttccctccatatggttccatggccatcctaaacgtacatcggcgatccaacgaccaaaaacaattctttcgacgtgtcagctcctccttggagatctctctctatagtgcacgtaaaatggcatcaaataaaggcaaaagaaaaagaaggaaagtacctagggttaagtgcacggatgcctttctagcagatcgaaaggggcgagaaaaaagcaaaagaaaagtggagtttattccggtgcttaagccactcctcgccttttctccaagctcccttcccaaagatatgagcagagaaaaagaatctctcgtttgtcactgcagcgatcgatgctttgctgcagtagtagtgcagctatagctattgtgtcattgtgtgtgagtgcctgcactgcattgcatgccttagcttccttttctctcagtattacttgctttggttgtgagagtgtgtgtgtgaatggctatgtaaagactcaaactaatcatgatgatgagcaggcacttagtttaataaagcatggtgtactcatctccacccctgtgtcttaacatgatcaggaaaggttttcctggcatgctgtgtatagctgctttctactaggtgtgcatgcaggtaggattgctgctctatctggttttatattttgctgatgtgttaaatgtggatatgtgaggagagtatatttttgctgatgtgttaaatgcgctagaggtagctataatatgagacggaggtagtggtaggtgttgaaaaatattatcttcaaaagtaagactccaatatttggtagaccaacctaatttatttatgctcctaaatatatgctgttacaaacttttctgcaaattaaactattggatcactactacagaatccctaataggggatggcttgtagataccggttcatttaaaaccggtacctattgacttttcccaccttcgtgggataaaaaaatatagaaccgtcatttaagcaactatagatatcagttataaataaaaaccagcaccagtaatatattataagtgctggtaattaaaaaaaccagtacctataatatattatatgtgttcttttataaaaaaaataacatccatgaaaccgagcagagtcaggattcttggcctccctgtttagcgcaaaggaagagggagccaagtggtccttatccacttcgcccccttcacctccctctcttcactcatctcgccaccttcacctccctctctatctcgcccatcttgccacttcacccgcccccttcgcctttcctccagcctcctctccggcgctatccccacccccactctggtgcctccctctattcccctcctccctcttcgtagctgtgggcggctttgccggttgcgacgacgggcggattcagcggcaaggaattatctcgtgggtagatccgacggtgtcagcagctcttgtgggcaaatctggtggtggctgcttatgccaaaggcagatctgacggtggtggcggcaactcccacgagcatatctggcggtggtggcgtttcccacgagcgaatccagcgacagcggcgatgtctctcctcctctctcccacaccgcgaccgcaaccagtcctcgtccctcctctccgccgcttgtggcgtcgtggtgtccaccccctcgatggtggtgactcctgcggatctggcagcgacaaccttggtgtccaaattagcaatttgtgctatgtgaaattgttggatattcagttaaaattttgggtgtttatgatgtgttgttggatggatcgatggtgatttgtgttgtgtgctttagggatgttgttggatcaatggtggtctgggtgtgatgggaaccggctcgatgcatcggctcgtgcattcgtggaacatcaaaggtgttcctccttattagtgcctcctccgtgttgccagtttggaaatctggcatctatcggggtttctcaactggcacaccaatggtgttttctgtagtagtggatcaattaaaagttgtgataacgatgactccatttatcatcacttgtaccacatttcaaaaagttgtgatatttattcatggcagtggtagtgttaagaacaaggaaaatgaacaaaatagaaacaagcctcgaatttttagatgagttattattattactattatgatggaaaacttcatatgacttatactaattatgaaataattaaaaagctaagatggcatgtgttgattctctagatcggcaataaaatttatagggtgtacaagattaaggagagatggtgacacagatggttatactggttcatgccctcggcagaggtaatacccttctccagttgtatgtagattagatctgtatcagtatatgcacaacacaacatgtgaatatatcgtagcgcctaagaaaatccccgcattagggtttccggctccgcctatatagacatgggggcgatcggctaaggttagtaggttatcccttataatccaggtattgccacctaattacatggaataacatcaattgccttatcgagccacacacgcactacatggacttaggcctacctggcccatctcatgctatgcgacccaaaggcccaaccatagatactcggataccatgtcccgcacagcatgcattcgaaatcggagagaatatgtttgtgtgaacaatgtagttcttcttggtaatattatgtgcaaaaatatgttaagcgactcatgtcgggcttgagtcttggcgggtgatctcgctcaagcttcgctcattaatagcactaggtagtagtgtgtgtgggtgatcattcatacaaatgtaggcatgctctcaaatatcaaaacaatgggcattatttaattcaataaccttaaatttaatcaactgaaataggataggatattattttggcatagacatccgatatttgatgggttatatattattttttatccttttagaggtagaaagaggaactacaaaaaaatatgttttatggtgcttggagggtgttggtatttcttaacgacattactagaaatataattctcagcaaaggcgcagaaatattcctagtatattatggttacagatatgatctacaagcgcacagatataccattgtagctttttacccggaagtattccagtgtatcgtatttatttaatcccaagggaagattgataagagaagactatgctaataatttatatgttattgtagtcagagtctaagcaggggttaactaattcaagggtggagtgacacgaagaagaagaactaagttcgctcattaaataaatcataggctatgtggagaaagaataagaaaagaatttatcctaatacttctaatatacaagtatatttaatttacactctctagtatacaatcatacagccaataccccctaactatgccttcctggtgtttcgagagaccaccccttaccgagttccttacaacatgatatttttagtatgttcacattagttggctaaaaaccacgagggcatatctggtgaaaactagctaagtgttggaaacacgtcaaaatcataccgaaaagttttgtaaattcatggaaaaaatattagagataggtgtagatattaaatatattttcaccaaatctcaaatcaaactcaactttctttaagaaaaaagacaaattttggttgaatagtgtcatgttactattcatcttaaatttatcgttttttttactcctaaatgaaattgagtttgaacttgagattatttggtgaggatgtatctcatatgtacacctatctttagtaatttttttcataaatgtgaaaaaattttaggtataattttcacaagtttctatcacttagctcgttttcaccggctatatccgcaaaaaccacgcatcatccaccttgtgtactttgtcttcttccttactctctaaaaaaagcaagataactccacaagcgatgacacacattatcggtttacttatacatataaacaattaaccattctaccaataactgagctcgttaaagtgagcctaacatgtatactcaggaatatctcatattatttttttataattattacacataattaatattagccaaaaacgactatataaacttaaacatgggttaattttttagaacatttcccttatttggaacaaatctggatatctgtggttttacattacgggtgccccaatgcaaaacccgagaaacccgctaggttttgtgaaattttctacttattaagttatatcacgaggttgccacgaaatttagaatgcctagctagctcctgtaattaaatgatttgatgcctctgaatgaataataaaattgtacaaaattttggtacctccgaatttaaaattttaataacatgatagaaacaaaaaaaaaacttgtaatgaagctctactaagcagcatttaaggataggtcataggtgtgcttgcatttgcaacgactcagccgaaaccacggaaagcaaagctggactttgccctttttcacggcaaaagtgcaagactcctgactcctgatcattctttttgccaaagcaaagagatacctttagtttgttgtatctacaacacaatatctatttatttactaaatgtcagttatataatgtcctggaggcacatcattgttgtaggttaggcttagtacgtacttaaattaatttcttcaaagggtttacatgttgacatcaaccaacaggtgattctaatgaaatttattgtatttttccttcagactcttcagctgcagccaaattacaccacatgcataattaatagccaatattaataaagaacccacgtagtgctgacgagagacagatggacgttttggcatcaaaatgttcgaagtttcttgtgagtggagagaataataaaggcaaatatggaataaatgagagtaggaatgtggttaattagttgttataattatatttttcctaatttggaatgcaaaaattctggccaatgttacctaacaatggaactctgccctcggtttaattatttggagtggttgtagttcaaagagagaaaaacgcattatctaatgcagtcaccacagaagtcattttgaatagcatagtatgaaaaaaaagtagtattatccatattaattacttattcaaggaaaatgacaacttaattgtactcatttttatctccacaataatttgctcacaggatcaacttgctccaagtttatcaatttaatgagaggtgcattgctaaatgtggaataaatcacaagttgaacaagcgaataacattatgactttggaattatcctggaaaaaatgatgtaaaatcctgaagagatccaggactactcagtgccttcaggcactagctacactagctattaaactaatgcaacatatatactatatgttttgcactgttggccgaataatacatgcatcatttcagcataatggctgctataggtgtgtgcaagatctacatgtccatgctagcaaaggacagcagatgagccagcatgcaataataaaatgtggctataaatcatgaatcttccaaataccatggcatctgtcttgcttttcattctttgtccccccttttctacactctgtgtatcctagttagcttttttgaccagtttcttttcttaaaaagcagtgaaagtgtactcatatgttgctttcctttacacttttaagcaagatggctcatattggagcatagccagttgcatggtataggtagagagtagctgcatgcatgagttgttttagttgaatccagtcaacagcctttcccactgagcccaaatagtggcactcccacaagaggtgaagcaagtaattctctctgctgtttctcatagtagtagcttcatagggttagggcatttgtgatttgtgtacatgcttctagttagtgtaaggccctgtttctttgagggtctaaaaaagaagtccctccactttaagtcactttaagtctgtagagtcccaaacaggagggactaaaaagggactaaagtgctttagtccataagtccctaagggaggagtttattgggactaaagtagcttttttccacctgctgccctcatgcatggacatggtgcatttctctttgcatagttttagaggtaacatggtcattgtgcagcgcatttaataaactttagtcccttttagtccctataaccaaacaatcatagactaaagtgattagtcctaagactgaaataagtccctaggacttatggatccaaacaccacctaagctatggaatagcacactgccttaattaagtagttaggttacattatattaccgctttgtttcatatataggtttgttaattagctgctctgatctgaagtaggaatgacgcttagaaggttctgagaatggtcttgatggagggtagatgcaggtggtaggctactgtgctgttggcacacctcgaacagttgaggccgagtttacttacaaactttttcttcaaacttccaacttttccatcacatcaaaactttcctacacacgtaaacttccaacttttccatcattacatcgttctattttcaaccaaatttctaattttggcgtaaattaaacacaccctgagtagagatacacaaagaagacgacaagaatgttacatggccattaattctactttatctttgtaattatataaagagcaaaaattatacacttgcagtgtttgaacttgtagcgttattaatcctggccctagactttgaaaatgatctagctagcctcataatgtactcaattaatatacccatcacaagttcaaaagtcttacggtcccctccaactgcttacatggctgctactctagtctactaagtagaggaggagattgtgggcatcaggtctgcgccgggcttaggcggtgtagtggggttaacactagctgtgagtgcatgagtgggagagataagagcaagtttaatagtatagtcaactactagctccaattcatctatagtcaatctaatagctcatccatacaatagttacatactacactattaatacctggtcccacttgtcacacactgcgttggagtcagtgctacagctggctacaaatatgtagcccgctgctcttttctctccttatttatctccttaaaatatgtttgtagctggcttatagcttgctattgtacctgctctaagggaagtagagaaattaaaggagatgagagatgtgagaggtctactctcaaaataaatccatcttcacttattccacacatatcaataaaaccaaaaagactcgaatccccttactttaacaaattataatgtaattattttccattttatctgctcccaatgtatttgtatctcttatttttacaaactccgatgtaataaatgttgaaaaatggacttattttgagacatacgagaaggataaaaaaaagatcgtgaaataggatagaggagggagtaagtagcagccacattggtaacatacctcagttggatgatgcatgtacgtctgtggaacatttcagataacaatgcaagatgataccatgccgaaagtttaagaaccgtatatgcacataacatttccggtctaagaaaacttcattagggacctcgcagcggtctaagcactactacagaaagggccataggtgccggttcctaaccggctataggtgccggtttcctaaccgacacctattggtcggcaccaatactagcaaccggtacctatgaagaaaataaaaccagcacctttagctttgctcgagtaaaaaaaaggaccggctcggctcgaattgagctgagctcactgagcactgtcattgcgtcatcgcccgagttgctcctaaatcaaattaaaatccccaaaatcccaaaatccccaaatccccaaatcatccacaaatcgccaccaaaatcaattgacatcacagtatgaacatactccaatccacaaatccaccaaaatatctaaaaaaatcatccatagatcaaccaaaacatctaaaataaatccataagaaacgagggaggagagcccgcttcatgctccaccatcggcttcgtcgccggcgagcccctcttctgccgctgcccgccgcctgccctcccgccagatccggcggaggggagggcgctgcctccgccatcgtgtgccacctccgccgccgcccgccgcctcccctcccgccagatccggtggaggggagggcgctgccgccaccgtcacacgccgtcttcgccgcctcccctcccgctagatccggcgtaggggagggcgccgcctctgccgtcgcgcgccgcccgtcgtcgaggtacgccgccgctgccgcgcgcgacacatagaggcgagagagacgagaagcaagagagaaagaggcgagggagaatgagagagattcaaagaagacgagagaagacgaggcgataaggttctcatataggataaggccaatggtcggctcggctcggcagcttggataggtgccggttattttaaaaaacagtataggtgtcggtttttctttataaaacctgcacctatattatattaaaggtgtcgggttttttttaaaaaaccggcacctatataggtattggttcttctttagaatcggcacctatagttgcttaaaggtgtcggttttatgcattttcagcccacggaaaagggaaaaacattataggtgccagttttagttattccggcacctatagtgtcgatctccatgagtttttttttactagtgaagtgtgataactgataaatgacaacacgtgacgcaatgtaaggtagtacatatttgttggagtttgtgaagaacaaagagtacctgaatccttagagtatatggagaaaacatgcgatcgaatgtacttgtgattctcataagtaattggaacgaaatgaatcgtctaactaaagttgtgcatgccacaaattaaggccaaacatagatggacataaaaatgtcgaataagcaggtgcttagcacctcgtttacacctaatttattactcacctcatacatgtacttggagctaggtgctctctatatggttgaaagacttgagtttactggtggataacccacttgttgcagtgggatttcggaaatctttttagcacttccaaagcaacatcgagtcaagaaaaaaaaattctctatgcgtcatatagttttgaacaattttaaaataaatatcattctatgtcatatctaacaataaattttgccataaataatacctcgcataacaaacttaaaaatatactagtctcatacataaatttctacactccacaatttacttttttgttttttctgtctgaatatactttatgtttcttggccaaaattggtattttagtaacaaaataactattaaatgaaaaggttatggaatacacacacacatgttaaactattaaccacatgcacagtactctcatggctttgataaaacacgaaagtgattcggttgctcttcatttcgtgatgaaatatatggatcaatttgtacaacgcgtgtttaagtttttcagcaaaaaatgtcttcattaagtttcacttatatatcactggtggagaaaccatctttggtcggtcgaacagatttcacaatagtcccggttgtattaaaaaccgggactaaaaacatctttagtcccggtttaaaagatcaagggtactttttcatctttagtaccggttggtgttaccaaccgatactaaagatctatttgtagtcccggttggtgttaccaaccgggaaaaaagatcaacataagctttactcccggttggagttaccaaccgggactaaaga

SEQ ID NO: 24954 - DNA, 15551 bp, Oryza sativa
cccctcattctctccccctcccctcccctctggctcccctccggcggcgggaggcggccgggcggcggcggcggcctcccctccgtcagatccgggaggggaggcggttgggccgcgccggcggcctccccttcgtcagatccgggaggggagcggatcccggaggggaggaggctgggcggcggtggcggagggcggcggccggcgcgcacggagggccgtccccagtggtggcggcggaggccagcacggagggctggccgcaaggcggcaggcggtggtggccgggcgcaaggcggtgggtggcggccgggcggcggtgacccgcgcggcggtcgggcgcaaggcggccggcggcccacggccgggcggcggcgactgcgaatttttttgaatgatttgtatattttggtggagcattttgttggttgatttagggatgattttgtgattaatttgtggattgtgattgatttgtggattgtggatgtggatgtattttgttgtgcttgatgtaatttttttttgagattttgtgatgtatttgagtatttgagatgatcgattgtggatttggagacaatttgaggatgattgatttgggattttggggacgggatgggatgaaatcaatatatattaaaaacaatgaagaaaagaaaataataaagagcaatcggatctagtctttttagtcctggttgtatctttagtcccggttggtaacaccaaccgggactaaaaatggatttttactcccggttttttcacccgggactaaagatagcgatctttagtcccggattcgtagtcccggttggaaaaccaggactacatgggggttacgaaccgggagtaaaaaccctttctccaccagtgtatatatgctactataggatatgtaaatccaacttatgtaaactctgggataattctacaacattacaccaagagacataggcctttactaatcggtcgactaaggtattacatatatatcatatctctatagctcccgatatacatgtgatgcaaaagtcccacctattaattaggcaaaattttgatacagggcacctaaatgctacgtaatttgttaatagatatcgtaaaaatgtgtcatggttaacaccatcaaaaatcggtaattgctaaaggaaacttttggtccaattgaagggagagcttcttcgaatagacaagaatgtccctagagccacaagcttctaacatgatgttgcagtgaagattttgaaatatgcaactctagatctaccatcggtccaaatacattgctaggatgcatcatattccttctccattctagcactatagattagaaacatttggacctaggggcattcttgtcttttgcaaaaatttctctttttaattgggctaaaaatgtcctctagtcaattataagttttttgggtatcctgcaaccgtgacatgtttttaccatgtccaccagcaattacacaaactttgagtgtactctaaaaatttgcctattaattatgtatattaaagtaaagaagcaacctcccttatgtattaatccaagactactcacatgcattacaaattaaaacaatacataggaacatcataatttagctatattactattcggtcgacatgatatatgtatggcccacaagtttgagttttgcacatttaatttccatgtttttgtctgtattaacctggtcaacccctcataaaaattactccctccataccaaaataagcgcaaccatgagttttgtgtctaactttgatcgtccgttttattttaaattttttatgattaatatttttattgttattagattataaaacacaaatagtactttatgtgtgacttatgttctttagttttttcaaaaaaaattaaataaaacggatgattaaagttggacacggaaattcatggctatgcttattttgggacggaattcttgtagctttgggtgtggattgatcgggacatgttatacagtagtggcacaaatgtttgttctcgaactgagatcttacttgaaacctgtttgacttgcttgtacttttggtgatcatcacgattcatgtgcactacagtgtacaacaacgcccttttccatttggtttgttttgcatgggtgaatcttttccgtgtgattgatgtggatgttgtaagttgaccgtgaatttacatgttcctgctgcctcgtgcttccaatgtacttggtgccatcttctccagtctctttctagatcggcatgtggttgactaaacttcgaattataatcaaggtgtgcgtaccttggagagaataattcaaatggacaattatgctaaggctgaaaatcatcaagaaacttcattatacatggcatgaacatgaatgtagctataatatggttacctcatatatataggtcgcgtccattctatgtcaccaaaagattcaaagaaatgttaagagagaagtgatagatgtctcttactcaaggacaaaaagaggctaataggagaagatgctctgaaataaaataaaataaaatattatgtaaatatgagaggaataaatggtgtaatcactgccagaaaccgtagtacaccagatggctaaaaactattatgaataaaatgaaataccgtcatgaaaatagttcctgacatgttaattcaggactcatgtacgtgtctacgaaatagtgggcaaattaagggcttgtttagtttatggcttgaacaaaccacaaatagaaaaaaaaccaatgccaatagaatgatcatgcatttggtttgtttcaaaaaaaaaaagctattgccaatgttttggcaagaacaatataatacatttataagaagttatgttaccaaaattttgcccacagccaaattttgggcattgccaatgtttagtgagattaaaaatggctacaaactaattaacgagccctaaaactttgaattaaaaaccagacagtggcctctgtccctcccttctggctcgtcgtcttcgtcttcttcttctttttttttcaaagaattatccaaatgtttttttaattatgataattaagtggattatgtatatggtgcaggtttgtaccccttttctgaatctaagcgtttcaatagataaaggaatgacaagggaaaaatagattttaagagcaaatagataggttatgtgtttaattaatttggcatgacatcttttatttccttcagacagtggaacgttcggggtaaaccaacatatatatgcaccagcgcacaataacacaatcaatgttaattgcacatccatatccatacttatatagtttctttatccagaaacagttacgaaaaaaaatgattgatgatcagctcaccacctcttatgatgattcgagaaaccactgtacaataactgatataaagccacagaaaattgcagcacacacgtacaccaatcaatttacatccctgaatctgtctctcaactgccctacatctcctgccaaaccaaaaaaaaaaaaagaccaagaaaagaaacgaaaaggaaaaaagaaatgttgaatcccgagatctcagctagctaggaggacaataaaacctgacctgaccacagctgaatgcaccagctagcttagctatatagctacatacgcacttatacacgcatagataggctggaccctgcatccaaacgtactacgtagtacatgcccttcacggttcacgctcacattccatgagagcaaccaagaaacggccatggcgatcgatcgatcgatccatcgacattgatcgatagagatggccatggccctcctcctgctggacgccgtcgtcgctttcgtcgtcgcgtggtacgtgagagcgacgagtgatcgatcgatccccgagaagatacatatggtatgtttcaatgtttgggaggagcttctgacagacatagtttatcctaaaatttaaaactagccctaccaaataggcaaaattgattatatagtatcgaaagttcacgtttttggttttatagcaccgaaagttaccggttcactttaatagcatccaaagttcaccctgttcccatttttagcacttccgtcaatttttccgtccgtcttaatcgttattgatccagccacacacatgatatgacatttctacccctcattgacatgcattatacttgtacttgtgaggggtagaaacgtcatatcgtgtgtgtggctggatcaagacggacggaaaactatcgagaattgacggaagtgttaaaaatgggaacatggtgaactttgggtgctattatagtgaaccggtaactttcggtgctataaaaccaaaaacgtgaactttcgatgctatataaccaattttgcctaccaaataacgatctagctccatggatttatcgagataataagtagatgtagttacaaaattaatccagaaaataaactagaaactgagtttaccagagtctacacatgattgattgtaaattagatgcgtttaggcgcagcgggcatctcggaggcgagggggaaacgccacggagatagcggccatgcaatggcaggctttcgatcagcaattctcgcgagacccaaggcgatggcatggcatgcatggtagtgttcatatgcgatgccgtgctgctgccgctgctgctagtgctgctagctactagctgccgggttgcaattctctctagcttgacacaagctgcaggtcaccatcgatcgatctgggtctcgattaccatgcagagagagctacatgtacaagctaggatgctgctggaagcaggcagcagggtcgagttgggagaggaccagcagcagcagcaggcagagagaaccctatttgcaggaaccatcggcttgagtttaggctttggctctggactgggccgaggaacgtgcagtagctaccaagctagggggtaaaaatgagagagagagaattttccatgtacttgcagtggtaaaagtttgctctcgttgtctactgtaacgggctgattgatataagttacttgagattggtaccatttcttacctatattatttatagaatggagaagtatttcataactttaaactttggttgaagtacaaaaattaagtataaacattaaaatgggacaacactattcgcccattagctcctatcatttgatctatggctgataatccgtgaaaacatgaaaccgtgctcttagcggtttaaaagatcataccgaaaagtaaactgcaataaaaaaaactttaaaatcaaataatcataacccttaaactttgagagagatcgagagatgggaagaaagaaagaagaggaggacaagtgaatgacagttaatgcccaccaatttttaaaattcttttactgactgtaagatatcttgcagtctaattgtagttgatgcatgagtatattcatactataacttaacttccacatattgcacaggtggttttccttttaatttgtacagcttgtgcagtttaggtggtggtgccaatgagaatcaattttatagtatactagaaaaaatactcatccgtttcaacagggaaaaccgtctttccagtgatacaatagctactaggagctgatgaataaatttaaacattacaatcactatacattaaaattggaaaggcattgcctcctacgtacctacctcccttaactttcgcaagacagttttgtgcccgtatgatgccggagccgatcgtccccatcaaatctaggatctctcaaaattgattgagcgcttttgatccacccgatctcctctgtctgttttttttcctgaaatcggagtgaatccgcaaaattcaggcggggaagatagctgtttggcaatcattgacaagcattaaacaaacattaaatctggcgaattaaatctgaattgaaagagaaaatcatgggggaaaggatgagggaggagtgcagaattgattttttgcaattaagtataataaaaaacacatgggaagacagatcatgtgatggcggcattaggtgcccatgtggagccacagacgactcgagcatgagaaggagtcggaccaggaggtccaacggacgaacaatttttttttggaagcatagttcgttttttaagtacataaagataaagtgaaagatatttcagtcatataaaactattttatatacttactggacattgttttaggagaaaatatcttgtgtatccctgaaatttcacctaatcccttctacgcccttgaattttgctcattcctttacatacccatgaatttgcatgccattttcgctagttgaccgttaaattcttatgaaaaaacccattttgccttttgctgtggagaagcatataaattaatagagtgtattgttggagcgtaaaatttgttagatgggactattatatttatgagttaattatacaccatcttattttcgataaatatacttttagatacgacataaaaaattaatacttatttattatttattagttattaaaagttgtttatgtagcatataaatatatttgtcttatacaacaaatttgttgtattactatcaaaacacatatgctacataaaaaaacttttaataaataataaataaatattaactttttatgtcatatctaaaagtaaatgtgtcacaaataatatggtgcataacaaactcataaatataatagtctcatccaacaattttctacagtccaacaatgtactctatttatttattatgtttcttcatagcaaagggcaaaatagactttttcataaaaatttaacggtcaactagtgaaaagggtgtggaagggatcaaagaaaaacaaaaattcaggagtacataagggaatgagtaaacttcagagacataaaaggaattaggtgaactttcgtgggtacatagggatttctcttgttttagttactactactttttttccatatggcattttggaaccaataactgggctcctgtgtggatcggaataccaaaatgtcctagatattcggcaaaattaattttacaattatttcatagaaaaccgatcaatttgccacatagaaattaattcgcaacattccaaacgggccgtggagctatatataattggtcactcacgaaccggccggcctcttggctatattggtcactcacgaagctcgaggccggcctgcgtacacagctcttccctgcatgcaaatccttcacaaattgcaggtaaattgaagcttgtgctcacgtcgtacgtgttgcacgcatcattctgattcctgacgccctgcctatatgcgtacgtacgtgccctgtacccagatggcatatatgcatgcattcagtcgtatacttgcttagtttcaaaatatatgacatatatacatgggacatatccggtgaaaatcatcaaataaataaaaacccgtgaaaaccatatctatatctgaatagcgtgagagtgttttatccggcaggaaacaaatcattaacactgcattttatcaaaccggtactagtgatggtgacactgatgtgattttctataatagtgtccattctgaaatataagactttatatatattttttaagtgaataccgtggttaggtcaaaagattcctttttgtcacttttgttgttatttgtttaattttgaattgtttacattctcataccaaccatctgattagtttggaatcaatgtttaataatgataaaaatcacgagaaccagtacatcaatgcttatattgtgatataaaatttgaatccagaagaatccatagaaccgaaggtgtatatatagctttatatactcgtcttcatggttcgtttggaccagctatatgtagtatatatatgtatggggacaaaaacggcgacacacactgcaaggctacatatcgcatgtagatgtagccagtagcatgcatgcattagtctgatgggcatggatttaggctttacttctgaattctgatcagttgttgggcagagaagcatgcagtgaaaaaaggaatcgtttttttaacacagtgcatttttgtagctgcatgcaaatgtacaatggtgaaaggtgaaaacctcgatctgcatgcatgatggatacatagatactagatagatagatcatgctgtacacagtagaaaagagtatatcaaagctactcctcacatgcatttcttctcatcagaagctaggcatagcgtacggttaaatttgcttttctgaggcaacatatatgtactgtgtgtgtgtgcagaaagttcaaagcaaggaatatatgaacgggcaaacggacatgttgtacattcagttgcagtgcgcaggcaaaagattggactactcgcatatagtactgttaccgtgtaaagtttacagaaagatatatactcgtggtagaaaagattcagccgagataagatgaacatttactgtttggcatgtagcacttttcccctttccttgatggaggaaaagtgtatcgttatatatgcacgtttcagttcagatacactcatttctacacaccaaatcactagatggtacaaccatggttactgtagtcgtatgcgggtgatagcacatatatgcatggcattgcatcgtaggatattagtagagatgttgctaagctgcggtgctgattggcgcactattgtagaaaacggtttttcgatataagaagggtagtaggatgcaggtgagccataagtggctatgcttgcaaaaaccggtccccggaggccttatgtcggtcgcatgcgacaacatcgattttccaaggtcttttcgtgcatgctggctagccatctgcaaaaaccatttatgtagtagtactgtggggacaaataaataattgcacgaggaaggtcttttcgtgcatgctggctagccatctgcaaaaaccatttatgtagtagtactgtggggacaaataaataattgcacgaggaaggagatgaccgcacggggatgagacggtcgacttcatgagatcgagtacttcctctatatcagtgggtgcgcacacttccgttgggcaaatcttttcttactttattttattgctttacgtgttgagtggtaacgatttatgcttatttatgtgtttcctggtatgtgcagaaagtatgcatcagtgtcactcttcttcacatgtgtaagtatttatgagtattcacgtataagaaaatttcatgaccacctaatgccgagtagttgcacacttgcaaacagttgagagcatgaagatcaatggtaggccgtgtttggaaaaaaaaaaggacgccctgaatcgatagtccctttggtttgcaagctagctaatttacatgttaattacttcgtgaataaaaaacttattatgggcctccaagatgccaaaggagactgcagactccattcattcttcacatctcattctcttcgatcctaatcattccccagccctgtcttctcctttccatttattcaagattgtgctctagctagcttaccacgctctgcggaacaataactagttttgtcatgaatatatatatgttgccatccatcttgatttaattaatttatatttatacatgggaaatgaaaaactgtaagcgtgaagcatcgccaatttgaagatcgctcgattggtcagtttggggctttttgctggcttgggctttggagggaggagatgcgcggcccaggaggctgctgtatttctagcatcgtccgatcgtcagcttttaagaacattcatcttcaatcgtttctcttctctgcatctaaacacactactatagagacgattttcctgaacgctggccccttttggttccagacaggccaaaagcggctccgcctggtaccaggcgaatgccggcgccgggctgtgggctgcacgggataatcgattatcccgtgtggcccacgtaaggcgaccgcttgcgatggtcggtgggcatataatccccagcccgaccgttggcataaaattccggcggtttctctctcataaacattcacaaaattagggggaaggttttcgacctcaaatctttgattgggttccatataaaaggtgtagagcttgttctcctccttcatttgcttacatttttgtcagttttcatcggtgaaatacgatgaaacttgcacttttataaatggaatagtgtaggcacttttttgtttttttattttttttagcaaacacataatgattccattacatgtttataaaagtatttagtacttaaattgaaaagttgggtttgcctctattaaatttattttcattaggatgaaaggacgattttttttttcaattttttagaaatggacaatattttattaatgcttaaaattgttatgcagctgtttaaatagtccgtaaaactttaaattactatgtgattagttccctctaatttaaatacatcagtgtttgaatcgggcatggatgtattaattacaagctttattgtaggtcattgatcggacatggatgtacaacacgaaaagagctcatccaacgttctcgaaggaagcagccaaatttgttgagctcgcaaaggcacatgctgtgagggagaatttgaggagcattttttgcccatgcaaagtttgtaagaacgaaattttgctgcaagatccgaataaagtattgtcgcacatcgtagaacgaggatttaagaagggctacgagatatggacttttcatgggaaagtcggtggtcgtaacgaagagttagatgatttctgttttgatgatgcatacaattttataatcgaagacatgtcacagggacacatcccgaaatacagtctctggtatagagaaaacatttgtgctcactggtggagaaaacatttgtgctccctgtactcccggttttgtaaccgggaatataaatccaagactaaagatggatatctttagtcccggatgaaataaccgggaataaaaatctatctttagtcccggctggtaatggactaaagatggatagggccacatcactattgtttttttctttatattgtttttttctgcttgtatctattccccacccaaatccaaccaaaccattcacaaattatgcacaataaaatcatccacaaatcatacatatccacaatctgcaaatcatacacatccacaaatcatatacatcatccacaaatcatacacatccacaatacacaaatcaatcacaaaatcatccccaaatcaacaagaaaaatttccaccaaaatatacaaatcattcactacaagagatacagataaaaaaaatcactagctgccgactggccgtgcgccgcattgtgcctagctgccgcgcgggctgccgccgcccggccgtgcgaggcccggcgcacgctgccgccaggaacggccctaccttcgtgctcgccgctgttgggggcagccctccctccacgcgctctggccgccaccatctgccatctgccgcctgccgcgcgctggctcacttagtcaccaccgccggccgcagcccctcctggatccggtggaggggacgccaccgccgccgcatgcgagccacggcccaccggaggggaggggaagagggggattcggaggagaggggtgagatttgtgcggagaggaggaggaggaggagaagaggatttgtggatgaggggagagaaggaagagaagagaaaagacataaggttggggcggaggaccaggcgtgctcggcagatttttttttcgccgatttatttatctggttgtttaacaaccaggattaaaaatagatttttagtcccgatcagtaataccaaccgggactaaagatagaggaggggtctgacaaagtctgctttcttttaaaccgggactaaaaaaattttagtcctggttggtaactccaaccgggactaaagatcaaaaggtgacgtcagttctttaaaccagactaaaaatattgtttagtcccggttcttatttaaaccggaccaattgtggattttggacaaccgaccaaagatgatttctccagtagtatctgtttctcaatgtggcactaatcacctcagctacacatgaattggcgcatcgcatggaggcatggccaatgttgcagtatctacggctgatcacacctcggcatgcaagaccaattgtaggtggacacggtgacgacacacacaatgacgtatttggtcgcatcaacggctcctgataccttccaagcctagatagtttgagtctacatacatgcatgtattatgtggggaggagcacacaccaacttatagagaggaaataatttattgatgcataacatcgatcatctctctgcttcgcatgtgtaagggtatttatgggcattcacggtgaaaaaaaaatataaccatctagttgttgaacgcaagcaacagttgggaatgtttcaaccacaagctgcttcatgagtattcattactttcttccctttaaaaattggtaatcactttggatttaaaacttgtatcaaaatatataagtgacgattttaaagtattgtttgtttcatcaattacttcttattcaatttttcttctcgtctaacatccaacaaccctcccaccgacatatatacatccctcattttatctcccgtcataatttagcccattagtcataaagtaaccgcctatatgatgggaaggagtaataacaatccatctcaattttttggaagagagcaaaaataagtacaagaattaagtatcacaatttatttgataaaaagaatcaaagagccatctggtttatagatcagtccacttgactgctcaaaatggactgatcgaatctatcaatttcataatgcatatgcacgccccaagtccggccttgctatttgtactgcaacatggatcacacgatcagctcatcacttcatcagcattctgctccaggagcacagatcaccaagaaaaatatgttttggccaagatcgccatgacgaccgtgtcgaggcaggctacacacgaccaacagttgcctcatgcattaagggtaagaatgggaatgtggcatgtccagtgatcacaatgccttccatgccccattcaacgtacatgtactcaatccaccactactactaccatgcatgggcacatgtactgattgctatcttcttaccttgggacactcgatcaactagctagttaccaatccggtagaggttaccatatatacctttgttgactggactcattttagatacattatactggtaatatatactgctagtacaataagtgtaacttagaaactgttcataaaatttaaaaccaatattttagtaaattcgtgttttggtgactaaagtcatcccattgtggtggttggttgtggcgcgcatggactgtatacatgatataaatgtggagccatgtgtgttgtcaatattcccacgtttattatatatacacatgcagatgcatttgtaaaatgcaacgaaaatttagaagcagccaaatgaaattcaataattagaaacccacacatgcattgttaagactatgttcattgcttcaagttaggtatgagagagtggagtggaagcagatttcgtatgtgttgcatagttggttttaaagataggctaacttgatctaactgacataaaacccatatttaaaagggttaattggaaccatgccgctataaatatgatatttgagataaatgccactactattcacaatatcggtaacgtgccaccataatttagggaaattggaaccgtgccactatgtcgctttttccgctaaaaatctccgttagcctcaattgcacgtggggaagaaattaataagaggtaggatggaggaagatggaactgatatgtggttcccatgtataggggtctaacggaaaacatgacagagtggcataactctattttccttaaattccagtggcacgtaaccgacatcgtgaatagtagtgacattttttaaaaatggcatatttgtagtggcatggaaccaattaacattttttttgtggggaactgactaaaaaacttaattgtaggctcttggtaacactttgtcttccctacgacctctcctcgattttgtctttcatggttactctgaaataaggatggaaagtttgctagttcaattctaaaattgatgaaatgtattctgttggtcagttttgaccttgatggtttggtagcatgtttggaaatgctacatgcatgtatgtggtctgtacctaatttagtagcatatttactactaatattgcaccttcacctaatatagtagaaagccggccacattcaaatatttaatctgcttagttgtataacttgttgtcggattcttctaatgcacagagaatgttacttaatttatgaggcttgttccggtccagcgaaatgtaccgcctagtacaagtacctgtaggtaccattgcaatctgaccgttcaatacatgggggtacgatggggtcgacatagttcttcctcgtggtcgtggccattccatcccctccagctgcaggcatcctccatctcttccctgcgggtacaacttttctccttccatcccctctcgcgcagctgtcctggtctcacccccacctcgatctgcggtcgctcggcggatatgacgtcgcaaagctacgcggcggcgtcgtggaggtctcacccctctcaatccaaggctgcgcgccggcggcggtggccagggcaagcatggtcgcaaaggatgcgcccaactgtgtcgccgctgcggcggcgtagtctcctctgccaaaacggctcggcaactctcaactgcgaacttgctctgcagcattgagaatgcgagaacacggcaccctatctttgttcctctgcatctgatttctattgtgtgttatgttgtgcagtacccataaatctgttcaatcaacttatcctgggatttgttgattgtccaatgaaagatccagtggaaaagaaccgctatacctgtgacacggcaatattatgagttttcttttttgacagagcacccaattacttgttaccgctggcagcctagccctgctgtatttttttctcctccactaacaattttgaagtaacatttgataacttgatatactattttttttagataatgaatttgataacttgatatactatatatacatataatgttcaaaggggatttgacagatttaataacttgctatctaccttcacgatgaaacagagcagtgagcacacttctctgcatcatgttccaggcactagaatttggcacctgttaaattagtgaaatcggtgaatagatgatttatgcagcttacatcgaatcagtttgtgtctataccaaatggatgagaaaagctcactgacttttactaaataagagatgccatcgaattctctgaactttgctaaacaggagtactgcggatgcctaaaatttcagtgaagttttctgaacaggaggaagcagcagcctctgttgccgcatcagcccgaggtcgccgctgcctagaagtccgtcacgct

SEQ ID NO: 24955 - DNA, 589 bp, Oryza sativa
tatacctgtttttttaaaccaaattagaacaagcacgttcgtgcgaatgcgcgggctaccttccaaaacaatcaggtaacatcaaagcaaaaccaacacataagaaataaacaattattaaattttattttgtgaatctccatccatagaagggaactatatattatatataagtacttccaagttccaacaaacagccacacagccacacaggtgcacattcgggccattatttagaacgcacaaagctgatatatagcatgcagccatgcacgcatgcagatgcaggagcatgacagacccagtgtcagccactccagtacatagggctacaattacaactatatatacgcgaccaatccctaaaccgagcaagctatatgctgcttcaggctgcagagacacccacatagttttaattaattaagggattgatctgtcgccggagtttcatcagttggcgacgacccggagtttcatcccggcggcgcagtggccggggacgccgcagatgtagtagttgacgcccttcttgaggaggaacgacgcggtccccgtcgccgccgccaccgagtccgccgagctgccc

SEQ ID NO: 24956 - DNA, 5683 bp, Oryza sativa
ataactccagcatatcatgcatggggctgcagccctcgagcctcatcacagaaatgcaattgagtcaacctaaatgctcaggaaattcaagacgcctttcctgcaaagctccgggggagtgccgacagttcagggaaaattaacctctcttctcctgaccccccgagctacgatgatactgctttactctgcgattctaaccttcttgttcttcttcttggatttctcccctggcgtctgaggaacctccaaggtcgtgccactgtcgccaccacgaacctgggatccttcagccgacttgcccgatacattcgagtgccccaaactgctctcatcctttctcttctgattgtgtttgtgcgcgggctcggcactctgttggcccagcgatagcgctgagccttggctgctgcggttcttcgacccgctagagaaccgagacctcgtcttctttgaagaacctggaagaccggacaaattcagatcagtgacggcaactactgtttaccaaagtgttctatttatgatagaaaaagataaaacacttcagctgttggctggaaaccttattaattgaaagtgcataccttaatcaaaagaaatagaaactacagagatgggcttagtatctctctctcagaacagttcttcgatcttataatacaagggcatgcattgcatcactgacatgagtcttcataatataaatcaggaatttggctaatctcaactttcaacgatgcccaaaaaatcttaagacaaatagtatgttcatcacctcattactgtcaatgcgaaaagattgaacagcaatatgcacttacaaagtttaatctggtgatactggatttctagttaaaacagaaggcctatacatgtctaagttattgactagtccaactggaatggcatatcatgcttgtcaagtctatataatacatttaccatagacagcagaagagtggcatccttacaaaatgatgcccgagaaaattaactcacctgcagacttcttactgctaggagtgagactccccaaacctggcttctccggttcttcagggtcaggataacgaactaagctaactcgacgtgcaatcttcccaactggaatttttttgttatgattaaaaattatgcatacagtaagttaaaagaacaagagtgaagtgcatgagcggtccctaaatttgtgcgggtgtgccatctagatccctactctcaaaatgcattttcgggtcctcgaacttatcttgggtgtcatataggtccaaacgagctccaaaccgctccatgcgttgatgtggcatgccacgatagcatctacgtgttagtcggacccacgtgtcattcacataggaaaaaaataagattaaaaaacatattttctcctctacattagaatttttatctttttttgtctaccttaagaggagaaaatatggcttttaattttattttttatatatgcttcacatgtggattccactgagacgtaggcaccactgtggcaatgtcacgtcagcgcatggagcgggttagaacccgtttgaacctatgtgacacccatgacaagtttagggacctataaagtgtatttttgaagtttatggacctagatgacacccagacataaatttagggaccgcccatatactttactcaaagaacaatattagctgcctctcaggaaaggaagaaatgatagatgaccaaaatcacaaaaatcaaatatgtcaacaaacagctcaatttaacaagaccgataacaagtaaaaacagcatccatgcaaaatagtaaaatactgcagaaataaactgcaaagttggtatttcagcataccagcttttgcttctggtccggatggaaggaaaacagttgcatctggttgctgagcagcaaagctaacaagatcataagatttccctgccaaattaagaacaagtacaactcaaacttttgggagaactttaaattgttattgccacaataatttaaaagcgacaaactgacaatcttaaccaataaaaagaagttagaaaacctagtagcctactgctagtactcttactgatgaatgttatcaatctagcttcaaatcacagataacgaggaagctgcgagcagatttcacttcaccaatcaaacttctgaacataaaaacttctatatgtaaactaaattatagcaccttaattccatttttattgaaaaaaatatttaataagtattaatttgttcatttgttgcctaaagattagcaagcaacttgagctctacaaaacactactagtcatcaacgaaccagcattgacgtcatcttcatacaaaaatgagacgcaagcttgaccatagaaatgcaagcagttccgttgataggattaacattgtttgggattagtaatgagaagtctaggtgccctctttgggaaaaactaatcaataaggtaaaagtgtgattgcatgagctaatacaggttgcgttcaatccaactgtacagaaagcagaaaaaccttcgaaagacataatcgatcaggtgcaacataattcatttaatattatcttacctgaggaactatccaaactgctcaattttccatcacggtgcaacttaagagtaacctcttgaccatgaaaatcagacgcatctaactgcatgcaacacagaaaaacattatattcaagatcccttgtgcagcatgccacatggcacataatgaaaataatatccgtataacctgatttagaggccactgtattagccaaagttctgttgactctgtttgtgatatatcaagcatagcctcttcgctgttctcctcaaatgccggtccaggctcatagctacaatggttggttgcagcaaagttaaaataaattacacacaatacaaaaacttaccaataagtgtataagtgaaacaaaagaagctactgaattcaatccaaaaatccacaactataattttccaaccttccttatctcatatttgaggcataactgttaatctgttattcagagaggaatcagagctaccaaatccacaaatttgatactccctccgtcccaaaatataagcatttttagtatagtgataagtcaaaaaaaataactttgactattaatagcaaaataacaaaaaaattaatcatgtaaaattgatgttactagatttatcattaaacaaactattaaaatatgtaactttttttatttaaaacattttacttttatatagatattgttgatcaaagtagcatctcggagactgtgttagagtcccatgtttgcattatatggtttgaagtttggactttagagatgaatatgttgtttaaccggagacgggttcaccacggggaaaaattcaccgcgtggtgatcggggctggtgaaaatgtagccccgtcgtggttgacgggggcggggacggtgaaattttatcaccgcggtgacggggacgcggaggtgacccccgacggtgaattcaccgttgccgtctctagcacgaaaagggagcaggcagggccagcgaggggcacgaggaggccggcaagctcgcccgcaccgcctgatgcttaggcctgccagtggattgactttgtttggattaagtgggctggatcctcatttggatccttttcggttggattgaaatggcctgggattccattttggatcggactggactgggcttacaaaaaatgtggtttggtttggggtggatgcgggctgagtaaaataactgatccacaaactgaatccatggactgaatccacacgctagggtagactcctcgcatcctccgctcctcctccgccgccgctgccgccgccgccatcgccgccgacgggcgtcgctgctgctgctccttgccactccgccctcgctgcaagcagctgcggccccaccagctccccctcgtcctccgctccggcgtcatctcccggcactgctccgccagattgccatctcctcttcatcggcgccaagaagctgctgctgctctccactttgaactcgctgcaagcggctgcagctccaccggctccccctcgtcctccgctccggcgtcatctcctggcaacgctccgccagatcgccatctccgcaccgtcggcgccaagaagctgctcctctcctccatgcaagatccgctgccgcgtgtccctgcccttaaccccccacaagatccggcaatactctctcccttcaagatccggcaagtactctttcctccatgtattgtggattgtgtgctgaatgccatgcttagaagatttgttctaaattgcatttacaagcagctacctttcattaccatgcatgcataagaatattgatttcatgtatcgagttgccatggccacaactatgaatgacctgtatgttttccaagatcagttgtgctaatttaaccatgggtacctaacaacagtctaaaattatgatctcttttcagcaaactattatatgcacaatagttggatatttatcacggtctcaactactgttgtggaacatcattagattactatgtagcatgtactgaacaaaaatctgatttattttgattttagaatactgactggagtccaaaagaaaatggtagcttgctgctgctgattgtactgcaccaacctcgcctgcttaagcggagaacatgtctatacacaattcagaaagttcaactggccatagttctagtcatgaatcatcttcacacccgcccgcagaagatgacgcgtttggagtagtcaaagcagaaggagctccagaacctgcaagatggcttttcggagcaggagctccttcaactgcaagacgacttttcggcttggctgtggtccttttcgaaggaggagacctgcgaagggcatttgcattggacttgcgagatttgtcagcacccgacccgacgaccgctggggctgcacgcaatgcaacgaccgcaggggcagcacccagcacgacggaggatccggcagtaggcccaacgttgtatcacgtggtggcaagtccaaatccatggcggcgtcccttcgcgtggaccgccggacgtgggttagtgagtcaacgacgtagctatggaagactaataactcgacggagaagaactagaggtaggcgtctatcgagtacagagaagggataagggattgaagcattttctcaccttgcatcgtagcttacgcggggggaggccgaagccatggtcggccgatggcggatggcgtgctcccggcggcgcggcgacagaggctcccggcggatggcgtcctcccggcgacggcggctcccggcggcgcggccgcgacagctcccggccgcgcgacggcggctgctggcgccgcgcccgcgtcgacggcagcaggaggaggcggcggcgcaccgcgcacgcgagaggaggcggcggcgcgcgcgcggcgcgtctggaacaggcgaacggctggcggtggcggcgtgcggcgtgcctgcagcggagagccggaggaagaggagaggaaccagtggcgtgggcgcgtggctgcgcagctgaggtttgactagggttttgctatatatacccctgttaatagggcttcaatactatgggccaaaacatcttaaaaagtctagaatcagccctctatactgtaaagccggatcaccaggaggcggggacggggatggccgtcatc

SEQ ID NO: 24957 - DNA, 19831 bp, Oryza sativa
  unsure (1)..(19831): unsure at all n locations
atccaacgatccaaattaatctgatgagtcgtatcggacggcgtcgacgcctccctcccaatcgcgcccctcccacaccccctccccatgcacctcctcctcccagtcccagatcgtgctcctcccacggccctcccagaaaccgcacctccctcccacgcctccctccgccgtctccgccgctgacgccggaaaccgccccaatctcctcccccttttcattcacacaccctcctcacgcccacatccatcccgtcacccgcccactcgccgtcgcacgagcctccccgtcgtcgatcccctcccttctcaccctcatcctcaggtattgttgccgattgtcctgtctccgctcgtcgccggcccctcgtagcgcaaatcgtcatcctgcatcgtcgattccccacgcctcgatctcccgttggtcttcccgccgctcgccattgaccatcgcccatggctcctccaagagtcaccgccgaatccaccccacgcacccgcgccacctcccacccgcaccctcgcccccgcccactccctcgctctccaaaccctaaccctaacctcccctcctctctccacgactccccgccgcacgccgacagttcgtcgccgcgcgccgcacccgcactccctccccgctcaccggtttcctcatcaccgccttcgtgccgccaccactccgatccccatctcgcgagcagagcaggggagggatctcctccgcggccgctgccgaccgcaccgtcgcctgaattgccgcctccgctccgatccccatcgcgcgagcagagcagggggaggggaggggcgccgtcgtcctgctgcattccggtgagcatacacatcctctctcgttcatctctctgtctctcacccatttttgtctggaattttcttgcgttagcactatcttctcttcaagatctggatgattctcttcgaccgcgattgctccggcgacctcctccacagtccgtcaaagggtttgtcctcattccgtcaccctcgatgacccaggccgcagtagcgacgctggtttcttagccaacaccagggtctacctcgccaattcaggtttgctctgttgcagtccattgaataaatacaatacaaaatactaaatgcagtaaatttgatgttatacaatcgtttccatctatctaaagtgtaaatactgggttgtttcaataacgatacatggattattttctaagaaattgtcagttgaagccacattattttactagatggttaacattgttggcaaaatcaagtttgtttggtttgtaatcactcccgtgacacattgtgatgacgatagagttacagaccatttccactttagtttagtcctttatttctttttcccttttgttgtattggtgggagtccacagaagcagaggtaattcaactatgtgccgctgcagaaatagctattttgtgcataggtgaaaaaaatatgatcatgatattgtggatggtgatagtccagaagaacatgaaggagatgtagtgcaattcaactttgtgtgctgccacgcaaatggctattttctgagaaaggataccatccagtactattttgtacagattcaactgatgaaactggatggcatgtagtatcagtttaagtactatcagtcaattcggttctttcatcttacgatggtttgcctgttctctgcagttcagcttggtagatcagtttagcgttgagaagcaagctgtgaaaacatccacttaatgcagaagaggtcataagctccactcctgaaaattccacattttttagatatcctcacattattcaccctatatatgttttcagttgttcctgtatatttggtacactattctcgtttaagttgtttaaagatgattcaaggtctcaaagacgttattatcatcgaaatgaaggctggaggtactttttatagctgaactacaacatactgaaactctgcatgctaatcaattggctcaatgtttttcagctctgaaaataccacggttgtacattaacgttttccatctcatcacaactttgagtgcaggtaagaggagagctctgatacctcctcaagtagtctacactgatgagagcgtgcggcccataccagaggaggtatatcctaacaaacttttccttgttttttccctattcatcttaggtgtttcttttacctgtatgtcagttcaaatagaatctggagcgatgctaacttatggtgccagcttcgaaatttgattgctcatggagacaggggacagattattattttctctaaacatttctgaaaatataattctgaaactatggtgaaatgaaacactctcatttctgaaaaattcagctgctgtatgggttgctactagcctacggaatacatggttcagttttaacctggcaatgttttcttcgggttctggtcattatggtgtcataagaaatagtcaggccactccattcaaaaaatgggaaagacaataaagctttttcattcaacaagggacaataaaggactatttttgcatgtgctcttttgcttggagtattgtgtgattatatagctgattgagctatgtttagaaaactgaacttcccagaactagaattgaatagtctatggcatgacctaatcattaatcagttctctatttgtgagactgatagttgcaattttatagaggatggtctatcataacaaactaaattacttctatgatttttttcttaaatcaaagttgatacatttgtgactgttcattgtttcaggctgaagggggactcattatttaaaaaatgaaatgaaaactgctatccatgttgactccatcgattcattgatcagatcagggggtttgaatgaataaggatatctatgctgttcatgaagtgcataatggatggtgtgatcctctttaatcatactgcttccttcagagttcagatacaaggtagaatcttttacgctactttcagcttaattgattgattcattttcgtatttgacttgcagggcctaaccatggtaactaatgatgcacagctgctttgctccagggtgaaccctcactctgctggttggatttcagccgtggattagcaactggttcatgttctgaaatttttatactaaccatcctcactctgtagtatttgaaatcaacctttcagtttgttctgaatttttatgcagaatataaccatgccagtattttggaatgagtgcagaatttgatccgtcggttctgaagaaacccggttacttattagaagaagcagagaccacaacctggcagtggctggtcacttcagtggtctccaattgcctttgaatacgacaatggtaatttcagaaatctccaagtagtccactaattttattgcttacattttttttcatcaaaagcaaaattgaaaccctatgttcccttgtaattctaaatttgactgcacatattttgattttcgatgagtactgcttgatatattcagaacggacaggattttgggaactagcaattattgattttgattgttgatgctgaagagttctgactatctacatgggttattttcttgttcaacaaattcaggaaatagtttcagctcatcagaagtttgcattgctgtcatcccttctagccatcctcgagtagttgcaatgaatacattgggcaattcagcaattgtggatcctatatctaagataatattccttggataaaatagagtatatatccgggcagttgcttttgtgactgaaaaattcatagcataaaatggtatgcctgtaggtcatttgaccaggctgttaatttggtaacatgagtctaattttcccaaaaaccatttatctgcctcaaagccctcaactcgtctatgtggaccagaaatgacttcttgaacatacaagaataccaatcacattttagaatgttttgtagtgtacagagctatcgatgaaccaggtgtcggcgtcatatgcatggtcgatgtcatcacatttaagatttataaattgaatattatcagtagaccaattgcatgtacgtcttaaaaaggatgtttggattacaagtatctatggtatagtagaaacctaaaattagatgtacgaaggtacgtaaaaaagcaagaaaaaattgagttgcaacttcgaaagaaatatactgtttcttcaattagggctatctacatcagctgcatttgagagaaatatccgaactgttgtagttcaaggaagcatttgaaataaaaattctggtaacagccttaaattaattgagagaaatatcctaattagggcacacaggatcagttggatctgttgagtttcataaagaagaggtgcttgtgcgttcatcaaatagctcggacgaagcttgtattttcgcttgtctgctagcaagccatctaaaaagtcaaagcgtatcgtcacatatttgaaaatgtgtttataaattttcagtaacttgctttgtaagggaaaaacaccaaagtttctgtgcatttgcttcgaacatttggttctgcagtactgttgactataaaatacagctcaacagaactttattttctcacatttctcataacaagttggatatggaaaaccatcgactctcataaaagactacacacaagtattaaactcaaatctattttaaagcatgtgaataggagacagcaagctttagaatgattctgagatagctccattttttttatcttgtctgaactttggctgtgagcttaaatgattaaatcagtatgttttttttttttttgcagccaccgaatcctttttaatagttttttattcttctatctataatgcttgtgtgcatgcttcttacggattgctaattattttacacgtgcagaataagtgtaattaactgggggagtgcttcttgaagtagatagaaagctttgctacttttgaagaaaacaagttgataatggagaaattgggtgagacatcattcattctacacaactttgagaactgactgagatgtaagcctggaaaatagtcatcccatgtgaataacacaaatgaacatcgaagttatatgtagcgccggaaatatatagaagatagctcatgcaactgtacgtgacatgggttgttcaatccataacactatgcattgttgatcgattggtgattattgttccctatatatgctctgggcattgacacgaaccgcataacattgcagggccatatatcttgagatattcataattgcgtttaaaccaattttttttacagttgcatacgattgtgtctttcagatctatatttgactctacacgcattgtcatgacttatccatcatatcgctttaatgtacttagcattttcacctacataaatgattatagcattgcaatgctcagttatggctctatgtgaatcaagaaaagatggtttattataacgtgattaatcagcagtaaaacgatacggggaaaatgtcaagtgaatagctataatgttcacggacaaagcacaaaacagacctggccttgccggaggttattaaagctcaaatgtacaaatcatatcaatttttttttgctaacatgaaattttaaaaattattgaagacaagtagaattgcaccgtagcgtttagcacgggcatattactagtggtgaatacatattaaccatttcattcacaatgatggatatatattaatcatccccgtcacctaatatgtgaattcaccgcaagaaaacgatgaacggggggccattgccatctctaagcctataagacaccatacgaagtgacttattgtgggaaacattatgtaaatatagaaattcgctcatggacaccgtgctcattaagatattcatttctgattaaataacatgaaagttctgtgggccacttgtcaattctcccatcacatgtctggtttaattatagtttggcactaatagagaaacaattttttcacgtgcgaaacaggattttcgcataaggaacattaagccgcccatctgcaaaatcaaaattaggcaaaaaaattccaaaaaagaaacccaaaaccctaactcctattcccatctttctcgagctcaccgccgcccgccatcgccatcacctctcccagggccgagggcagcgctgccggatctgctgccctcaagttcgccagcgccgacaccctagtcatcgtcgcctttccagggcccagagtggcggatccgtccttctcgaggccagcattgtcagatttgcctcctgagtctgtcacctctgccgccgtcgccatcgcctgagctgccctcgcctaccatccagcccaagcccaaggaggccggatgggagtaggagggagggagaaagaggagggggaagtgggagaaaggaggaggaggaggaggaggaggaggagcgtcgatggtgcttcgtcggtgtttccctcgctggttctgtcgtcgccggccggtaggagttgagaggagaggagatggatgtctcgatgggggagagagagggacatttttacatttacatttatcttccccatcctctcttctattctacccctcatcctctcttcccctcatactctcttctgttcttccaacggagaggacgaggaggggtgacgggcggtcgtcgagcggggagcggcggggtcgccaggcggaggagccgcagcagaggcggcagcatcgcgggccgggagcggcgcgggcggaggagccgtggcagaggcggcggcgtcgcggacggggagcggtgcggcggtcgcatgcggaagagcggcacggaggagccgcggaggagcggcatcgcagacggaggagccgcggcacaggcggcggtgtcgcgggcgaggagcggtgcagcggtcgccgggcggaggagcggcgcggtcggaggggcaacgcggtcgtcggaggagctctgagcggcggggatggtggggatctccaccttcagatccggggatggtggtgatctccacctttagcaccttcctcgctgccagatccgccacctctccacgggcgaggagcggcggcggacgaccggaggcgggtgggcgaggggcggcggcgggcgggcgaggggtggaggaggcaggcggcggcgagcgggcaacagtgtcgggcgagcggcggggacggtggtgcgggcggccagatccagtaagtctcctctcctccgctcccctcccctccgttggccgacggcggtcgaacgacgaaggtagccaccggtgcgtcctctcttccctcttccttcacccttcatgctcaatccggatgggggcgggagaactgcatggagtgggcgtttggggatggtacagtgtctcttctctaggtggcggcagtcaacaagaaggaggactgtagcaccaggaacaaaggccagcaaaggcacagtcccggaggagagagaaatgttggtggtgagcactacgattttcctgcacagggactcgtttagattgcagatggacctgttgatgtgaaaaacacacactagcctgggagatctgcttagctccagtgcaggtccaaaacttgatgagttgcaggcgtgccagttagtttgatcctgcaactgacaagatttgtaaatagtagatcaaacagacgatcggctgacaagccgatggagtagttccagccgatagccgataatagccgatgccgataccagccgatagcgatagggtttaagcaatcggctatatgtccaatgtagataatgatataaaggcaatcgactgatgatgatgtaataaaataacagtataatccagtataaaccaatcggcaaataatgatatgataaataagcatcgatccgaaggttaaagcatacatcggttggaggtccgatgtcataaaatccacaagattagattaaacagtgaaacctttgttgcgatcagctaaatccaatttatatgtatatgcaatccttacaagccgatgcaacgtccagataacttatcggctagcacccgataaaacattagcatgaacctattggtttaacaagacttatattatcaataacaatctaataggtcgaacctaaccgatgcagcacaagattgtatatgataatctaatactcgatgagccaatagatctgtctaatgtgatggatataacaaatctatttagaacaacattatgattgtagagatatatcggctaagacaggagattagacctaaccgagacagtcccaactaaaccgatgcgtctctaaacacaatgcaattagagatagaattgagatatcaggtaggcaaatatatcaaccaaaccagagcgatccaagagatcaaagcgatcactagtaggaaatcgcccatctatgacgtttttctcatgatgttgtataatttcgtcattaaatagggcatatctatgacgaaatttcctatttcgtcatgggtgagtcgtggcaggggtaggttccaaaactctgacgaaattaaaaatagcgtcaaggaacaatggaaaatttcgtcacaaatgatgcacaccgttcatttgttaatacttgttggtcccactgcgcatacgtgacactgtctccactggtcccaccgcatatatgcatatgttggtcccatcgcgcatatgtggcactagccccggtcccaccagtggccactacacgcgccatagtcccactgccccaccacgcatatgtggcactagcccccactggccccaccacgcatacgtggctatccatgtcactggtggctatcaaatttgtccaaaaaaataaatgctgcacctggaatcgaacccacaccacgagcaattacttaacagaagcttaaccactatgctagaaagatccttgtgtggatgcttattttgttattaacttttattggaactcccaaatgtttaacttatacacttcaagcatcagttaaagcattacacttttctgaattgccatactcaattcacatgaaaaaaaataacgcaataatcagtcgtaagtttattcacaatctcaatctgaattcacgaagctgtacaaagaagtagcatttcttctcctgctgttgtcgcccacgtccagcaagcaagctgcataagcaccactgcaccagaagcttgctactcgatcatggaggattaatggaggtgaagtagaagctgttgaacaccgataacgaaatcaggccgcctccatggccagcaccaggtcctcttcgccggcgacgctgggagcatcggtgaaggagatggcggtgggcggcgcctggtccagctgctactgctccggaatggccccgtgttcgccgccgcagccaccagcggcgtcttcgccggtcgcgcgccacaaaatcctcaacaccggcgccatcgccaagcgtcagcgctgctacaacgacgcactgagtgtcggcgccctgaacacgaggtgccccgaacgcccagaggacacgctctgtcttgccactgccgccggcgaccacctcctcgacgcctttctcctcctcgctgacacccagtagggcttccacgaggccctcctcgacctcacccaacatgttgccgaggcccgcgccgtgctgtggaggggtgacgccgccagcgtcgcctccgccgtcaggtcccagcggcggcggccgagaaggacctctcccgcggtggacatgggtgtgtgtttacgatttggtttggtttggatctgaatccctcgttatatgtgtgttgatttacgattgtgcccttgttatatgtgtgttgtaccgataagaatgaggggtaagttggtccaaaccacgccgtttgttcgattaaaaccggttggttcaatgtttttctacaaacaccggccggtttacccagtttaaagtgaatataaaatttttaaaattcaattttcaatcagaattatatttctgtgaatggtaaactgtgccgattttattgccagcctagctcaaattttaaataaaacattgaatttgctggttagaaaaaaaaagtgggattttgagaccatttctaagtggccacaattattattttcacttaaaggtacagcttatattaataaataataaaaaaaatagggacacattcatggtacagcaatttgatgatccctattgagcacagttctaaaaaaaaaatagaacacgcgcacgcgcggtaaaagaaagaaacaaaattgatgctcttcgggggattcgaacccacaaccacaagaacaacagcctatgttcccaccactaagccacacaagtgtttcatcatagggcatgcgcttggtcttatatatcaaaatgttagaaggtaatggacctatatctagccatctactcgtggggttcgtcataaagcgtggtttttctttttaatctctgactaaaacttataggcagtctttctccctcatactaacttcaaatttgattattcttttttctaaaattttctaaattcatgatctatccattttttgtgttattaaaacctttttttttgtcatacttttatgtgactttgttttataaattgaagatttaaatttcaaaaagtgctaactacaaatgacatttttgaagcagtaaatgatttcaactgaaaaagtaatgaacacaaaagttgtagaactgatcaagatctacaaattttattttggtcatttgttcatttgataaagtgatagtaacgttgtgtacaaaatttacacatctctcttataatttatgaaaccatactagagatatgtaaaatttgtgaacaatgttactatcactttgtcggatgaataaatgaccaaaataaaaattgtagatctagatggattatacatctttgttgttgatgactttttcagttgaagtcgttcactaataaaaatttctatttgaagttctcaaactttgaaattcaaatttcaatttgttcaaataaagtcagatggagaaatgactaaaataatttttttttcatctcgatgagttctacaactttggttttggtgacttttccatttgaaatcatttattaaccccaattttgttttaagttgtcaaattttgaaaattcaaaatttgaattgatcaaatgaacttatttgtaaaaaagtccaatacaattgttgtagatctcgatcagttctacaattttgttgtttataatttttgcatttgaaacacaaaaatcggtctaaaattaaatttaaaattttcataaattgatattaaaaaataccacatatattagtaggcctaaaccctgaaatcggcccgttacagtattcggcccataaatttctggccattgattcttgatcgaatggctatcgttgctccaaggaagtataatttgattgttttcgatttatggaaaatgataattactcatagtcatatacggaggatttttcgttcggcgcctaaacctgccgccaatgacagccccaaaatattccattgccgcccatttgccaaatcagaatgggaaatgtcacttttatcctccatctaacgaagagcaaaagaacacccaggggcatttgtgcaaccactatatatttacaaactctctcacccaccaaaccctaatccccaaatccagtcgccagcccatcggggcgccgctgtactagagccgccgccgccgaccgctgcaccggagccttcccccacaacctcgtcgacgacgactgctgcaccagtccttcccccactacctcgtcgacgacggccgccgcaacgaagccttctgctgcaaccccgtcaatgacgaccactgcaccagatccttcccccgcgaccccgtcgacgacggctgccgcaccggagccggtaccccgtcgacgactaccgccgcactgaagcctttccccttacaacatcgtcgacgcctcccgccacaccggagccgggtaccccatcgacaaggaccctgcaccgtcgccgtgcctagccgatgggaagacgtcgacgtccagtagcacgaggtacgcaaaattattttgccgtctcaagatcagatgttcgtgtgtactgtctaaatgaaagccattagatgttatacatcatgaggattgatttgctgtccaaatctctattaagaattttctgtgtgcaatatgattgaggtcactattaacgagaacggttgatgctgttgctagtttgctactgcatatggcattgtttctgtgttttttaggcgcacctttaaattaatcatgctatgttgattctcaaataaatttgtgcctcaagttccataatcatcataactggaagagattccttcagattaagggttggaaatctattatcctttaagaacacaataatgttctctgctcttgttttaattcttttctttcacccgaaggggttctgggagctagatgatggacatctgcaatgcaatatccctttcagtgctcaattaatggtcagtacatatttcttcctttttcttgcctttttatggaactcttgctttactgtttttttcttacataatcaaaattgagaataaaattcctgtgatatgaatatgtcccacaagtctgacatgtaacaaattttggtacatttagtttacaccctgttgtttccatacaagctgtcttgtggatgactgcctatctacgacaggtgcagaagaagaaaactgtcttggttcttcctgctgttcatgactatgcaacaatctctcatgagatttctgtgtacacagggtaagaaatctttgtgcaactatctcccatgaggttatatatatatgggtgctaatatttagtgagtgctaagtagtactgtaatataaattggttacttgtgatagttatcatttgttgtcaacacttgcataatggtgcaaaatttggatttccttggctgaaattttctgacgacaatcaagacagtagtagatacactcttgacgtataatcgtggtctgctcaaactgttgattccagtgtgtactatcttcaaactgtgcagcatttgtttatttttttaatgactgttgctaatttattcacatgcttacagcttctgtatttattattgtagtaccctcgtgtggagattatgggtaccccatacccacatggcatagttatccgactggctataggggataacttatatctatggaatatgtaacagatcatgacttgggtattacgtttccttgtatgttacggaacggcctaaagtcctggtttgataatattgtaaagtagatttaggaaaccgataccgtattggttaaggtttctatcttgtaatcctgccccccaccctatataaggtgggcaggaggccctctagggggcatgacacaacctgatcgtcagatctatactacacccggcggattcaaatccccaaacaggagtagggtattacctctcattgagagggcctgaacctgtctaaatcctttgtctccacatccatccacttttaggtctcgtgcgctacccctttttattattgccgaaatcatgtttcgacagttggcgcgccaggtaggggttgcgtcgagttatctatcaagaagcgcgatggaatcaactttacgagtcgccggcttcgtcttcacttcgggagctgcaacttcctcgccgccgacgaattcgctaagcttttcttcaacaacttggatccaatctagccggcaagattaatttaagcgatggatccaatcactgtcgtcgccgagttgtttctctgatcggcatgaccggacgtcagtcgccaagttattttcctgatcatcatgagcatcaacagacagccacgcaagtgcatgtttccatatgatgcacgcgcatgacagattggccaactaattaggagctgctagcagcactttcttccccgattgacataatatatacagtgtcgtttgttgaagcagttattctcctcaaattaaccgtccagtgacagatcaaattccaagcgccaatgttttctcgtcaatatcaaagtttcggcgagattcaactattagcatgaatcggagtcgatgtggaatccgagccgactgatcgaactcagccatgcatactccggactcatatctggccctgcacagtacctattttgccactttaactcaagtcagatgcagtcaacgatgaacgtcaaggctgaccaggttgatacatgtaaagccgatgacgtacatgcatcattaagagtttgggtgacaaacacaaatcaggtttatcgttctaaattttcttatataaattagaattaattcacatgtcactaattattatttaatctattattttatacatgtaccgccggccgccttcgttgctgccgattggtttcatcgcctccacggttggtgtgcgccgctgccgttgcnnnnnnnnnnnnnnnnnnnnnnnccggcctgcctccgtcgccgccgattggtgtctccgcctacacggctggcctattatgccgccgctgttgggcgtctacgacttcaccgccggcttgcctccgtcgccgccgattggtgcctccgcctacacggctggcctattatgccgccgctgttgggcgtctacgacttcaccgccggcctgcctccgtcgccgccgagtggtgcctccgcctacacggctggcatattatgccgccgctgttgggcgtctacgacttcaccgccggcctgcctccgtcgccgccgagtggtgcctccgcctacacggctggcctattatgccgccgctgttgggcgtctacgacttcaccgccggcctgcctccgtcgccgccgagtggtgcctccgcctacacgactggcctattatgccgctgctgttgggcgtctacgacttcaccgccggcctgcctccgtcgccgccgattggtgcctccgcctacacggctggcctattatgccgccgctgttgggcgtttacgacttcaccgccggcctgtctccgtcgccgccgactggtgtcctcgcctatacggttggttggtcacaccaccgttcatgggcgtccacgtcttcaccaccggcctgcctccgtcgccgccgattggtgcctccgcctacacggctggcctattatgccgctgctgttgggcgtctacgtcttcaccgccggcctgcctccgtcgccgccgattggtgcctccgtctacacggctggcctattatgccgccgctgttgggcgtctacgacttcaccgccggcctgcctccgtcgccgccgagtggtgcctccgcctacacggctggcctattatgccgccgctgttgggcgtctacgacttcaccgccggcctgcctccgtcgccgccgagcggtgcctccgcctacacggctggcctattatgccgctgctgttgggcgtctacgtcttcaccgccggcctgcctccgtcgccgccgactggtgcctccgcctatatggttggttggtcacaccaccgttgttgggcgtctacgtcttcaccaccggcctgcctccgtcgccgccgactggtgcctccgcttacacggttggcctattatgccgccattagtgggcatcttcgctttcaccgtcgaccgccttcgtcgccgccgactggtgtcttcattgttattgatggacgactttgttcccacattggccacttccgccatcaccaaggggaatattacaaagctaagtcatcatttattttattctttatatgatatttttccttttcctctgcctcactacaccaattggtcttccattgagtagtgagtcgggggctacagatgttatatcatattttttataatatttatcttgattgcttgcgacataatctgagtacaaaagtacctatcgagttatggagttctatcttcctatgctttccgtttggtttgccaatggatggttgcctttgggccgattcctagcacccgggggctcgttggatggaccgagtaacgcaaggtgctaagtattattcggaataaatcaaaagcatagagatgagataaatttattttctgctcttaataattgcaaaagtacccgagtagtaaattccgattcgtgaaactttgttctattaatggcgaactcatgtcactcatatgcatgtctgggaagtgcctaggccgactcccgatgcttgggggctatgactagtcggacagagcgtttaaacgtaatgaatcatctgctcggggaaatcaaaattgacaagaggagaaatacatatttataaatattttaaaatacttgattttttctcgagtattatatttatatcagatactactcatcctatatgtttgttctgcaggatccagatccggatatgcataaaagggattcatggctttcagcttatctcttacgctccaggaatggatcagtcagaacatcaccgaccggcttgccttcgccgccgccgactggtgtttccgcctgcacggctggcctttatgccgccgttgttgggcgtctacgtcttcaccgaccggcttgccttcgccgctgccgactggtgtttccgcctgcacagctggcctttatgccgccgttgttgggcgtctacgtcttcaccgaccggcttgccttcgccgctgccgactggtgtttccgcctgcacggctggcctttatgccgccattgttgggcgtctacgtcttcaccgaccggcttgccttcgccgccgccgactggtgtttccgcctgcacggctggcctttatgccgccgtagttgggcgtctacgtcttcaccgaccggcttgccttcgccgccgccgactggtgtttccgcctgcacggctggcctttatgccgccgttgttgggcgtctacgtcttcaccgaccggcttgcctttgtcgccgccgaccgatgtcctcgcctgcacggctggcctttatgccgccgttgttgggcgtctacgtcttcaccgaccggcttgccttcgccgccgccgactggtgtttccgcctgcacggctggcctttatgccgccgttgttgggcgtctacgtcttcaccgaccggccgccgcatccgccgctgactggtgtcaccgcctgcacggctggcctgttataacgccaactgatgctatcttcttcacggctggctacatcgctgtcactactaataggcatcagtatcttcaacacaatctgcctacgtttgccatggctgccgactggtttcttcacttccatggctgcatgattctgccagtgttgattggccttaccatcttcatcgccggtcgtctcgtctgctgctgactagtgccctcgcctctacatctggtttatacagctaccactactgatggacatcatcgtcttccgccgccgactcgtgttatgccgccgccgactggtgcttttatcttcacaactgcgcgtcttcactaccggttcacttcatcacggcaacacaactttgtcatcatgcaagtggctctccaatattcaggatttctacttggacatcttcaacacatatcttcaatcaagcaatgactactcgacgacaagaagctataattctcgactctatgttcagttgtttcccaactaaccaaagagtcgggggctacacaaatataaggctcaaaatttgacaaattttatataagccaatgagtcaactccaggagtcattatcttcatctttgcttcggaacagacattctacttcaacaacttcaaatatttcggtttgaacgagttggacaacaacatcaactctcctccaagtgaagcatctacaacagctataacattaatttgatggattattgtcactgacatcatcaccagcacctctgcttcatcgaccctgacatctctgctgttgctaatggatgattatgttttcgccgacttattatttcaccttcacggttgacctactatgcaaatgctgatgagcgtcttcttcatcatgtcggttgcgtttgtcgtcgtcaactattttcttcatcttcatgattggtggattttgtcatcacctttgatctacctcgtctgtcaccgactgattattttgctgccatggctacacaattttatcgctgggttccttcatcttcattgttagttgatctgtctgccgccgactggtttcttcgcctccatggctatgcgacttcattactttagattggtatcactatcttcactaccaccagtattgttgccacctctggtgggcaatattatctctatattggtcgtcttgtctatatgccaactgcgtcagctaccatcaatggacgattgtgactacgacagaaggacaagctatatgctcaggggctcatcaactcaagcgtgaggattatatctccaatttggacttgttccggatacattccacatggattcatagtcatgagtctattttctatgctcaaagactggaccaattatattccccgtaagggctatcaaccgaatacttgcgccagtcgggattcaattgttacacctattttggagtatcccataagggataatcattcagatcagaagctattcatatgagctacacttggtctatattacccggaagatttattactcggaagcatgttacatgcgtcatcctttaaagggtgtcgaaggcatattttttggcctaggcctaatatgtctgcagcccatattttcaggtgtggcctgtcacgttcttttagggacttaggcacttttggcttaggccaaagtgcgcgtgatcaagtgcccaataccttaaaatccttttataccgcagttacttaactttttaggagttggtacaatgcatcttaaaaggtgtcaaacagtaaagctttatatagctgtcccgctgacttttttatatataagtcaaggtgctgtttgggtttttaagcaattgattggatacaatatcattgcttttcgccacgtaagtgtgcatttttattgaccaatattatggcttaggctgattatatattgtggtcattttctaggcggttggtaaatcctttatgagtttattcactcggattttacaccacatatgccatatatttccaggtgtggtgaaaccatgtgtcttttagggactaaagcacgtctgttaaagcagtgtgcgcatggcgtatgcccaatactttggaaatttatttattcacaacatacaagcttctttatagctgttttgttatgtgaattttcaatgatgtaaccaactttaggttacactcatcatattttacaaagcggtcggtatatcactcggatcatgttattcagggattcacaccgcatatgctacatattaatatcaggtcgcttggttgactataattattaaaaccactcggttggttggattatttattcgttgactatatgcttggtttgttcaattaaccacatagtcgggggctacacctattaggtgcatctagtcgatgcacctgactttatttttcagccctccacagtcttcatatttggtaaaagtacttcggagaccatggcgaagatgattgaagcactcagctttggagtaatctagttcgagagaagattatcttttcgactgtgaaggtctcaggggctactgtggagattatgggtaccccatacccacatggcatagttatccgactggctataggggataacttatatctatggaatatgtaacagatcatgacttgggtattacgtttccttgtatgttacggaacggcctaaagtcctggtttgataatattgtaaagtagatttaggaaaccgattccggattgggtaaggattctatcttgaaatcctgcccccc

SEQ ID NO: 24958 - DNA, 23943 bp, Oryza sativa
ctatcctctcctctcctccccgcagcaacggctgggcgtaggcggcgacggcggcgcggctacggtgcgcagattcggtagccagccgccctctcccccgcgggatctcgttcccctcccctccccttccttcttccctccccgaatccggcagaggggaggggcatcggtggcggtgcggccggaggggagcgaggaggccgtcgggagtgcagatccggcggcggcccgccctccccccacgggattcggctcccctcccctccccttccttccgtccccagatccggtggaggggaggggcgtcggcggcgggtggcgcggaggccggcgagagggcggatccggcggctggcggcgtggaggccaccgccgacgacgacgagggtgggagcggcgccctctcgacgactacgacgaggaagaggatgaggacgacgacgacaaggaggcggcggctaggagcggcggtgcagcagctggattcgttttttgaaattttatttttttcggaattttgtttttctgtgcgggcgacataagcacccgccggcgaaaatccggcgacgccgcattcgttttttgaaattttattttttttcggatttttgttttttcgtgcgggcgacataagcacccgcatgcgaaaatcggatttttcgcgtgctggtgtgccacccgcacgcaaaaaccgcgattttcgcagacccttggttgcgtgcgggctgtccacccgcacgcgaaaatcacatttgaccgcatgtaaaagtcacgattctagtagtggagcttcggtggcaaacatgatcagatgtgcgcatcgaagcatgtttcaacaggggcttccgttttcatggaacttgttgatagatatggaacggtggtggcaggaaccgatggtgccgatttgggagagggggggggggggggggcatggcgtccatccatggtaaagaaggaggaaatgttgctagcgcgacggagcagcgagagaaggccagggtcgttggagatgcggaggctaaggtgcgggagtgtctcggcaactagcgacaacatttcagaactgaggcttacatatatacggcccgtatatcctatagcaaaacttgcaaaacttcagtgtgaatagtcaacgatcatgctagagcaagtttaatagtataacccactactagctctaatttatctatagccaatgtaatagccaattcatacattagatgcttactatactattagtatatggtcccacctgtcatacacacattacgtcttggagtccgtactgtagctggctacggctacagatctatagcccgctactcttctctctcatcttttatctcattaaaatatggttgtagctagcgaatagtctgctattgtacctgctcttagtatattcacgcaatgatgtattcatgccagtttaattatgcataacaagagccaacagtgatattgaaaatactaatcatgcggttcataacgtaagccgactgtacagttcacttttaaaatttgatttctttttttttttggtctagactcttttgtcatttattgccggctctaaaaaaaatcgtgcaagcagtagcccctttaaattctaagcgatccttacaaaattcataccgaaggataaccatgacacaacatatatagaattaagatttgaaccatggtttgaaaattatacactactgaagagaactgatctttcgtggatcatgtaaaaaccacattatagtcctagttcgtataggaaccgggactaaatatcatttttagtatcggttaaaaagcccaacgagactccaatcgggactaaatatcatttttagacccggttaaaaaaggcgtcaggctataagatgtcgtgtgtcaggccctcattatctttagtcccggttggtagactaaaaatcaacactttacataaaaaaatcgcgccaagccagacgcttttccgcctcgatctccccgcctcatcttatctccttcgcacgcctcctcctccttatctcctctgcacaccttctcctccttatctccttcgtcgctcctcctccactcctcctccaggtctgcttcgcacgcatcccctcctccccttaccctctccgtcggtggcgtgggtggcggcaggtggcagcgagcggcgggagttggcggcaagccgccggggccctcctcctcctcttccccatccgccgccggcgaggaggatgaaaagcaagagcaaggagaggagaataaagaaaaaaattgtggatgattttgttgtagattttttagatgtttgttgtagattttgttattgcatttgatccgtgatgttaattttgatgttgttgcattcaatccgtgccgttggaaaaataattttgatgttgttgcatttgatctttggcgttggaaaaaacaatgaaaaaaaaaacaatacgcaagcaaaaaaatggaaaaaaactatagtcccggttagtaacaccaattaggactaaagatgatagcaacaaccatatggcgttactatctttagttagtctcgggtagtgttactaactgggaacactaaccgggagttcaagagtaaagatatctctttagtcccggattcagggtcccggtttgcaacctgagactaaaggggttgcaaattaaaccggcactaaaaaccacttctccagcagtgatatcaatttatgtagccacactgtaccaccaaaatggttgaggaatttttccgaaggaaaaaataagtagcagatgctttctaagggaaaaaaatgaataaccgacttaattaccatcaatcaatcaataatagtcgcggctttgaccagtggccggagacggagctcattcatatcctctccctctgtaaccgtaaagaaagtcgtttaggatagcgacacggtctccaaaacacaactttgacttttttttataaaaatatttattgaaaagtgatatatgtatacttttatgaaagtatttttcaagacaaatctattcatataatttttatattttcaaactcaacaacttgaaagttattaatgatttatattttcaaggtttgacttaaacactgtgctaaacgatttactttatgagtatggagggagtatatggaaaaccacgtacgaatgctaaattaagttacataggcatgcatgacttaataaccactaaatcagggatgtttccttgctaacggaaatgatcgagtagctgactttgctatcgattgatcaataatcacagctccaacttgaaaaggctaatgcatggtacggtgtttcatgaggagaaatgaactgttgccaacttgccatcaattgatcaataaccacgactttcaactcgagaaaactaaattaagttaattatataccaataatcaaaatttaattgtatacattattctaggagaaatggatgattgtgtataaaaaaaacgtgaactttcgatgctatataaccaattttgcctatttaaaaatagaattatgatcgagaattgacggaagtgctaaaaatgggaacatggtgaactttaggtgctattaaagtgaaccggtatctttcggtgctataaaaccaaaaatgtgaactttcgatgctatataaccaattttgccttttaaacatattgtacccacaaattacagctgtagtatgcatagaaatatatatcgtgtacaaattaaattgtatgcatggaaaaaaaattaggagtccaacactattcagtttcaaatagaaaaccataattatatttatagaaaaaaaccaattgtgaaaaatccaactctacctttatatttatagaaaaaaaccagttgtgaaaaatccaactctaccttttatcaagctctgctaataatggtagcgacttttggttggcgaccggaatcgcatccagggacacgcacctctgtctagcactgggcacatctatgctttctatataagtgagaacacaaacaagcacaacgtttagccacgtcatcaaaatagtttcaactgttggatcgacaagaccttccagtattagccgttagataaaagtcccctccacttcctcaccaattaaacaacaccattaaccaccaccccatctaaatgctatctatttaatcaggtagtcaattgaaccataatacaatcaagatatcagatcatatttactattccaaccatcattcaatcaattatatatatatatatatatatatatatatatatatatatatatatatatatatatatgtatatatatatatatatgtatgtatatgtatatatgtatatatgtacatacaagaaagtagatattttctatttttttaaattgcttagtaatttccgcagtaaaatgcggggtatcacctagtatctgaagataattaagaaaccaaattagtacacctagctctgtctgtctagcttaacgccgtgtgtacgtgtatctgcttaattaataagagtgatcagagaagcaaccagtaagtacgctgtgcagcttgtgctccatccatgctgtacgtacgtatatatagcacgtacaataataatagttccaacttgacatgcatgaacgaacacgtagctagctagctaacttgctggcccctgtataaatacccctatatacctagccctatcatccatccatccagccagccaaacagtagcaacatgagtacttcagctcgccgcctcctcctcctcgccggcgccgctgccgccatcgcactcctgctctcggccactgccccggtggccggagccgaggacgacggctacagctacatccctggctcacccagggggccgcagaactggggcagcctgaagccggaatgggccacctgcagcagcggcaagatgcagtcgccgatcaacctcggcctcctcgacctcaccttggctcccggcctcggcaacctcaactacacctaccagaacgccaacgcctccgtcgtcaaccgtggccacgacatcatggtcaggtttgacggcgacgccggtagcctaaagataaatggcacggcgtaccagctccggcagatgcactggcacacgccgtcggagcacaccatcgatggccggaggtacgacatggagctgcacatggtgcacctcaacgcccagaaccaggccgccgtcattggcatcctctacaccatcggcacccgggacgagtttctgcaaaaggtctgttggattcataattcacatagtttgcacgcatggctaatgcttctaacaaaaatcaacatttgtaacttttaatagtaactcacgtatttgttgtcattaggttcatatttgaaatactatatatatgatgttaatttcatggttatcgacgatactccctccatcccaaaatataaggctcaaccgctactaacacaaagaccaagaaagaatttaatcacctccttgattgaattgcatccatacatgcaagcaatgtgattggaagacttaatggtacatgaattaaaataaatcaaatctaaagaattaagaggtgataggaaatgtattcatacatgcatgccttatattatgagacattggaaaaaaagtggttctgccttatattttgggatggagggagtatatcataaaataaactatttgtatttgttttaacttattagagaccatatagaaaactaatatgccttctattgtagaacaaaggaagcactgataatatcatcaatggtttgtcatgtctattttaatgtgatagtttggagcaactgatgaaccaagatagacatatattcttggtatgctgaacttcttgttgcatgcagctagagccttatataattgagatatcaaagcaagaaggcaaagagagagtgatcattggtggggcggatccaaatgtagccaagggacaggataccgtgtactaccgctacatgggctcctttaccacaccaccttgcactgagggagtcatctggaccgttgtcaggaaggtatgtatacatgcaataagtaggataatttaacattttaaaactatttgtcgcgatctcaaatcaagtgttatttcttgtcaagaattaatctttaaacaggataccgtatgtaccacatttagtttcttagtgacgatatattaaaatccttaaatatagtagaaataataaatatctaagagaattctcaataaatagtgtttatggtaaggtctaataggacaaataagtaataaattggcatccaaggaacaacctactcaatagtagcttctacctatctagctctctcccagagagtacaactttcaagcccaactctacacaagtttctttgtttccttttccaaggccttggataaaattaacccagtttcaatctcttgccaccttttatcccacatatcacattattaaagttgtaaacaatctataacatgaagcaccgggaatgtgctaaggcgaccacgttcagttttagttggtgagggaagttcttttagttatgtacttatgttcctacgctttctgtcttttttcttcttcaggtgcgcaccgtgtcactgtcccaaatcacacttctcaaggcagctgtgctcacggtaagtgaaaaagccattcatgtttaatatctattaatagatgacagtgaacaattatttcatttgttattacttatgatctgcatatgtgcatacatgcagggtaacgagaacaacgcgagaccccttcagggcgtgaacaacagggagattgacctgttccttcctctccctctcatcaacaactgaacagcatgcttgacatacacagctgatttacaacgcatcgcctgacacacgcatggagaatcagcaaacatatgtgtactaataaatatatagtattactcatgtttgtgtaatcttatcctaatggtgtcgcttatatatatatatatatatcgtcttgatcacctagcttcgtaaagagagatcagcatatatgttgttcaatcacatctgcatagcataataatgcatgcatagattttatatgtatctctttccggtgctgctatgtgtatctctatatgattaaataaaaataccaatgttttataattatgtaaatcatcatattcatcttcgtagcatagaaagtatgttgataaaaatttggttgccttggagtaggccaacttaatatatagtactatccagctggaattgtgctatggtaaacttaaaatgagaaaaattctttgtgtacacctgatcatattgagcatatccattttttaagggaaggtcatatatatcccttttgtatacatggtaaccttatctttaatgggtggttaaattgaccaattagatggtgtttggaggaatgacctgttagggcatgtacaacggtgtttattagtggtctctctctattgccatggaagtaaatttgatgacatggaagaaagagaaaggagtatggttgttatgcatgacaacagctcagagtcgactcttagcatttattagagcaaattttgttgcatggtggtgaaagaaaggaaataaaagtaagaaaaagtattttgatacattaatgattagagaccatattgtctctaactgttgtaggatactagtatctaaataacgtagagctcatatccgactctacctttgtacatgcccttagagatgtatgaaccctgcactgtcagtcgacgtcctgtgtttccatagcataacatctggaatgatttgttattacgagatacggtgaatgacacacgtaatgtgtcatttattatgaatcgtttatagatgagggtcttcatctataatggcttataaatatgacacattagagatgagttcttctctctaattggcctggtttttaactgttacatcaatgactaatacctgatccgttcaaatgttaatgtccagcccgcatggcctgctctctctctctctctctctctcctcactagctacatctcagctagctatggcatctgccttgcgttgtgcttagttacatttctaggtgcacaattggctccaatattgtcctcattttttttgttgactttgttcatgcctacaacttaacccttttgccctgtgtgtgctctctgattggtctcaccctttggtcgtcctatacatgccttcctaaaaggtaagcttgtatgtaggccaccttgttcacgagatcacttacttgatcctagtacaatcgtctaatctttcttatttacctcttatctcttttgtcaatattgttgatctttctaaaaactatgttgccaatctttctaatgttcgatcatcaatatatttggagctacctcttgatttagttcatgaaaacacataattagatttttcactcaaaaatctggtttcataaaattacaagcttatatgaaaaatgtcaatgttacggatcaggtatacatcctatacttagattcgtagctaccataaaatacagaaaattatatttaaatatggtacataactagataagaatgaaaactccctccacatgaatagatgttgtcggagtccgacctgaaaaaggcaaggtcttatctacccacattccacaagggctctccgactttaacttggagaggaagttgcctacccatataaatacaatgttccctagaaggggagggcatggaatcacaagccatagctacaagccacaaagcaaattcgtccggtggaagtaaatatagctagcccccaactacaagtcatcggatagttctcggcgcctaacagttgttaggctaatattagctagcttactccaccattgtcatgggccaccaaaatctcaggacaagtccgtgaaatatatagtttttccatctcacctctgtacggtcttcttttcttatctgctctgttgtaaatgtaagccgttatagcacttagtcacttgtcgcttatcttttttttgtcaaatgcccttgttaattaaattctaccactcatacgagacatcatttctatagagaagaatatttgagacattgtgaggcctcagcctgagatgtgcccgtcaaacaactcgaaggcggcgactaaatgtgttacacattcaggagacttgacaaaatggctagagatctacaacatctcaaatattcttaactcgtactcatgtgaatctagttcccaggatatgcactagattcacactttcatcttaagtatggttatacataacaaacacaaataagatgaaagcgattaaaatttgtaactactctagagatacataggccgaccagccaaataaatatatgagagaacagcggaagcttgactacccaatcctcaagcacactgactagggtttaccccattaagttcaagtcctagaagaagcaggcgaagcctaatttatagatttgattgagctatcataaactaatttatagatttgatgtggtatatcacaaagctaatttaacattgaacttaccttgaaactataaatttaagatatactataacaagagcacacatttagtgtaagttttatcacaaaactacaacgcttaattatattttgagctgaacactagaggtctaaactctatagatttatggtaactttgtcagtaaatctgtatttgtgtgatatttcaccttaaaaatatagtttcatcataaatttgctgctaagtatatacttgtgcaatatgattgcccttttatctattttacagatttactctattaaatatgtacgtaagagagaacacatgaaactcttctaagatcacttttagtgtatatgagaatgatttgacatcattttgaggagttttggtttggttattgttctttcttggtgccatgttgcaaaattatgatttgagggggttatagtacatatgaaaagtggttacccacttgaacaattggctttcttctcactatttgatgagtctattcctctccacccctcaatctattggtgccatgcatgctatcctaatttaattggtcttcctccatagctgtcctatccacgccttcataatagataggcctatatgcagtcatcgtgtttgggtggtcacccacatactcatctggtacaatagtccgatctttcccacttctgaccactcttgcccatgtttccaatctttttaaaatttgtcaccaatcttgtaaagttcatgtattggcttagcttcgttttaggcggaagggtttctaggagattttcctcgtggcttgttggcacatttggaaactgcgtattggaaagatttttcagaatattgatatttgatgcttggtggactgccttcagacataagattctcctacatatctataggatgaataaccccctacgacaaatagttgttgattggttacagcttttgtagttctttgatctttatttttgccttttatgtacgtatctctgtcaaactgttttattcccttcagttataaaaatcacactgttaggaaaggcgcctggcagttttccctttttttttctaaagttcatgctttattaatatacatagaatcagctagatttattttatgaaaaacacaaaattagatttgtcactgaacaagcggtttcataatattacaagcttaattattatattaaacatcaatatgaatctatatgaaaaataatagctaaagtcacacccatgaaaagtcaaaaacatccaaagattttgtatatggtaccgtgatcaaatagcctaatatgtaccaatggagattttggatatggtactgtgatcaaattgcctaatacatatatggagcgagtaatgattaattgccactactctaggtaatgttcatttctgactaagatatggattttaccccatttatgttagaatgttttttttcaaactgataaatatggtgtatttcgtgtgaaaacttcctatataaaaactgttgtaaaatatctgatatatattttttcaagttaaaaataattataacttaattaaccatgtgataatagttttctcattttatatacccgtagttaatcttcatccatcacctgttcaatccgatggctcgtatatttttgtgctcttccttaccgtaaaccttttccttttcctttttccatataatcttgacctataatctatatatgtacatcgagtatatttacataaaataatagcccccctaagaaatataaaataataatgagagcttaaatatatgtttggttgtcaggtctcgccagagctacctagcgaagaatccaattaaggcctcgtttagtttccacacaaaaattttatacactatcatattaaatatttgaatagatgtataaagtattaaatatagactaaaaaataactaattgcacatattgtgattaatttgcaaaacgaatcttttaagcctaattgctccataatttaacaatgtggtgctacagtaaacatttgctaatggcgattaattaggcttaataaattcgtctcgctgtttactgacggattctataaatattttttattagtgcccgaataccccacgcgataccctatataatacccgatgtgacacgcaaaaattttacacccctggatctgaacaccccctaagttttctttttactggataaacaccccctaagttgatgattaatttattatccatatgcatgttaccacatatagataggtcagcacaactggccttaattaaccttttttatttgttgttgtcgacacaagcagtcccctacatatataatttggccattagatttctacttatatttttatgaaaactaagaaaacatgcagtaaccttcttttatttgaaagcatttcacatgataaatcaaaaatatttttaactacgcctacacgcgtttggcattctagctaaaactatatccatttgtcggtgatatgggaccgggagtatcatgaccagaggcttgaggcagacgcaaccgcccacgtggcctggcaccttcggggacgtcgggcccgagggtgaggtgtccgccctcctcctgatttcccccgagggggggtcgggttgcgcttgccccggccccgagggccgaggcaccccgaccccttaaggaagtctgcgcgacatatatgggataagtgagcacagctgtgctcacctaacagcatttattgcagtctggtcaagcgtgtcacgctgcatgcagcgcagtatggcgcgttcctttatccggtctgtgaccagtcacagaccggtcagatcacgggttaggtggcgactggcggtctgacgcacgccttgccccgtcccgtcaagacgaaagcctctaggcactcgtctcaagccggagttaagcgcgttatctattagagatgacacgttagccccggacgatatatgccaggcttcatcctaaccattacaggcgagatgttgagtgaagaagggcaaacatgcacgttgccaagattacacgcggtggacaagaatgaccgatttgtgaccggtctgacactgatcatatcgtcagcgcacagccatgctcccacgacgcgctcacccccggcggaagtggaggtaggcgtgggctgtcccatcggagcgtcattcggacagcaaccgtgctgatctccgcccgttcaagagaaaaagaacagtccagtttggaaagagaagggtgcatgtggtatccccttgaagtataaaaggaggaccttgcccatagagaaggggctttttgattcttttccagattgtgagcttagaacgggggagaagtcagctcacacttgtagcccattcatacacagatccaccaaaacacaggagtagggtattacgcttctcagcggcccgaacctgtatagatcgccggtgtctcgtgtttctggctggcagacgatctttccacatacagagagagagcgagagcttgagatttcaccctaagcccccggccgaactggcaaaggggggcctgcgcggtctcccggtgaggagccaccagctccgtcatctggcgcgccaggtagggggctcagcgtgtgctttttgagctctcagactcttccgtgtgccccaagtttttcttgttcagcctaatggccgagcaaggaaaaacacacgacctctcgccgagtgtgagcggcgacgacggggagccgaatccgcgccgtcgagctcgtactcctccacctcctccgcgccaaagccctaagcagggggaggcgcttgagagggtcgacaaatccgcggcgtcaccagccgcaggtgatgcaggagaacggcgagatggggagcgtcgcctcctcgtctacggcgacggcagcacacctcagggtgcgcttcaggctgctggcgcgctcctacgacacccgcctgtcgtccatgacccggagtctccagcccaacgatggctggaagacgtggccaacttggtcatgacggcacagcagcgcctgggtgctggtggacggtccgccaccaccaccaagacctccggcgccgctaccaccggctccgtgtcatcaaggcggagggcgcggcgagcggcggcggctgcacgtcattcggctgccactccctcgtctacaccgtcgactcgggaggatcagcatggggagccggatgcccgcctcaacatcgggcgccggcgtaatagccggcgtactccccgtgcaacggagggagcctcctcgtccagagtgtcacctcgacatggacgtgaagatcagccctccgtgcccccggccggtggtgttggctgtagagcctttgtggcgagtcttcggaatgtccgttggcccccaaggttccggcccaccatcaccgagaagtatgatgggagtgtcaaccccaccgagtttctccaggtctatacgaccgggattgaggccgctgggggtgacgacagagtcatggcgaacttctttcccatggccctaaaaggacaggcgcggggttggctaatgaatctgccacccgcgtcggtccactcctgggaagatttgtgccaacagttcaccatgaacttccaaggcacatatccgcgcccaggcgaagaagcggacttgcatgcagtacagcgaggcgatgatgagtcgcttcgctcgtacattcagcggttttgccaagtccgcaacactataccatgcatccctgcacacgcggtgatctacgcgttcagggggggcgtgcggcacaaccgcatgctcgaaaagatcgcttccaaagagccccagactaccgcggagctttttcagctcgcggaccgagtggctcgtaaggaggaagcgtggacctggaactcctccggttccggagtggcagcttcggccgcccccggatccgccgctcagacagggcggcgtgacaggaggaggaagaagaggccggaccgttccggcgacgagggtcatgtcctcgccgtcgagggcgctccgcgggccactcgaaaggggaggcctgcgagcgacaaaaagaacggggctggtacacccagcagggagcgccccgccggcaggtggtgctccgtccacaacacctccctccacgatctcgcggactgtcgcgcagtcaaaaatttggctgagcgaacgaggaagtgggaggaggacaggaggcaggaacgccgcgaggacaagtccccggcggtcccatccggcaaacggcgaagtgaggccaagcagaaggcccccgctgttgacattgatgatggtgatgatgacctaggtttccaagaacctggggccaccattgccaccgtcgatggaggggcgtgtgctcacgtctctcgccggagcttcaaggctatgaagcgagagcttctggccatggcccctacccatgaggcgatgcgtcgggcgtggtggtcggaggttgctctcacttttgaccagaccgaccacccaccgtgcattgcccggggagggcaggttgcgatggtggtctcccccaccatctgcaacgtgaagttgggacgtgtcctcatagatggaggagcggctctcaacatcctttcccccgcggcctttgatgctatcaaggccccggggatggtgctccagccgtctcaaccgatcatcggtgtgacgccggggcacacgtggccattaggtcacatcgacctaccggtcaccttcggtggacccgccaacttccgcacggagcgggtgagcttcgatgtggcggacctcagtctgccctacaacgcggtcctggggagacccgcgttggtgaagttcatggcggcggtccactacgcctacctccggatgaagatgccgggccccggtggccccatctctgtccgtggcgaccttaaagtcgcgcttgcttgcatggagcagcgcgcggaccgcctcgctgctgcgtccaagcccgagggtggtgacgagaggcttggcccctctgcccccaccgccccgaggcagcggatggccacatgcgacgaggttccggtcaaggaggttgccttgggcgacggcccatccaagaccacacggatcggtggtcttctggatggcaaataggaagacgcgctcgtctccttcctgcgggcaaacgctgacgtcttcgcatggagaccagcggacatgcccggggtccccagggaggtgattgagcaccgtctcgccgtgcggccgggcgcaaggccggtctggcagaaagtgcggcggcaagccccggaacgtcaagccttcatccgcgaggaggtggctagacttttggaggccgggttcatccgtgaggtcatccatccggagtggctggcgaacccggtggtcgttcccaaggcgaacggcaagcttcggatgtgcatcgactacaccgaccttaacaaggcatgtcctaaggatccttaccccctgcctcgcatagatcagatcgtcgactccactgcggggtgcgaccttttgtgttttctagatgcatactctggttaccatcagattcgcatggctagggaggatgaggaaaaaactgcgttcattacccccgtaggaacctattgttatacatcaatgcccttcgggttaaagaatgcaggtcctacttttcagcgtactactcgaatttctttgggtagccaaataggacgtaatgttgaggcgtatgtcgatgacttggttgtaaaaacgtgcaaccaagaaactttactttcagatctagcggaaacttttgagaatctccgctccgcccgcataaaactgaaccccgataagtgtgtgtttggtgtacctgcgggcaagcttctcgggttcttggtctctgcccgaggcattgaggccaaccccgagaagattcgagctatcgagcggatgcgcccccccagcaaacttagggacgtgcaatgcgtcaccggttgcatggccgccctaagtcgtttcatatcaaggctgggagagaaggcgctacccttgtttaagctcctcaagcgctcggggccgttcacttggacggaggaagctgaacatgcccttactcagttaaaggcatatctcagctctcccccggttctagtcgccccggagccaaatgagcccctgctactttatttagcagcgaccccccaagtagttagtgcagcgttggttgtggagcgcgatgaggacaatcctcattctgcgcacccccactctgtgccgacttggcccgggagcaggcagggaggagaggcccccgagtcgaacggtggcctaaggcccccgacgaccggagtcggccctccgcccgcttgtcagacggtgtcgggtgcccccgaccctcaggaaggccccgaggccactgcggggaggccgcacctatcaccctctgaccccgaggctaaccctgtaccgattcgacccgggagagagcagggagaagaggcccccgagccgaacggtggcctaaggcccctgacgaccggagttggccctttgcccgcttgtccgatgacaccaggagcccccaacccccaggacggtcccgaggccactgtgggaaggccgctcctgtcgtcttccgaccccgaggtcatcggcacagaagacgggtgcgccccgaggggccactcggacgaagaacgccccgggggtgcggcccctagcgaagaagatcggcctcgccgaaaggtgcagcggcctgtctactttgttagtgaggccctccgggacgccaagacccgatacccacaggcccagaagatgctttacgctattctgatggcctcgaggaaactgcgccattatttccaggcgcatcgggtcgctgtggttacgtcttaccccctcggtcaaatcttgcataatcgagagggtacaggacgagtggtaaaatgggcaatcgagctttccgagttcgatctgcactttgaaccacgccacgctatcaagagccaggccctcgccgattttgtggcagagtggaccccggctccagagaccgtctcaatacccgaggccagcacgaacccctcacagctgcctcaaaccgcccactgggtgatgcagtttgacggttctctgtctcttcagggcgccggtgcaggggtcacgttgacctctccgaacggagacgtcctcagatatttggtccgtctcgacttccgagcgactaacaatatggcagagtacgagggactccttgccggactcagagtggcggctggactggggatccgccgcctcttggtattaggcgactcccagctagtcgttaaccaggtctgtaaggagtaccggtgctctgacccacagatggacgcctacgtacgccaagtgcggcgtatggagcgccatttcgacgggatagagcttcggcatgtacccagaagggacaacatgatagccgacgaactctcaaggctcgcgtcctcgcgagcccagaccccaccgggcgcctttgaagaaaggcttacccagccgtcggcgcgacccgacccctcaggggagacggatgcgcctgaccggcacccgaggcccgtcggagtccaggcctcgggacccgaagagagcgttccaagctcccttagattgattgcttggatctctgagatccaaacatacctcacagataagactctacctgaggaccgcgaagggagtgaacgcgtacaacgcatttccaaacgctatgtgctgatagaagggaccctctatcggcgcgcggctaacggaatcctcctgaagtgcattcctcaggaacaaggcgttgagcttcttgttgacatccatgagggcgagtgcggagcccattccgcctcgcgcaccctggttggcaaggcctttcgtcaaggattttattggccgacagctctcaatgacgcagtcgatctggtccggcgatgcagagcgtgtcagttccacgccaagcaaatccatcagccggcccaggccctgcagatcataccactgtcgtggccatttgctgtctgggggcttgatatcctgggaccgttcaaacgggccccaggcgggtttgagtatctgtatgttgcgatcgacaagttcactaagtggcccgaggcttatccggttgtcaagatcgataagcactctgctcttaaattcattaagggtatcacggcccgttttggagtacctaaccgtattattacggataatggcacccaattcactagtgaactcttcggcgactactgtgaagacatgggcatcaagctctgcttcgcctcacctgcccaccccagaagcaatggccaagtggagcgcgccaatgcagaaatcctcaaaggccttaaaaccaagaccttcaatattctcaagaagcacggcgattcatggatcgaggagttgccagcggtgctctgggcgaaccgaaccacaccaagccgagcgaccggggaaacgcctttcttcctcgtctacggcgcagaagcggttctcccatctgagctcaccctgaggtctcctcgggccaccatgtactgcgaggctgatcaagatcagcttcgtagagatgacctcgactacttggaagagcgaaggcggcgcgcggccctccgagctgcgcgctaccagcagagcctgcggcgctaccatcagcgccacgtccgggcccgatcactctgcgtcgacgacctcgtcctacgccgcgtccaaacgcgtgctggattgagcaaactctcaccaatgtgggagggtccgtatcgagtgatcggtgtcccccggccgggctcggtacggctggccacgggcgacggcacggagctgccaaacccgtggaacatcgaacaccttcgtcgcttctacccctgaagggggggggtcgggtgtcaggtttcggctcgggctaaccccgcaccccccctcgggtgtgcagggttagccgggggctaccacacatgcacatatattcctttcagcatttcaataaaagcagtttcaatttcctaaaggttgtgtctgtgccgtttttttttccttttgaagaatcttgacttgaaataatgtcactcgtactcaaccttgccctcgggggctcggttcggtcggctaaaatcgccaaacggggcccagaaccgagccgtgccccggggcgtggtgaactccgggggggaatcggcaaaaacccacaatcgggtcacccatacccctcggtcaccacgttcccggcctggccagtctcgacatgtggatctccccaggcactagccccgacccgagccattcgaggaccgggacttgggcgcgagcccttatttcaagctaaggcgcaaaaggaccatggcacagatcatcctcaactcatatatatagcaaaataaaactaacacaaaaatttttcatcatttctcattgcagattaagttagattgtacaaaaaagaggcatgaaggccttagaagaaagaacaagaaaaaagttaagagtggcgggggcctgggggctcattcatatgcgcccgggtcgccggcctcgtcgccaccgccgtcctcgctgctggtgtcgccttcctcgtcggagctgggggcgaacgcgagccgaggggccgagccctcgaagccattgacgatgtggtcagcagcatccccgacccgcacgcgcgcctcgtcctcggtcccgggagggaactcctccagcgccatccatggggagaagttgggatcccgggcctggtaacttgccagcacgagttcgaccgccccccgggcgaggtccctcgaggatgccttaatggtcttctcaagctcctcggggagtcgttcgagaacccaggccatcctgttgaggtgcggagcgaggccttccagattggtggggggcaccgtcgtctggcctccccagaggcctgcttgccgaccggcgcgcttcatgcgggagaccgcgtcccaaagcatgccgggcccaatctcgcccgccaagcgaagggcctcggcctccccagtggaggagtccagcgcgcgctgcatgtcagcgacggtgtgttcggcagccgcgaggcgagcggctaagtcgctttcgcccgcagccgccccaccgatgcgcgcccccgcggccagctctttctcccgtgcctcgaggttggcagcccgctgctccagcgcggctctctcggcacggacgctttcaaggttgcggcgcgcctgctcctcttgcgccgcctcgcggagggagaggctgtccgccagccgtcgcgtcgtggcctcggcctcctcgagagcccgctcccgctcggcgagtgcatcctcgcgaaggcggagcgcggactcctcctcggcgcaggcggcctcgtgcgccaccagcgtcgcctcccggagagcagtggcggcctcgcggtccatcaagcccctctccacggcgccggcatgttcttccagcgccatggcacgggcctcaagggcctcctcgcgccgccgggacgccgcttcggcttccgttgcccgccgctctcgggcggcggcggagtcgagaaccccttgggcggcgtcgagcttgctcttcagctccgcctcccagcttgcgtgctgaagacggagggtgtcttgcgcctcgaccatcgcggtggtggcgacgagggcggcctctcgctcctcctccacctctcgggcgatctccgccagcgccgccttgcgggcttcgagctccgagatgtggcggcgatgggccttacggcccacctccaccatggcgtccaccgagcgccgcccctcctcgacgcgcgcccatgcggcctcgagctccgctcgttctgcacgcagggcctccacctgggtgttgaacccatccagcaccgcggtgtttgcggcggccaaggcctgcataatgggctcggcgctcaccggggcgacggaagatgaggaaaaaagccgccttggagaaaaggcgacgcggcttggccccccggaggatacgctgagctcggggatgtcccccgggcccgttcggtcctgggcgtcgcccggtgaggtaggcccaggcgatgcgcccgcggcctcgtcgcgagccgcctcggaggatgtcgcctgagggccgcccgagggagtgggcccaagtgacgctgtcgcctcagcctggcgagcccgggcggcctcctcccgagcagcttcctccgcttggcgaacccgggcggcctcccgggcggcctcttcagcttcccgaaggcgggctgcggcttcacgccggtcagactcccgccttcgctcctctgcggccgctggatcttcggcctcggactggccggacttggggtggcgggaggaatgcgacgggacatcgctgaagcagaagaaaaaaccagaaggcgaacaaaatgagcaagaaaaaacttctttttggagaaagatggttgcaatgagagtgagacgaacctgcgagggggtcggttgaatgaccaccttggaggggaaattaagtttccccgggctggttccgtctcccccatcttgcggaggcgcttcttcttgcgctccccctcgggctgtgacgtcggcgcggccccctccgggcgccgaccgctggtacgcaccgccccgccccctcggggaggagatgggggaggtgttcctcccagcttcctcttccccggggcgtcggcaggacggctgctccccgagcccccgacgcggggcccagaagcacgaccccctcctggggcagatcgtttcccccggcggctctcgcccgcgccatcgtggcccttaggggctctctcctctgaggccccaacccccagcataatggatagaatggagacgcggtcgggatcgatgcagagggggaggatctcctgaggaaggcgagacgcctccgcggagctaagattaagcaccctttggactacgatcttgaagtcctcaggagcccaatcccatctggttccctgatgggtccgcatgtaatcttcaggcccagtgtactcccaggcgctccgggcgcgccgttggagcggcgcaatccggcgacggaggtaatcgccgtacaccatggccccggtgagcccctgggatcgcaggcccgccaggcggtcgaggacggcgtcgtactcctcccccagatctgccggcgcccgccagctggagacctgcgccgggggctggcttggaaggcggaggcgcgcttcgtcggcgaggggggtgtagaaccagtcgctcttccagtcgtcccacttcttgcggaggacgcaggggatgtagcggttcaacaccggcccccgcggctggaagtagcagccgccaaccaccgatggcggtgacaccgactgcacggtgaagaaccaccggaacagctgaagagaggggcgcaccccaatgaacatctcgcacaggtgtgcgaagatggccaatgtcatcaccgcattgggggtgaggtgcgccatctggagatcgtagaactccaggacatccatgaagaaatgagaaaatggcgggaccagcccagccattgcgaaggggaggaagaagatggaccgccccgggtagtctggtgccgggcgcccctcgcccagcatcactatctcccgaccggtggtggactccggcatgaagcggcgcggcagtccggcgtgcctctcattcacgatgcgggaaggcggcagtacactgccgtcgagcagagcagagccccgtgccatggcggtggaggaagagatgattgggaacgagcgcgtgtggcgaaagtagggcgtggcagagaaagagttagagctcaggcagcgaaggcaagaggaacaatggcgaaaggaagggagcaaatccttttctcgatgcttttatacccttgccatcgctgggcctggctcctcgtttctcgcgcccactacctcgctccctcgtatctcgctatctcgctccctcgtttcccgtgcccacgcttccactaatcccattcgcccgcttacggcgcttgaagtggatgtgcagttgtggcaatcgaaacggattgtatcgtgcgcgcgttaattacgctcgccaaccgaagcggcgttaccgtatctccgggcgagacaaatctgctcacccagattcgcgcgctgctcaagtggtgtggcagtcttgaatagaccgcccattatggacaaccaaagttaccaataccaatgtgcgtgaattgagaccgttgggtattttgcccaactacggaaaccggtcccacctgtcacagggtggcgtcacacctgaccgcttcccttgggaagggaaattgctctggcataacgccgggggctactgtcggtgatatgggaccgggagtatcatgaccagaggcttgaggcagacgcaaccgcccacgtggcctggcaccttcggggacgtcgggcccgagggtgaggtgtccgccctcctcctgatttcccccgagggggggtcgggttgcgcttgccccggccccgagggccgaggcaccccgaccccttaaggaaggctgcgcgacatatatgggataagtgagcacagctgt

SEQ ID NO: 24959 - DNA, 13750 bp, Oryza sativa
agcgggatagacgaacgcgccacgccgcatttaatgcggcgcagcgcatgcttatccggtccgtgaccagtcgcggtatgtgactggtcacagaccggtcagatcgcgggttaggtggcaacaggcggcctgtcgcacgcctcgccccgtcccgtcggaatgatgagagcttcctggctctcgtccctagccggagccggcgtgctaactcctggagttggtatgtcagtcccggtcagatccattccagacttcggcgcaagcatggcaaggaagtcgctggccattgaatgaaagttgaaacgggcgtccaccgagagagctgatgagcggagcagaagatgtgcgctgtgcttgtcagaggtcacttccggctgtagactagccctctttgtaaaaagtgtgtttcctttcttaggcagctagaggcccatgtggtgacccctgactagataaaaaggaggcccaggcctaagagagagggggttttttggggggactctgggagattgcagagcctgaactctctctcgttctcgagctctgtattccttcacacacagatccaccagaacacaggagtagggtgttacgcttctcagcggcccgaacctgtctacgtcgcccgtgtcttgcgcgcttcctctctcgctgacattcctcagatcgagggcgaagaatctcacttagcgcccccggccgaactggcaaaggggggcctgcgcggtctcccggtgaggagccccacgctccgtcaccattgattttttgtccaacgtttgaccattcattttattaaaacaaatttatgtaattatcatttattttattatgacttgattcgtcatcaattattctttaagcatgacataaatattttcatatttgctcaaaaattttgaataaaacgaatggtcaaacattggtcgaaaagtcaacggcgtaatacattaaaatattaaaatatggagggattattatgcaactatattggaacaggggtgcaaaccatattgggatgaagggagtatatatcattctgtgtgaaaatgcatgaaatctgcaaaccatttttctttcaatcaacaagattcttatcgatcgagtactacgtgcgtaaggtacgtacattttgctgaagtactctcgtggaagagctagctagctcacttttcatgcaacaattcattaacggccatattacagtggtcaacaattcattaacatgccttgcagaggcttactccaagttgctctgcataggaaggccaataatttctttggtacctaaagtggtggcgtgaggtacattacattgtcgacaaatcgtaaatacgtacgtaacccactatcttaaataagtaaattttgtcctaaatagtactatgagttccaggcaatggtgccgtcttatgtgatggtcatacaggacacactaactatctcgatcttatcttatcctatatggctagataacgtcgcacatttcaattttggaacaataactgataaatcttaaaaaatatttgcaatttaattaggtggtcgaaccaaatatatatatacacggtcgtacctcacaaactagacacaagtcgagtgtttctttcgcaaaatacatttgcatatactgtatatatgcgactcaaactagggatgataattttgggcatgggtccgggtatccgtggatacctgacccaatgggcacggatgtgagtgtgatttttacctatgggtaacccatgcccaacccaccgatacatatgtattagttaatttcgacttatctcttaattcttatacccctttctcttggttctttttttatataagttgtgatgtaattcaaattatagttgataactgataatttggtaaattattaattttacttctctttgttaaattatctatctttcgagttattattcatgtgagatccattggatacccaccgagcattcccgtgcccgtcgggtatgggtacgtgcacaaagttttgacagctaaccctagtgggtagggttcaggagggcgacgacaggcatgcggtcgggcattgttttgctctacccgtgtccgacccgacctgttgctatccctgactcaaacctggaactccctcatcacacgtcatcttgccatcttatgtatacgtcatcttgccatcttatgtatagagcaatgttagcatgaaataatttattttgcttccgcgatctttttgtccgaaactctttttgtccgaaacttgtgacaatagggaggcatctaaatgactttaaaaaaaatggtaaatataataattataaattttatctccatcaaaattaagataaatacttgaaggcaaattctactacatgatagagtgacttcacggtttagttgtaggacaccatacgaagtgacttcttgtgggaatccggaagacactacgtaagtgtgaaaattagctaatggatagcatgctgattaagatattcatttctggttaaataagggaaagaaagctgcacgaaagtttggagatacccttgggccacttgtcaattctcccatcatcacatatctagtttaattatagtttggcattagtagagaaataacttttgcatatggtcaaaaggcattttcacaggtggacgcttgactcccttgccccagatgtatatgaaatttaaaatttttccaggcaggcagccacgcaccacatgcgaaaacaggattttcatatatgaagcattaacccacccatatgcaatatctaaattaggaaaaaaaaaccaaaatccaaaaaacccaaaaccctagctcccattcccatccctcttagctcactgccgcccaccgtcgccatcgccccttccggggccgagggcagcgctgccggattatgtagccacactgtaccaccacaattactgaggatttttccgaaagaaaaaaaatgaatagaagatgctctctaaggggttaaaaaaatgaataaccgatttaattaattaccatcgatatatcagcaataatagtcgcagctttgaccagtaactggagctcattcatatggaaacccacgaatgctaaattaagttacatagacatgacttaattcccactaaatcaaggatgtttccttgctaatggaaatgatcgagtagctgactttgctatacattgaccaataatcacagctccaacttgaaaaggctaatgcatggtacagtgtttcttgaggagaaatgaacagttgccgacttgccatcaattgatcaataaccacgacattcaactgagttgaaaagactaaattaagttatatataccaataatcaaaattgaattgaatgcattattctaggagaaatggatgattgtatatttacacaaattattgtatggaaattgttagttttctagtgaccgtgatgatgagctggatttcctcaaatcttagccacctgaatctaatgcccagggagtcatctttaagcttcggatgggaaggagacgaaatggaggagagtaatacaagtcaccagcgacgacttcctagtagcaacaacagtgccggaagtatatatatggtagagaacttacagtttagggtttcggggtgtttttgccgcccaaggggaggggacactagaatggataccctcatctcaatcagacggtaagccccatctcaatcgggcatggcgtccgtcacaggttagaaatcactgatgtgaagagctatctcaatcggacaaacggccgtcacggatgattctatctcaatcgggccctaagtaaagcccgtcaccgatagctttgacccagacgaccagtcaaactatagcccgtcacagatgacctatcttaatcgggccacagacgaccagtcaaactatagcccgtcacagatgacctatctcaatcggaccacaactagcgcccgtcagtcatctgtgacgggcataaattttgtttttttggctagccctcactcgtgtgcacccacttcccagtcggtcacccatcccgaaattgctccagaccaagcacacttaacatcaaagttctttggagattggcttctggaagtgtagttgtaacatgttagtatgagtattctattaatcctattatgccctaggccaggatgtcaaattggggttattaaatgatttcaaatggaaaagtcaccaaaaccaaagttgtagaactcatcgaggtgcaaaatttttatttttgtcatttctccatctgactctatttaaacaatttgaaatttgaaattcaaagtttgaaaagttcaaatagaattttagatcagtgaacgactccaactgaaaaagtcatcaacaacaaaattgtataactcatcaaaatctataacttttattttggccatttttctatataacattttttgaaccgtttgaatttgaatttgaaaatatgacaacttcaaacaacattttcaaatactaaatgatatcaactgaaaaagtcatcaacaacaaagttgaataactcatcaagatctaaaacttttattttggtcatttcttcatacgacaaagtgatagtaacattgttcacaaaattgacatatctcttatctggttctatacactataacacatatatgtaaaatttgtgaataatattaataacgtttcgtcggatgaagaaataacaaaaataaaagttttagaccttgatgagttattcaactttgttgttgatgactttttcagttgatatcatttagtatttaaaaatgttgtttgaagttgtcatatttttaaattcaaattgaaactgttcaaaaaaaagttatattgaaaaatgaccaaactaaaatttgtaaatattgataagttatacaactttgttgttgacattttttccatttgaaatcatttactacccgtaaaattattttgacttataaaatgaattattatacggcactaaattattttgctatagtcaacttacaaatataaacatttcatatgaaaatagaaaatagtcatcggtgacgggttttagttaatgcccgatagagattaagtatatagcccatcactgatgagtcatctgtgacgggcctagttgttatctcaaacgggcctcaagttggtgcacgtcacagatgatggtcattgtgacgggccacaacttgaggcccgtttgagatatggaatgttatctcaatcgggtctaaagttgtggtccgtcactgataggtgtcatccgtgatgggcttaagttttatgcccatctaacatgtctatgcgaccatatctcaatcggacacttttcggcccgattgagatgacttccttgtgacggcccgctatttctaagcatattagagcccgtcacagatagaaggatctgtactagtgggaggagaatttctctaggcttagatcgatgtccgttagtcgtattccttatgtatctattatgttataaagataactagctcttcaatgatatgagccacaaattaagttcacccgagagactagaaaatctcatattaattaacttaagaatgattttttttaccattaaatcatagtgggcctaaattattgaggtgtagattggtcgataattgtataccatccaacaattttatttttaaatatatcgtagacacaaattaccactgtacgcatagaaacataaagagccttctatttttaaaatatataatattgtgtacaaattaaattgtatgcatggacaaaaaattaagactccaacactattcagtttcatataaaaaccataattgtatttatagaaaaaaaggattatgaataaaatccaatttctaccttttatcaagctctgctaatcctatcttcctatatagttggcacccactaaaaggcatttactcctataaaacaaaccatgcaagaagccacatcatcaataattctaagccatcggatcgtatcctatcttattataaaattatcctacactaactccttaaacttaacatgcaaagatgccacatcatcatcgccacatcaccatccactaattaacaagatgccacatatcatccactaacaatcatcacatttaaacatcatgcaagcatactatatctttatagtttttataatttaagagcttttcaaatacaaacatatgaaattatcatccaacataattcacataatgtttcaatgtatatttttattatgttttatgatatcctatatacttatatagttcatcctcacttagttagtgcttaaatgattaatctatagtccaaattatctttctccttttttcctctaattaagtcatatcacatcaattgtttttagcctttagatgattaatctacggtccaaactatctccctacttttcttcttccataaagtcataccaccttactttttacgtttgaatcatcattctacatactatttatatttaaattatcataaaccacattaatttacttaatctgatgttatctagctatcttacacgttattttttttattgttatcgtactaaattcccgcagcaatgcacggggtttcacctagttagtacatagttatcagccgttggataaagaagctactcatccatctaatttaatcattgattacttatccagtcacctccctttagctcataatcgcgcgtgacattgttatccattttgcgcataatactatgttttcccctcccaagtcctccgagataatgcaaattaacttatctttttttaatacaactcaaattattgtataagatgtgagttttgttttgttataaataattggataacataaggtaattagacatcattaacctaaacctatttttgaaacaaccttgagataaagcaaagaggtgcagactactctaattatgacgatatccaaattgtgcatgaaaataactttcgtgcatcataaaaaaacacaatgacatttaaaaaaataaaacatgaattgcattgtaatagcagaggcggctatatatgaagccatattatcatttattttgtatatatacagagttacatctaatcatttaaaacattgattttatttgacgataaaactagcaaatcccacggcaaggcgcggggtgccaactagttattgtatataattaaacaattaatggttgcggctttcggcaggcacacaacaggccaactggggagggctacttgaggtgatgaatgatcttagctacaaatgcacttaccatcattcctatttggtttaggactgcaagcatcaatcatttatgtatttttattcgaaacaaaaaccatttcataatcttcaagagagatgtaatggattaatacgattgatgcaaaacaaactgatttcaaagattgctaccttaagaaatagcctgtgaaaaacgtattttaatgtgcatccagcttcttaatccgcatgtgtaaaaaattttcacgggcattttgtttggtcgttctgtaaaaatatctgaactctcaactagaattgaagcagatcagaaagcgctcatacaaacaggttaattatcagccgtctgtaaaaaataattaccagcagataagaaagcgctcatccacggcagattgatccactgcctcgcaaacttcggtcgtcgggatcgaagaagacgagggagagagggaggagaagcggcgggatccgcgagtagaccgcagccaccaacgtccccatcgctgcagtcacgccacgccatcaccgtagccgtagccatagccgttaccgagggcggcggatccagcactcccgagggcggcgccaccggatccgctgcccgccgtcgccgctcagtcccaccgccaccacctgccgcttccgaggtcgagggcggcggatccgcaagctgccgccactagctccagaggtcggtggcgggtgcatccgcccgctgcccgccaccgcccactgccgcccgccgccgccgctcccgaggttggggtcggtggatccgcgcgtcgatgtcgccaccgaggacggaggcggcgcagtggggggagagaggcggcgcggtgggggggggggagagagaaggtacggatgattggaaagcggaggcagcgcggtggggagagaggcggcggcagcgcagtgaatgggagcgaggcgacgtgcctggtctagggttagggtctaggcgcggtgaattgaagtgcgaggcgaggcttttttccgtggatattttccagcatttttcttttcgtttgtaggtacaaaacattgctgacagataatcaatcactaagttttgctgacatataattggtttctacttataatattgctgacagatattttgatcaaaaaatatttagatttgctgacatataacatgtcatattacatagtattgccaacatataatttaccaaaaacctttactaccaaatagtctaacaataattttttatttttaccggcaatataatttaccaaaaacctttactaccaaatagtctaacaataattgtttatttttaccgacagatgtccgttggcaatcttgtgtcatggtgtagtgtagctagttgtatacatacaatgctttactttgctatatatcgatcgatcaacagttgcggcttaacacattcaagcatccaggcacacgcacgtacgtactatacacacggacacacctctgtctagcactgggcacacatatctgaagataactgagaaaaaccaattaaattaagtacacctagttctgtctatcttaacgccgtgtacgtacgtatctgcttaattataataagagattaagagtgatcagagacgcaaccagtaagtacgttgtgccgcttgtgctccatccatgctgtacgtacgcatagcacgtacaataatagttccaacttgacatgcatgaacgaacacgtagctagctaccttgctggcccctgtataaatacccctatataccctagctctaccagccagccaaacagtagcaacatgagttcagctcgccgcctcctcctcctcgccggcgccgctgccgccatcgcactcctgctctcggccactgccccggtggccggagccgaggacgacggctacagctacatccctggctcgcccagggggccgcagaactggggcagcctgaaaccggaatgggccacctgcagcagcggtaagatgcagtcgccaatcaacctcggcctcctcgacctcaccttggctcccggcctcggcaacctcaactacacctacaagaacgccaacgcctccgtcgtcaaccgtggccacgacatcatggttaggtttgacggcgacgctggtagcctaaagataaatggcacggcgtaccagctccggcaaatgcactggcatacgccgtcggagcacaccatcgatggccggaggtatgacatggagctacatatggtgcacctcaatgcccagaaccaggccgccgtcattggcatcctctacaccatcggcaccaccccggacgagtttctgcaaaaggtctgttaaatacataattcacatagtttgcacacatggctaatgcttctaagaaaaatcaaaatctgtaactttttacagtaacaactaaactagcaatatatatttttattgtcaagctagtatttgttgttattaggttcatatttgaagaactacacatgatgttgaataattcaccgttattgatgatatactaattgttttaacttattagagacgacatagaaaactaatatgtcttatattgtagaacaaaggaagcactgataatatcatcaatggtttgtcatgtctattttaatgtgatagtttggagcaactgatgaccaagatagatatattgtttctttaaccatcacaaacagattattacacatgtatattcttgctatgctgaacttcttgttgcatgcagatggagccttatataattgcgatatcaaaccaagaaggtaaagagaagatggtcgttggtggggcggatccaaatgtagccaagggaaaggataccgtgtactatcgctacatgggctcctttaccacaccaccttgcacggagggggtcatctggaccgttgtcaggaaggtacgtatgtatatcataagtaggttaatttcacattttaaaactattttgttgtttctttttgtcaagaattaatctttaaacaggatactataagttaccatatttagtttcttagtgacgacttactaaaatcttaaatataggagaaatactaaatatctaatagtattctaaataaatagtgtttatggtaaggtctacgagcacaaataagtaataaattggtatccaaggaacaacctactcaacggtagcttctacctgtctagctctcagcgagtacaactttcaagctctcagcaaggaacaacctacacaagttttttggtttcatctgccaaggcctagcttgtataaatttaacccagtttcaatctcttgccacctttaatcctacatatcaccctattaaagctgtaaacaatctataacatgaagcactaggaatgtgctaaggcgaccacattcagttttagttggtgagggaagttcttttagttatgtacttatgttcctatgctatctgtctcttttcttcttcaggtgcacaccgtgtcactgtcccaaatcacacttctcaaggcagctgtgctcatggtaagtgaaaaagtcgttcatgtttaatactctcttcgtctctaaatatttgacgccgttgattttttaaaacatgtttgattgttcgtcctattcaaaaacttttgtaaaatatgtaaaattatatgtatacataaaagtatatttaacaatgaatcaaatgataggaaaataattattaattacttaaatttattgaataagacgaacggtcaaacatatttaaaaaagtcaataacgtcaaatatttagggacggagggagtatctattaatagatgacaatgaacaattatttcgtttgttcttacttgatgatctgcctatgtgcatacatgcagggtaatgagaacaacgcgagacccctccaggatgtgaacaacagggagattgacctgttctttcctcttcctctgatcaataactgaacgacatgcttgacctacacagttgatttacaacgtatcgcctgacacacgcgcatggagaatcatcaaacatatatgtacttataaatatatagtattactcatgtttgtgtaaatctcatcatcatggtgtcactatatatatatatatatatatatatatatatatgtgtgtgtaagtccattgttagtcttgatcacctagcttcataaagagaggagcatatatatgtcgttcaatcatatttgcatagcataataatgcatgcatagtttttatatgtatctctttccggtgctgctatgtatctctatacgattaaataaaaataccaatgttttataattatgtaaatcatcatattcatcttcatagcataaaaagtatgttgataaggatttggccatggcccatggagtaggccaacttaatatatagtactatccagctggaattgtgctatggtaaacttaaaattagaaaaattatttgtgtatacctgatcgtattggccatatcttttttttcagggaatgtcatatcccttttttatacatgataaccttatctttaatgagtggttaaattaaccatacttcatggtgtttggaggaatgagctgttagagatgtataaaccctgccccgtcagtcatgtgtttccatagcataacatctggaatgatttgttattgcgagatatggtgaatggcatatgtaatgtgtcatttattatgaaccgtttatagatgagtcttcatctataatagcttataaatatgacatgttagagatgagttcttctctctaattggcctggtttttaaccgttacatcgatgattaatacctgatccgttcaaatgttaatgtccagcccacatggccttctctctctctctctctctctctggactagctacatctcagctagctatggccgccgccttgcgttgtgcttagttacatttctaagtgcacaattgactccaatattgtcctcactttttgttgactttgttcatgcctacaacttaacccttttaccatgtgcgtgctctcttattggtctcaccctttgaatgtcctatacgtgccttcctaaaaggtaagcttgtatgtaggccaccttgtccacaagatcacttaattgatcctagtacaattgtctagtatttcttattacctcttatctcttttgtcaatatcgttgatctttctaaatattatgttgccattctttctaatgatcttgatttagtttatgaaaacacataattagatttttcactcaaaaatctggtttcataaaactacaagcttatataaaaaatgtcaatgttatggattaggtatatatcctatacttagattcgtagctaccataaataccgcataccgaatatcaaacagaaaagtatatttaaatatggtataagaatgaaaactccttccataggaatagaggttgtcggagtctgatacggaaaaggcaaggtcttatctacctgcattctacaagggctatccgacttttacttggagaggaagttgcctacatgcataaatacaatgttccctagaagaggagggcatggaatcacaagccatagctacaagccacaaagcagatccgtccagagaaagtcaatagctagcccctgactataagtcatcggatagttctcggcaaagatcaattggtaggctagattagctaacttactccactattgttatatgtgagagacatttcataactatacatataaattagattagtgctattacccatgtcgggggcctgaaccagtataaaaatctattatcttccatcttctttaccgcaatctcgcgtatatctacgtaccaacgatccccatactctatatttaaataccgcaggcggctatagcccatcgacaaaaaagtcaacctcaaagtcacatctcaaaccatgaaaagtcaaaacattgcaaattttttggtatattagtcacatagcctaattaatgtatttttggagtgagtaatgattacttgccactgttagcaacttagcaccttaattatctccatgtacaatgatcaaatggttcgtgtattttcatggttagccttactataactttttccttctgccatctaattttgaccgacaccgacgtatccatatatgtgcatcctatctctactattagaaaaattgaagttgtttttgccgatattttggtacgtcatccgtgtatgagtcggtttctaagttcgtttgcttttggaaatacacattcgtatttgggtcggtttttaagatccttcaatttttagtaatacagaaggaattatataatatatctgtcaaaaaaaactcgcatgctaactagatgatcggacttctaactatagctcatgatttttctatatatatatatatatatatatatatatatatatatatatatatatatatatatatatatatatatatatatatatacacacatatacatatatacatacacatatacacatatacatatatatacatatacacatatacacatatatatatatatatatgtatatatatatat

SEQ ID NO: 24960 - DNA, 524 bp, Oryza sativa
  unsure (1)..(524): unsure at all n locations
cggcggcataatatgccagccgtgtaggcggaggcaccactcggcggcgacggaggcaggccggcggtgaagtcgtagacgcccaacagcggcggcataataggccagccgtgtaggcggaggcaccaatcggcggcgacggaggcaggccggcggtgaagtcgtagacgcccaacagcggcggcataataggccagccgtgtaggcggaggcaccaatcggcggcgacggaggcaggccggcggtgaagacgatatcgccatangcaacggcagcggcgcacaccaaccgtggaggcgatgaaaccaatcggcagcaacgaaggcggccggcggtacatgtataaaataatagattaaataataattagtgacatgtgaattaattctaatttatataagaaaatttagaacgataaacctgatttgtgtttgtcacccaactcttaatgatgcatgtacgtcatcggctttacatgtatcaacctggtcagccttgacgttcatcgttgactgcatctgact

SEQ ID NO: 24961 - DNA, 933 bp, Oryza sativa
cttctttgttaattccctgcatcatacccctattccggtatgacttgctgagtacagtgggtagtactcagtcttgctctacttttcccaaccccagaggacgggtatgtgtcagatgaaggtttccccgaggagtaggcttcgtccgtgccgtcgaggatgcctgtggagtggtgttcccgctgcagtttagtcagggcttagctccagttaccttttgttttccgctgcatttttgtaagacttttatgacgtttgtaagacgtggatctgaatgtcaacattgtcgtttgtgtaccccggctggtcctggacggggattttaatgcacattctgcttggaattctattcgggaatttctgggcgtgacaatcggcccggccgccacggtggcacaatgtcagcgccagtcccgttggcgctgacacggccaacctcagcgccaatgcgcttggcgctgagccgacggcctagttttggttgaagtttttggcaggggttagtttcgaaataagtttttgaaaagggtcaatttgtcaaaaaaaacggttcttactagacataactctagaatgagcgtataatggtgtaaataataaaaatattatgatctatcatgtgaaaatgatattaatatttttttcatatgaagaaatggtattgaaccatatatagttttactagttctcctaaacatataagaagaaaaatctaacaaaatatataagtaacgggtattgataacaacaagcaaaaaaaaggttatgtttggatgtaaaaaaaggttaggaagcggtaacatgcaaggataatactcaacttagttggattcttcgctacctgtcacttggcggccatacaacatatatcataccatatactttagttttcaattcaacatttaatatatttaaatatactgaaaaaatgcc

SEQ ID NO: 24962 - DNA, 1015 bp, Oryza sativa
cgacttcaccgccggcctgcctccgtcggcgccgagtggtgcctccgcctacacgactggcctattatgccgctgctgttgggcgtctacgacttcaccgccggcctgcctccgtcgccgccgattggtgcctccgcctacacggctggcctattatgccgccgctgttgggcgtttacgacttcaccgccggcctgtctccgtcgccgccgactggtgtcctcgcctatacggttggttggtcacaccaccgttcatgggcgtccacgtcttcaccacgggcctgcctccgtcgccgccgattggtgtctccgcctacacggctggcctattatgccgccgctgttgggcgtctacgacttcaccgccggcttgcctccgtcgccgccgagtggtgcctccgcctacacggctggcctattatgccgccgctgttgggcgtctacgacttcaccgccggcctgcctccgtcgccgccgagtggtgcctccgcctacacggctggcctattatgccgctgctgttgggcgtttacgacttcaccgccggcctgcctccgtcgccgccgactggtgccctcgcctatacggctggttggtcataccaccgttcatgggcgtccacgtcttcaccaccggcctgcctccgtcgccgccgagtggtgcctccgcctacacggctggcctattatgccgctgctgttgggcgtctacgtcttcaccgccgggctgcctccgtcgccgccgattggtgcctccgtctacacgggtggcctattatgccgccgctgttgggcgtctacgaattcaccgccgggctgcctccgttccgccgagtggggcctccgcctacacggctggcctattatgccgctgctgttgggcgttacaactttaccgccgggctgccttcgttgccgccgattggtgcctccgcctacacgggtgggctattatgccaccgctgttgggcgtttacaactttaaccgccggccttgtctccgtcgccgccgac

SEQ ID NO: 24963 - DNA, 14892 bp, Oryza sativa
gtcatgcatgcaactaatcaagcgaatcactaattaaacatctttttttcccaaagaaattaaatcgatccataaacagagataattaaccttgtgcaggaactcatcctgggcgccgatggcgtagaggatgccgacgacggcggtctggttctgggtgttgagatgcaccatgtgcagctccatgtcgtacctccggccatcgacggcgtgctccgacggcgcgtgccagtgcacctgccggagccggtacgccgtgccgttaatcaccagcccgccggcggcggcggcgtcatcgccgccgtcgaacctgaccatgatgtcgtggccacggttgacgacggtggcgttggcgtttcggtaggtgtagttgaggtcgccgaggccgggggccagggtgaggtcgaggaggccgaggttgatcggcgactgcatctcgccgctgctgcaggtggcccattccggcttcaggctgccccagttctccggccccctcggtgtgccggggatgtagccgaactgatcgtcttcctcggctccggcggccggcgccaggagcaggagggtgacgacggcggtgacgacgacgacgaggaggcgtgcgcgatgcatgtttgcgtttcgttgtgtgctgtgcagagtgctggctagctagctagctgatctctctggggttggccatggcagcttaggcttgtaggggtatttatccagtggagagtttaaggtagagtatagggctagctacgtggaggatgcatgcatggatgacaagttggaattttggttgcgttgtctctctgatcgactctgatcagctgatagaagtaggtgtacagagtacagagtacagactacttcatccgtttttaaaaaaattagatgtgatatatccatactaagtttatttattttggaacgaaaaagctagacacatgtacttatagcacactactacaaaatcaaaattctcagacaagacccctttaaggtgtaggcaagccaaaattgctctcacttgaaaaatcactttcccgaacgcggttcaagaattgcattgtaggtctcttaagatgacttcttagtaagaggtccatatgccaccggcccacaagatcaagcccatccttaaattatcaagtctcccctctctctcctcattctctccatcctccacttactctccacctctcctctcctcctcctctccgccggtggcacgcgagtgcgatcaatgctggagggatccggcagtggacgggagcagccgatgaccacttcatctgacagtaggcaggaacaggaaggggcatgagcttggtggcggaggatctgacaaaaggttgctcggagatgggggatccagtggtggggagcacagcggcaacggatccggcagtagggagcggcggctgccgcggtggatccaacggtgggtaggggtggacgaaaaactcgtggcttgttagctcactcgactcgtgaccaacttgacttggcttgactcgtgaccaactcgactaggctcgacttggctcgttgcgtttttctaacaagccgagctggtgttttagcttgttcgaaataacaagctagcttaagctggctcacgtgcaaaatgagctgaggcctggagtatacatccaacacatcaaaccagagctcaccaccaacgagccccgatgggaagcacatcagcagtggatccggtgatgcggagctcagtggaggtggatccgatgggctctccccctcccatacgcatggatcagaggcggcgatgggagtgggggagggcatttgcgacagcgaggacaaaccctgagcacgagagcggtgacagccaccggcacgggagctgctaggattttggattattttttgtgggaatttttttttgcagtcagacggcttaagcacccacatgaagtttcgcatgcgtttgttctacccacatgtagaagtactgattttagaagacacttgggtacagacagaccatccaagtgctcgtgaaaatcggttttgaccgtataaatgaaaaaattgtttctctagtagtgacagtggtgcaaaggtacgatacagctagccttctccagttgtgtgcatcagtgcatggatgcgtacgttccggcaactacgtactgatcgaacgctggcaagtcatgtggcaatgacatgcatgtcactccaaagcactggtacggaactacgactcaaggcggatcggagctggagcgagatggagggagggtgccacttgcttaatttactctgatttatatcaaatttaagctaatgcgggtgtctaaatttgtattgtgggggatgcacacatggtgaaaatatgtcaggtatagctacaattttttctttactgggttcctgggcacccctcaatactctagctctgcccctgatgacccgtgaccgcacatatgccttgggtaaatgtgtaccattattgatgactttctgatatcaaaagtaagatgatccatgattatagatggcaaaacgggtcgtttggccacgcacggctcaggcatgactgggcttggcccaacctacatgccgggccgggccgagctcacccacttgctggaccaatggtccaggcacggcctaataagacttgggctgtgccgagctggctcgaggaacaaaagcctattgtgctccttcttggaaaaagtctattttgcctccctcatctttgggccgtctcgaaatggctgtaataagtctattttgcatcattcatctctttgggtcatacctttatatggatggaataagtctagtttggctccttcagctatttggctccctaatctttggaccgtgccgaggcagagtcctaggcacgggcccacggtcgtgctgtgctgtgcctaggccgggccaaaatctcgtgctatagaccgggccagcgggccttgggccttttggccaactttattcatcatgtgtacctatctggtcacgtctattccctagttcagatatatggacatatataacacgatagaggtgtgggtacttacgtacaacagtacgtagtttgcatggtacgtgctagccttctccagttgtttgcatggatgtgtttttcagtcaccggtggaaagccgcaactattggtgatcaataccaagttggcttgtatataatcattcatttctgatcttaggatttattctcagtgtgtttatcattttcgagttgaagccgtgattatttatagacttatcggtctataaatatcgcgatggcaagtcgccaagtcggctattcatctatcctcacaaaatatatcattaatatagtgatagagttgtggctacatacacaacctaatttaacattctcgagttgtcctataaccatgatgagctccagccatcggttaaagccacaattttttcaacgatccatggcaagtaatcaattatgcattaatttccccttagaaaatatccccattgtggtggtacaattgtggttatacatagctaagtataatttcactcccaaggttcaaatatgaatatctatcgtgttcacatggttgactttcagtaagaattttgtacgagtctaaaaaaaaacaattttgtaagggtcattcaactagggtgtgtttagttcacgttaaaattgaaagtttggttgaaattaaaacgatatgacggaaaagttgaaagtttgtgtgtgtaagaaaattttgatgtgatggaaaagttgaaagtttgaaaaaaaaagtttggaactaaactcggcctagaattttaagggtactactgcttacatgattttttttttatttagagtagctactgcttctgcgttcatctcatacatatgatctctgaccacctccatattccatagcctggttgcaacatgggtaagatccgagacaaacataggtggatcattggactgcgggcacagcggcatcattttaaagtgcctgtcaagtagtcgagagcacagacccaaatttgtaaaaaaaaaacaaacaaaggtatagttggttcacattataaaccagctacaatttaatgataatttgtatatcagtgttggttcatgttatgaacaggccctacgccagatccttacacctctgacgggatacctgtgacgggcaaacgaattggtcagtagtgaccattacctttgacgggttatacgggatgccgtcaccggtgaggcatctggccgcggcccgtcacaggtatcccctcacctgtgacgggccgaaaggaaaacccgtcagaggtataccagtgacgagtttttcttccaacccgtcactggtatcccctcacctgtgacgggccgatacattagaagccgtcagaggtgatgggccgccacctgtgacggctttcatttctggcccgtcacaggtgagaggataccagtgacgggccgttgaatagaagcccgtcaaaggtatgagcaatacctttgacgggctttttttatctaacccgtttgaggtgtgttgggtctataaatacccccaaactgccaactgctttccatcccgaccattgtactgttcacaaatcggttgggagggcaaggggggcgattttttgctaaaattcaaggtaaaaaacacattattctccattcattctcaacatatcgatcatcatttatttttcttcgtatgttgttgatttcagatggatcgtagatggatgtactatgcgcatcgttcgtctaccgagtatagagagggggtcactgaatttgtcacatttgcggataatgacagaaaaagtaggatgagcatgcacatgttgtgcccatgtagggactgtaagaatgaacagatgatcgaagacaaggatgaagtgcatgctcatttgataatgaatggattcatgaagaaatatacctgctggaccaagcatggagagcaagaggcgcctgatgtcgcagctgaagaagtgttggatcaggatgtagagaacaccgccgcagctcgagaaggcatgttcgtaccttctcctttaggtggagagaccatagatttggacactcaatgtctatctacaatgttgcatgacattgaagacgcagaggacaacgacagagattatgagaagtttagtaagttggtggaagattgccagatgccgttgtatgatggatgcaagtcgaagcacagcaagttgttatgcgtgttggaactcatgaagcttaaggctagtaatggctggtcggacaagagttttacagaactccttgagttgttaaaggatctgttgccagaggggaacaatttacctcagacgacatatgaagcgaagcaagtattatgtccgttgggcctggaggtcagaagaattcatgcatgtccgaacgactgcattttgtattacaaggaatacgctgacttggatgtctgccctatctgtggggcatcaagatacaaacgagcaaagagtgaaggtgaaggaagtaagtcaaagaggggaggcccagcaaaggtggtgtggtatctcccaattgcggagcgcatgaagagaatgtttgcgaacaaggaacaagctaagcttgtgcgctggcatgccgaagaacggaaagtcgatactatgctgaggcacccagcagattcagtacagtggaggacaatcgataggatttaccaggaattctcaaatgacccaagaaacatgcgtttcgcaatgtgtacggacggcattaatccttttggtgatttgagcagtcgtcacagtacatggccagttctgcttgttaactataaccttcctccctggttgtgtttcaaaagaaagtacattatgcttgccatgctcattcaaggaccgagacaacctggcaacgatatcgatgtgttccttgaaccgataatcgatgacttcgaaaggctatggaatgagggcacacgaacatgggacgcatatgcacaagagtatttcaacctccatgcgatgctgttttgtaccatcaacgattatccggcccttggcaacctttctggccaaactgtgaaagggaaatgggcgtgttcggagtgtatggaggaaacaagaagcaaatggttgaagcattcacacaagacggtctacatgggtcacaggagatttctcccaaggtatcacccgtataggaatatgagaaagaatttcaatggacacagagatacagccggacccccgacagagctaacagggacagaggtgcacaacttagtgatgggaataaccaacgagtttggaaaaaagaggaaagttggaaagcgaaaagagaagagcacatcgaaggaaaaaacagaggagcatgtggaaaaacaaaagacaaaagagaggagcatgtggaaaaagaagtcaatattctggagactaccatactggaaggatcttgaagttcgccactgcatagatttgatgcatgtcgagaagaatgtatgcgagagtttaatgggattactacttaacccaggtactacaaaggatggtctcaacgcccgacgagatctggaagatatgggtgttcggtcggagctacatcccataaccacggaatccggcagggtttaccttcctccagcctgctacactctctcgaaagaagagaagattgatttgctaacatgtttgagtggtataaaggttccatctggttactcatcaagaatcagtaggctcgtttcactgcaagatcttaagttggttggaatgaagtcgcatgattgccacgttcttatcacacagctgttgcccgttgcaataaggaatattttgcctcctaaggtgcgacacacgatccagcggttgtgttccttcttccatgcaatcggccagaagatcattgatcccgagggactagatgaactacaggcagaacttgtgagaaccctatgtcatcttgagatgtactttcctccaactttctttgacataatggaacatcttccggtgcaccttgtgaggcaaacaaagtgctgtggtccagcattcatgacgcagatgtatccttgcgaaaggtacctggggatccttaagggttatgtacggaaccgttcacaccccgaggggagtatcatcgagagttacaccaccgaagaggccatcgaattttgcgtggactacatgtcagaaacatcttcaattggattaccacgatctcatcacgaagggaggcttgacggtgttggtactgttggaagaaagactattaggttggatcgtaaggtgtacgataaagctcatttcacggtactacagcatatgactgaggtggtgccgtacgttgacgaacaccttgcagttatccgacaagagaacccaggccgatcagagagttgggtcaggaataagcacatgtcttctttcaacgagtggctgaagaaccgaattgccaggttgcagaacttgcctagtgaaacacttcagtggttgtcacagggtcctgaatggagtgccaccacctggcaaggatatgacataaatggatacacctttcacacggtcaagcaagacagcaaatgcacagtgcagaacagtgggttacgcatcgaggctgctagtgacggtggtcgtcgtgatcaatactatggtagagttgagcaaatattggagctagattacttgaagttcaaagtcccgttgtttcgttgtcgatgggtcgatcttcgcaatgtaaaagttgacaatgaagctttcaccactgtcaacttggctaacaacgcgtacaaggatgaaccgttcgttctcgccaaacaagttgttcaagtgttctacatagttgacccgtgtaacaagaaactacatgttgttcgtgaagggaaaaggagaattgttggattggacaatattgcagacgaggatgattacaaccagcacgtccatggcataggtcaagaaatacctctagaagaggaggaggaagaagatgaagttcaatatgcacgtgtcgaccatgaggaaggattatttttgtaatttatgtacgtagtttatgtctacatgtctgttatctgtatgactctaatatgttcggaatgatcaatagtatattgcttatgaaatagtcaaataaaataattaagtgaaacacccactagaagtgaaataaaataattaagcaagtattagcattggaaataatataattaaagtagtataataatgaagtgcaattactactgttaatgaaataaaataattaagtataaaaaaatatgtagtgtatgtgaaaatatgttaaggaaaataaaagaactaagtgaaataaaataaaataaaattgctctaggcaaactcacctgtgacgggctctatctgtagggccgtcacaggtgacctcacctgtgacggcccagagtgctgggcccgtcacaggtggtcttacctgtgacggctccacggttggcgcccgtcacaggtgaggccacctgtgacggccacatagttggagcccgtcacaggtgagtttgactagggttgacctagggttggacatcttctagatcgatccagatccggcgcccactctcactcactcactctctcgaccgccgcctcgcctctctcgacctctctgccgccctctacgccctcctctccaccgccgcctcgacctctccaccgacgccggcctgcaccaccgccgccgcactcactctctcgaccgccgccatccatatccaccgccatctccgccgccatccagaccctcctcgccgccgccctctctgccgccatctccgccctctccgccgccctcgccgcctccttctccaccgccgcctcctcactcactctctcgaccgccgccgtcctctccaccgccatctccaccgtcgccgcctcaacctctcctccgccctctccgccgccatctctgccgtcctctccaccgccatctccgccgccgcctccaccgccgccctcgccgccggtcgtcctctccgccgtccgtccatcgacttccccgacctccccgaccctgacctccccgacgccgggatccccgaccaccgccgaccgcctcgacctcttcgccactgcctctccgccgccgccaccaggatccaggacgactacggcctgcgccgccgtctccaagtacgccgcttctccaagtatgccgccaccctcccccattcctccttttttccgatggatgaattgcattgtttagatgaatgaaatgtgatttgttgtttcgattattggtgctgctgtatagatgaattaaatgtgatttgttgtctgtggatgttttggatgaatgtaggggctagattttatatacatgattttggtgcagtgaatcttagcatcaatagaggatcttagcatgaatttttaatgcattttgttttctataattctttgataattaaggacctttattaggtgtagggtttgaaatctagttacaagggaagaattgatagattggccgcagatttaatgtagttccgaggttatcaaaccatcacagaatacaaaatgcatggggaattttggtggataggccagtgtagtccatggacggaaccgacctagacaccaaaattctccatgcattttgttttctgtcataatttgatgattaaggaggctttgcagattatctaaacttgttgatttatataccctttttgtctatgaataggtcaattgtatgaattgttgtttatatacatgatttatatacccttgctgctgctgccacaatgattgtgggctgttttattatctagacttgcttgaattgaatggatgaattgctgtttacatgaagttagtagtactgtctccttttttatctacacccctgctactgcccctacacttgttcacttgttccttattaaatggccagtgtagagtggttatatacctctacacttgttctttttttatgcataagaacagattttgtgcacttgctctttttttatgcataagaacagattttctgcacttgctcttttcttctggattgataaatggccagtgatgaattgctcaataagaacagattatctacacttgttcatttttttatctattcttctttttgcccctgttgtggctcaataagtaatgaattgctcaataagaatagtttatctgtacccttattgtgggctgttttttaaatttgcatgattgactcagtggttatatacctctacacttgttctttatggataagaacagagtatctacacttgttctttttttatgcataagaacagatttgctcttttgatgttatgatttcctctttttatcccttcatgcaaatgaatataattgatgcatatttctgagcaaaactgaggccatatctttcatagtataccccgtattacatgattttggtgcagtgaatcttgaatgtggatttaagtgcaactgctgctgtctatgtttgcccttgctgtctatgtttgcccatgctgctgcctatggttgcaactgttagttaagtgcaacttgaatgtggttttaagtgccatttggacatataaccattcatggagtgtgtactgctatatatgttgctagacctattgaattttgtggacttgcatttatactcctcctgctgctgttttatgtcaatcatgcaaattctgtacccttgctgctgctgttttttaaattttcatgattgattcagtggttatatacctctacacttgttctttttttatgcataagaacagattttgtgcactctctctttttttatgcataagaacagattttctgcacttgttcatttttttatctacaataatatatgcatgatttatataccactgctgttgttgcccctgtacttcttgttaaatggccaaggatgaattgcttaataacattctatctatacctgttcttttctttatggataagaacagattatctacacttgttgatttatatacccttgctgtctatgtgaatttccctctgctgttgctgtttatgtgaatttccaccctgctgttgctgtttatgtgaatttccaccctactgttgctgtttatgtgaatctccccttgctgttgctgcccctgtggcatatatacccctactgctgttatatggccctgctactgctcttattgctgctattatatggccatgctgttgctactactctaatttcctgcacttgctcttttccttatggataagaacagatgaactacacttgttctattttattgataagaacagatgaactacacttgttctattttctttgggttgcttttttctcctagtagctgatttcctctttttatcccttcatgcaaatgattgtaattgatgcatatttctcagcaaaactgaggccatatcttttatagtataccccgtattacattggatctaatgctatttagtctaatggtaggaaatttataatctttttcgcgaaagttaaaccatgtcaacgcccggcgcaaacccgccctccccaacacctgcgaggatccaggaagaagcaaacccagccacagaggcagttgccgaaggtcatcccgcgacaacggcggtccaacaacccgaaattcatggtaatttataggataaattttcaccacatgaccacataaattttagctagcaccccttagcaaatattgccttctgtttgtgctgcagaattgccgcaggaacaacatacgtcgatgtcgggcgagacaagtgcaagtaggtctagtagaaatccgcggtcacaaaatatatggccgaccacagtgcaagttataagagaggttgacgctagtggtaggcccacggcgcccaggactgtcattggcagatggtctaactgctgcgggatagcggcacgtgagaacttcgggatcctccataaagatatcgggaaggtcacagaagccgagaaagagcgagcttggacggcaatggagaaatggttcacatttccagccgaagcaaaggataggctcaagcggaaggcattccaaaagatgggcaaagcttggaagaattggaagtcgaagctcttcaccgagtatgtcaacccgcccggcaatcatacgccgttcgatgaataccctcaaataaccgaagcggtgtgggaggaattctgctctctcaagaccacccaagagtttagggaatccagcgaggcacatcgcgtactgcaacagcggaatgagcacccgcatcggctgggcaccgcagggtacatcggcaaggaggcaatatgggcccaagaagatgcagccgctgcagcagcgaatgtccctgccccgttttcagacatccctgaacaaagagctcgcaactgggcgcgggcaaggggtaaggtcaacccggacggctctgtcacatttgagaacaaaagtgatgccgtcgtctatcaggaactggtgagttcactacttaacctaactaatttccgttcgtataaagtacaagttcgtataaacgactatcttcttttctagttgggcttggttgctgaacaagcttcacaaagcgaggttgagtccgcgccgaagaggcgcgaagatgacatcctcacaaaggcgctcggaaccaaagaacatcctggccgaactcggggaattggtagcgatgtgccctggaagcatggactccctcagtacagctcccaatacaggaaacggaaagtctccaaggaagagagggacgctcgtttgaaggccgaacttaaggttgaggtcattcaagaactagaagctagcatgaatgcaagggtggaagaaagggttaacaaggtgctcgccgacatgaatataccccgagtcacaacacctgctgtgcaaccaactcctcgtgtacaacacgacgcgagtccgtcacagcataggagtagttgtgcatccacagaggtgccggcccctggtctcccgatcgcaccactagctgcagtggaccacatcgaggtaattgttgttatccgatccatatctaataaaagacatttacacattccaatattaaattcaaactttcaccttatgcagggcgcagcacagtgtgtcctactagcgagagtccacccaactttcgctcctgaagtcgctgagggcatggctttcaagccctcggttactgacaaggtccacggcgcagacctgctagctgggtatgccaaggtgtccatcgatacagtaaaggacacctggtcaggctatccgctgcccgtgcccccaaatgatgaaatcatgactttgggcgatgcgcgcaagacgttcatacaatggcctaaagaagacatagttgtgaagatgactcctcgtccaagtcgaccgacggagcttacacctcccaagtctaagctatcaattgaggctccccgtggaccggcattgtcagtacctcattctcccggtggagctgatatggacttggcagatatagctcaaagcttggctccaataaagaccacaagaaaggccgatagctccccaccacttgtcaagggccagaagcgtgaacgaggcaaggggaaggtcggggagttggcgccggagccaaaaaggggcaaggctgcgacgtcgatgccggtgagcaaatcggggaaggtcgtgagggcgccatcccaatttgagctaggcatgccattggtggaggacaatgtgttagctgtgatgggtattgcttgccgagagctacataagcaatacatggagctaagcaatgccaagcggaaaatgagagagtcatccatagttggacatcacgaccaccagccgttcctatcgtcgcctgcctatataactataggctttgatgacctcttcgaccttttcaggatccggaagttggacactggtcttctaaaatgctactccttgtaagtgcataccttctatacttgtgatatgactggactatatctcctaattaaattagttctaatacgtaaatattttaaggttgtgttggatcgagagtcgtcgccatggtaatcaggttgggttccttgatccatccatggtgaatgaggttaatttacaacagagctccactgaggtggttgactatgtcaaccggtgtttatgggcccatcaagacaaggagtacatcatgtgcgcacacaaccaagagtaagaggacaatacccttcgtgtatattgtttttgaagttaaggttcttagtactaacgctacataaccactgcgcaggcgacattggattctcctagtcatcgtacctaagtggagtagggttacctaccttaactccaataagtccaaagattatgatttcagtgaaatcaccaaggccttaaatatggcttggggcccatatgtggaaaagggtggtaggcacaaggagggcaagaacgaactttatcatgacaccaagtttgcatgcgcacaacagatcggagaccaatgtggtttccacgtgtgccacaacatgtcaacacttctaagagaggtgaaagatttcgaccctgaggttgttgctaatggcgaataagctcatttcaatatctacattgctattcaaaacgtgctaattaacctcttatttattaaacagaaaggtagagctggcttcaagatctcacccatcaacccccccgctatcagaggcgaattgtgtgcctttattcttgcagaaataatgaacaagaaaggacgttttcatgccaaatagactcatgaacttggctagataatttattgtgatgtaaaaaagatgtttttataatttctggcgatgtaaaaaattatgtttttatagagtgcaatgtaatttactttcatatgtgcaatatttatggtactttactaaattgtcatcacatttgatcaactacgatttatattgtactattcatctgttttctccttttttttc

SEQ ID NO: 24964 - DNA, 15907 bp, Oryza sativa
ttgtaaattgttgctttgtaaaggatctgtgatatgtgatgcatctgtgatgttgggcagttggggaatatgtgatatggagggggggtgactggcacctgtgatgtttctgtttttcagagggcatggctagcaattcctgaggctagccaatatttagcatttattttttttctggaattaactcatcagtgacggttcggaagaaacatccgtcacaggtaacctcacctgtgacggactcgcaaacgtcggaccgtcacaggtgacccacctgtgacgggcttttactttcgggcccgtcacaggtgggtcaccctgtgacggctactatataccggagatcatcacctctgacgggcctttatttaggggctcgtcagagatgagacacctgtgacgggtcctaacaagccctagtctagcttagaccaacacctctgacggccttctattaacttgcccgtcagaggtggatgtcaccactgacggccggccacccgtcaaaggtgactggacttaccagtgaccactgatcattgaccaagcccaaaaccgtcaaaggtgagggtttgggcccgtcacaggtgaccttgaccagtgtagtgaggtagttataaccatacactaatacagtgttatacgaaggtaatatgtattggcactattcttaaacatctgcatttacgataaattatatttatttattatgatagctttaaaaaatgacatatttacgacttttcaataatgtacatagtctttactttcaaaaaaaggcgacgacttacctcacaccaccacttcaaaagtaccatatatatatagaaaatattggcctatccatcgcgagcaatttggactaagccatgtactttgcaatacaataagttttaactgatcattattgcacgatcgttaatgaagttgcataaacgtgagctagctattcaacaagagtacttagcggtttttagccgcatgcatcctattgatagaaaaaaggttatggatcatgcatgctaatgcacacaggaagagacgagagatcagaccatgcatacatgcttggtacattcgtatgtcggtcttcttactacccttttttttgacaaattgacccttttggaaaacttatttcgaaactaacccctgccaaaaacttcaaccaaaaataggccgtcgcctcagcgccaaacacattggcgctgacgttggccgtgtcagcgccaacgggactggctctgacattgtgccaccgtggcggccgggccgatccccagctgacgtggcagctgcctcagcgccaaccggactggcgctgaggtgggacttggccgcaaccccaaggcccagaccagcaagccttctggatggcttgcgggctgggacctcagcgccagccataatggcgctgaccgtgggacactcagcgccagcccacctggcgctgaggtgggacttggccgtttcggccttggcccagcccagcaagccttctggatggctgggctgggacctcagcgccaggtgcactggcgctgagtttggacatgtcagcgccatttagcatggcgctgacgtcccagccctgctaaactttagcaaaactttgcacacaacacaggcaaacatcaaatcacaaaaatttacaggcagtaatatatccagagaaccatacaatacatacatccatccatcaatcccaacatcattccatacatccatagaatccatcaatacatccatatatgaagtccatacatataagaaataaaaacatcccatcgatcctcgtctatacatccagtcgagtccatacatccagtccatacatccatcgaaccatgcatcaagtccatccatctatccatccatccattgaaccatgcactcacctcctcctacctctagtgcgaggatgaggcatgtcgggggtgtacctccagtcctgcgaaggagcccgccggcgtcgtggtcgagacgggccgggctgcgagatatccggctgtgacgactctggtgcgtcctctagctgcgagggaccgagctcaaccgcctcctcttctctgtcctcatccccttcttcctcctcatctccttcctccgcctctttgtcttgctcgccctcctcgtcacccacctccccttcttcatccccctcttggtgggcatgagcatgttcgaccacatcagtcgacctgcagccgagccttgctgccaacttccgacatcgctgccgtagtctctgcataaaaaataatccatgttaagttatcgcttttggaagaaaacaccgtagtttcatctctttccaacgattacctgtagggcgttgcggagggtgccgccctctccttcggagccaggagccgtgcctagcgccattcccgcgtcgttgacggtccgcaagagctctcgagcctgtaggattgaaatgaagtaagtcacaacatatatggcattgaaatgaaataatatacaacattaatgctagaaactaaccactctgtcgcgaacaggtcccgtctcgaccgtggtacctagacgggtacgagtatcatgtgggaccgtcggttggctgagcctttgtatgctttgtccatatcgttcttcaaccttcttgtccttcttcttcctcgtgtgttgttctgtaacgacaagtcgggcacgaagaactctccatcataacttggccactgcgatggatctaggtaaggttcaaacctaggggagtacgagtcctgcacagccttattggaagcttcataacacattcggggggccacctccacatccaaacctcgcaacttacaaacggttatcatgtgggagcatggcaagtgatggagctgagggaactgacaactacatgtgttatctctcgcaaccacgacgtagtgacgtccaccccattgaaccccagccgccgtgactccgccttgctcgctgacctcatacttcatcgaagggaaatcaaaacatgctgccctttgccccaaggttcgtctttgctgctcctccaacatgtccttaacttttgtgggccacttctttccacacaggatatctacagttgcctctttgtgtctatcgacaaaccaactattgcacttcgaaaatgtgtatgccacaatagctgtaaccggcagtttccgaatgcctctcaatacattattgaaactctcggccatattactagtcatgatgctatgacgacgcccgttggtatcaaatgctcttgcccatttgaccttaagtggcatatggtcttctagccacttctttggcctctctccgaccacacccatgaggcgtttgatctcatctaggaacaatgctttctcatttatttgacatatgcgctcaagatctttcatctgatcagtcgtagctccagctgtgtagaagttagcacagaagtgcctcatgcaccacctgtggtgaatggttaggtgatgaggcatgatgtggatgatggagttcaaaatgccagggtgtctatcagaaattatacacacttctctattaggaccgatcaacttgtttctcaacatgttgatgaaccactcccagttggatgtattctccttctctaccagagcaaacgccaagggaacaagatgtaacccggcgtcgacccctattgccgtgagcaatgtaccttggtatttaccggttaagaaagtgccatcaattgctagcaccggcctcaagtgcttgaatgcttctatggactggccaaatatccaatatgcacgtccaaatactcgcctctgtactccatccaccatcctggacttctcgggatgagcctcaacacggaaatgcatggtagggttctttgctttgatggcacgcatcagtgtaggcaagcgaacatacgcctcgtcccaatctccccaaagaccttcatagcaacttgcttagcacgccatgctttgccatacgtaggccgatagtgccatatttgctcaactgcctcgacaatcgctgctggagataaagttggttcagctcgcacaaatgcctgtaacctgtttccaataaaccttgaagtaagttgcaaatgcttgccggttacttccgcactacagcatgtgtggtcttcgcccaccctagtcacccgccacctatttcctccacttttccttgcattaatctgccatttgcaatggcgatcgagacaagccacagtatactttactgacgcgttagattccttcacatggtacggccggtggacacggatagaataactctgtagccatattttcagatcatccatcgatcgaaactccaaccccttccttggttcatcacacattggttcgaaggcaccgtcatattgtggatccccatcagcaattgctagcccagatctggtaagatcctcgaattatgttatttccgggtttctacccaccagtttcgcaaacacagtcctttcatgctctgacatcttacgcactggacgatcatcatcggagtcggaagcggactcatccaattcatcctctgtatcatactccaaccagcctgggttcaatccactgcgtatcatagcctcctcacactcctctcgggtatagaatttcagcctagccaactcccttaggcccatacttacattcttagcattcgcttcttcctcaggcaactccacatcatctcctacctcccgaccatccttaacatctccttcctctcttaccggcacattctcctccacattaacttcctcccttaacggcacattgtcctctgcatgtacttcttcccttaacggcacattctcctctgcatgtacttcctcctttaccgggtcattctcttccctgacctccacatccgccatatcatttactccctcgcccccctccacgtcttcctcaatcaattcttccttcctactacacctctccgacagttcgtgacagctaatggatgattctatgagtggactttcattaaggtctataagttctttcttccctatcctaccatctttcttccatgcaaacacctcaagagatttgaaatgtgaccccaatactatatctatatatgtttgccattcgatctctccattcaagtctaacataaatttatgtgacatgacaccgccgcccacatcgtatctcccttgcataccaaccgactcatcattccaatccaattcatgcttgatgcgagacattaactcctcaaaggtaggcttcgcaaaaaacactaattgtctaactgtcattccctcaaattggcttccatgtgtactttcatctaccacacaaccaccataatgaagccggaccaatctatccatctacaatttttaacccatgcataaacattaattacttgaaaataatatgtaattaccattgcaataccaatacttcaaaagctaacaacatgtctaatttttccaataaataagtacattactcaaatactacacattattgataaaaaaaaactctactcctacaaattacctacccttcaccacacatcaacccctttcaaaccctctcaatcaccacaaatccatcccacatcctaggccatcaccacacatccatctcccatcaaaccctagtgcatcaccaaacatccatcccaaatatattttgtgaaatgtatcaataacaaccaaatggataaagatatgccacctccacacttcatccccacccatattatccatctaataatccatccttagccaactattatcaaaccacgtctacaaccaaaacaatgcaaaatatccaataaaactttggggaacttagggtttatagaggggtttaccttctcttccgatcccaaactcaatgccgcacaaatcaccttcgattagagaggtttttgggggagattgggcgaggagaacgcggtggcgaccgaaccctaggcgggcggctggggaaaaaatggaggaagaactagctggggcggcctcggccgggctctaagtagccaaggtcagcgccaacttacttggctctgaggttgggcacctcagcgccgaagcagttggcgctgagtagctgccacgtcagctaggggatcggtgtcacaccccgaagttttcctcccaagccaaaattgtaattttcaaatgaccccaagaaaatgcaggtaaaatcaggagaaaaccctaagaaagtaatgcaaataataatcggacttgacatgtggaatttttcttgagttctacatgtcaaaattcattaacaggatttttagtggaattttcagagctctagaaataattttaaccaattaaaattgagcaagcaatattttattccagggaaaatcctttttcctttttctttttctttttcctctctttttcctcctttttgtcaaatgggccgtcggcccatttctccttttcttccccccccctctctgttgggccggccgcaggccgaggcccagcccggcagccggccgcccgcctccctccctcccggggtcgccgacaggtgggacccacctgtcagacccgtctcccacctcccgccgatcccggcgcgccgccgcgcccgcaaccgtcgccgcgcccacgcctccgccttccccgggccacgtcggccacgtccgcgcgtgcgccgcgctctccgcgcccattcccctctctctcccgctcgcgcccgctcccgagatggccgggattcgaaaaccgaatcccgcctctctctcctccccactcccccgcgtcggcggcgattcccgccgctcccggccacgtccggttccctctccccctatttaagcatcgccggcaccccctctcgctttttccccatttcgccgacctctcccgagctccccatcgctcccgcgccgtgcaaacacccgccgccgccgtttttgctacttcggccgccgctagccgccgctaggctcgccgccgtcttgcgccgtcgtcgccgttagcttcgcgcggccgaggtccacctcgtccacccctcctccgtcgaggttcgtcgccggagccctcatccccacgcgcacgggtgagcaccatctctaccgccgctttcggcctcggatgccggtcgccgttgtccatctccctctctctaatccctctcttctccttccttagggcacgccgaagctcgtccgccggtcgccgtcgcctcccgtggcctgccgtcgccgttcgccatcgtcttcctccgcgccggccaccctcggtgaggcatctcctctcctctccttccccgtttccccgtgcgtcgccgccacccgcgctcgccgtcgctttgggtcgttgccgccgtccgctgccgccgcttttgcgtcgcctccgccgccgggtgccgtcgccggcaacccgttcgcgcgcgcgccgtcgccgtcgccgcggccggtcggccggtcttgagccgggtcgcgccgagtgccgccgccccttcctttccctctcccgcgccactgacctgtgggtcccgcgtgccaacgcctcctctctcctccccgtgtcgctgaccggtgggccccgcatgtcggcgccgcgccacctgtgctgacgtcagccctggttaatattgcgcaataaattatttaaggatttttggttatagtaataaacacagtgaatcttctaaaattcataactaattcatccgagctccgtttaatcccattcaagtctcagtaaatcaaggaaaatgtgtagaatccattaaaaatggttttgttctctgtttcagtagtcttatagcctgtttgcaatgtttgctttgtatgtcgttagattccgatccctccgacgctccggtgtacttcgagatagtcgccgaggtccctccagcagcagagcaaggcaagtcatgcttgtcacttgatcatattgatcctatattgcaaatgtcctaatgttttctttcaaataccgcatttgttttgcaatattactatgggatggttacctattgttacagccatgctattttgataccatgctcctttgttagcttgggtcataacatgattagagttaggactagggtttgcttagccatgcttagttcaactagcacacaatggggagatctcatttaaaacctagactataggtttatatgataatgttggattagtaccaccgctctggtgttggttaattaaaatgaatcacatggtgggctgtgggtgcatggttttgctggtcgcacccatgacagttaaggaccggttcgcgggatgccctggaagaacttatcgtacttaccacaagccagcgtgggcaacggctgggcttgtagtgtagctttcctctagccgacgcatccaggcaagggtgggcgtgatggagtttggatgggccctgcgacggcctatgcggcttccggattcacctaggcacgagaggggactgcccgctgccttgcgaggagtgggggtgaaacctgaggtgtggtgtgcttggttagagggggttatgcgaatggtcctgtcacggcctctttccggtatgtcgtggtggcatgtcggcgcacggaaacgtgtcgtggggctgtgtcttgtgggtacagttgtacacctctgatcagagtaaaactattcgaatagccgcgcccgcggttatgggcggtcaaccagattcaccgtgattagtctcaccctagtgtaatctgatgaatttggatagtttaggtggatggttgggcctgtcgcaacgtgggttagcgttggacagcggatgtttaatactgcttaattattacaaccgttttcgcattcaattcctgtttataaatgccagtatttatgcaaatgaaccactctagctcttctttgttaattccctgcatcatacccctattccggtatgacttgctgagtacagtgggtagtactcagtcttgctctacttttcccaaccccagaggacgggtatgtgtcagatgaaggtttcctcgaggagtaggcttcgtccgtgccgtcgaggatgcctgtggagtggtgttcccgctgcagtttagtcagggcttagctccagttaccttttgttttccgctgcatttttgtaagacttttatgacgtttgtaagacgtggatctgaatgtcaacattgtcgtttgtgtaccccggctggtcctggacggggattttaatgcacattctgcttggaattctattcgggaatttctgggcgtgacaagttggtatcagagccgaccttgaccgtaggacaagccaaatggaaaaacctaagagccctctgaatccttttcattgcatatgttctttgcaattggatttgttccgggaaaattgggatctgttcttgtggttcgagggaaaaatcttgtcgcttgtttaagtgagattttttcaaaacaagtcagtttagggttttagtaaaattattgggatttattcgtcagtcagttggggtttgatgggtgaaatgcattaggtcctagctctataacatgggttgcaaggtatttatgctttgtttgttattattaaatatgtatctaatttcccattattttgtcgttatgtgagtatgtcttatttattcgctctcatgcaaaatgatctatgcataaaattccgctcttattcgattctcttatttgagtctttaattgctttatttaaatttggatttgagcatgcattgatcctactcctttgtcttctctagatggccggtcacccacccaaccaccgcggagaaggcatgatcgactttgtggcagagctggcacgcatgacactggtggtgggctaccccaacgcgccggagtacacgaccattccgccgctcagtggcgagcttcctcaccgtgtccgcttggaggtccatggctacgtggggacttgccttgctaacatggcggttgaggcgtcagggggcacagcagatcacgcttgtcaggaggcagcctacttgatgatggccagactacgggagcgccacgactacatcttccacgacacggcgtaccgctaccacccccgtcgagcccatggtgatggcgtcagctccttccgtccgacagctggcgagaacgacaccacctttggtcacatgtgtgctgtgatgaggggattggacaggatgcactcggacctgcacaaggcgaccaaggccttgaacgatgggaagctcatgaggatcgtcgctctgaaggacgagatagcgcgcctgaagaaggagaacgctcagctaaagggtcttccagcgccaggaggagtccggatccgcaccacgccccgcaagacgacgactgcacctgtgcgcatccagcttgcgcccaggaacccacctccaccagcagctcccgcagcaccttcagttccgcccgcagttcctgcagctccagttccagctcccgcgttcactctctccttcgctccagcatcagccgccagaggttcagccagtggtaccggaggttggctgtctgctactcccagtggcagcggcgagactgatctgtcaggctccaggagtcgctcagagggaccgggtgacgagcaggaggacgctttcgactccaccgaccgcaggagccgttccgagcattaggctcgtttttcccactagtttatcgatggtctagcttctggttgttagtttgcgtgtttaggctgcttgtttggggtcagttgacggttgatatcatgtgcctatgatatggctgtcttaataaggatgtttgcttgctcttttaagtgtttttaattcagatcagaacaattgcagttttaattcctttgtaataaagcttagttcttgagcatctgtttttcttcttttcccccatctgcttttccctccagatggtctacaccaggactggcaaccgcacgacaggcgagggcagcaacggcgaagaacgcgtggatggtgtgcaccccaacagtgattctggcaatggtccgccaccacttcccgagaatccgacgcttgcccaagttatggcacatcagactcagatgatggcagccatgatgcagcagatgcagcagcagcaccagcagatgcaccaaaggatgatgcagcacgccgaacagcagcaccagcagtttggtccccctccccctcagtccaagttgccagagtttctacgcgtcaggccacccaccttctccagcaccaccaaccccatggaggcgaacgactggctccatgccatagagaagaagctgaatctcctgcagtgcaatgatcaggagaaggtcgctttcgccacacaccagcttcagggtcccgcgtcagcttggtgggacaaccacatggccacccgcccaccgggtactgaagtcacatgggcagagttctgccgtagcttcaggaaggcacaggtgccagatggggtcgtggcacaaaagaagagggaattccgggcgctccatcagggcaaccggactgtgacagagtacctccacgagttcaatcgcctcgcgcgatatgcaccagaggatgtccgcaccgacgccgagaagcaggagaagttcatggcgggtttggatgatgagctgaccaaccaactgatatctggggactacgctgactttgagaggctggtcgacaaggcaatccgccaggaggatcaacgcaacaagatggacaggaagaggaaggccgctcagttcagggcacctcagggaagtcaccagaggccgcgcttcactcccgggcagcagggtggacctaccaccatgatcgtccgtcagcaccgcccgttcaaccctagcaacttccaccagggcactagtggcagtcagaaccaccatggaagtcagcccaaccgcggtacagctccacgcccaccaatggcaccggcacagtcaggccagcccgcgcaagccaagaaggagactggagcaaaaccagggtcctgcttcaactgtggcgagcttggtcacttcgctgacaaatgcccgaagcccaggcgtgccgggccaaggtttatccaggctcgtgtcaaccacgcgtctgcagaggaggcacaaacagcaccggaggtcgtactgggtacgttccctgttaacttaatccctgcaacagtacttttcgattctggtgcaacgcattctttcatttcaaagaaatttgtggggaggtatgggttaaggaaagaagagcttagcacaccaatgagggttcataccccgggaaatagttcaacctcagtcagttttagcccctcagtgctaatagaaatccaaagatcaccatttctagccaacctcattcttcttgaatccaaagacctagatgtcattcttgggatggattggctgactaagttcaagggagtcattgattgtgcgaatcgcacagtcaccttgaccaacgagaagggagaaacagtggtgtacaaatctctagtctcaccaaagcaaggggtctccttgaaccaggtcgagatggaagttccagtggacaccgtagagaagaacttgaggaaattggaagatatacccatagtctgcgagtatccagaagtgttccccgaagacctcactaccatgccacccaagagagagattgaattccggattgacttggcaccgggaaccgctccaatctataagagaccatacagaatggcggccaacgaattagcagaggtcaagaagcaagttgatgagcagctgcagaaagggtacatacgaccaagcacttcaccttggggcgctccggtcatttttgtggagaaaaaggataagacgaagaggatgtgcgttgattatcgcgcactcaacgaggtcacaatcaagaataaatatcctttgccgcgaatcgacgatttatttgatcaactgaaaggagctaaagtattttctaagatagacctgcgatcaggctaccaccagctgagaatccgggaagaggatattccgaagacggccttcaccactcggtacgggctatatgagtgcacggttatgtctttcggacttaccaacgcacccgcattcttcatgaatctgatgaacaaagtgttcatggaatttctggacaagtttgttgtggtattcatcgacgacatacttatctactcaaaatccgaggaagaacatgagcaacatctccgtctggtactcgaaaagttgaaggagcaccagctatacgccaagttcagcaagtgtgacttctggttgacggaagtcaaatttctgggtcatgtcattacagctcagggtgtggcagtcgacccatcgaacgtggagtcagttaccaaatggaccccacctaagaccgtgtcgcagattcggagttttcttggacttgcgggttattaccgccgattcatcgaaaatttctccaggatcgcccgacccatgactcagttgcttaagaaggatgagaagtttaaatggacagctgagtgcgataagagctttgaggagctcaagaagaaattagtatccgcaccggttttgatcctgcccgaccagatgaaagacttccaagtctattgtgatgcatcccgtcacggacttggatgtgtcctaatgcaagagggcagagtggttgcatatgcctcgcggcagttgcgtccacacgaaggaaattatccaactcatgacttggaattggcagcagtggttcatgctttgaagatctggaggcactatctgattggcaaccgctgcgaagtatatacggaccataagagtctgaaatacatcttcacccaaccggacctaaatctccgacaacgaagatggttggaactaatcaaagactatgacatgagtattcactaccacccgggtaaagccaatgtggtggcagacgctttaagccggaaaagttactgcactgccctatgcatcgagggcatgtgtgaggaattgcggcaggagtttgaacatctcaacatgggaattgttgaacacgggtttgtagccgctctggaggcacggcccactctcgtggatcaagtcagagcagctcaagtaaatgattctgagatagcagagctgaaaaagaatatgagagtcggaaaagcccgggatttccacgaagatgagcatggcacaatctggatgggagaaagattgtgtgtacctgacgacaaggaactgaaggatctgatactcaccgaggctcatcagacccagtactccattcatccaggcagcactaaaatgtatcaagacctcaaagaaaaattttggtgggtcagcatgaggagagaaatagctgaattcgtcgcactctgcgatgtttgccaacgagtgaaggcagagcaccaaagaccagcaggtttactccaacctcttcaaatcccggaatggaaatgggaggagattggaatggactttataacaggactgccccggacatcatcgggtcacgattcaatctgggtagtcgtggatcgactcaccaaggtggctcactttataccagtacataccacctatacgggaaagagattggcagaattgtacctcgcaaagatcatgtgtttgcatggggtacccaggaagatagtatccgaccgaggtagtcagttcacctcaaagttttggcagaaactgcaggaagaattggggacccgtttaaacttcagcacggcttatcacccgcaaactgatggtcagaccgagcgagtcaatcaaatcttggaagatatgttgagagcttgcgctcttgattttggtggagcttgggacaaaagcttgccatatgcggaattctcgtacaacaacagctaccaggccagtctacagatggcaccgtttgaagctttatacggccggaagtgccgcacacctctcttctgggatcagacaggcgaacgtcaactgttcggaacagaagtattagcggaagcagaagagaaagtcaaatcatcagggaaaggttgaggattgctcagtctcgacagaagagctacgcggataaccgtcgaagggagctcacttttgaggcaggagattacgtgtatcttcgtgtcactccgctccggggagtacaccgttttcagacgaaaggcaagttggcaccacgcttcgtgggaccatacaaaatcttggaacgaaggggagaagttgcttatcagctagaacttccatccaacatgatcggcatccatgacgtgttccacgtgtctcaattaaagaagtgtttaagggtacctgaagaacaggctgattcggaacacattgatatccaggaggacctaacttatgtggagaagccggttcgcatacttgataccagcgaaaggagaaccagaaacaaggttacccggttttgccgagttcagtggagtcatcattcggaagaggaagcaacctgggaaagggaagatgagttgaaagccgcccatccgcacctcttcaccagctcctctgaatctcggggccgagattccgtttaaggggggtaggtttgtcacaccccgaagttttcctcccaagccaaaattgtaattttcaaatgaccccaagaaaatgcaggtaaaatcaggagaaaaccctaagaaagtaatgcaaataataatcggacttgacatgtagaatttttcttgagttctacatgtcaaaattcattaacaggatttttagtggaattttcagagctctagaaataattttaaccaattaaaattgagcaagcaatattttattccagggaaaatcctttttcctttttctttttctttttcctctctttttcctcctttttgtcaaatgggccgtcggcccatttctccttttcttcccccccctctctgttgggccggccgcaggccgaggcccagcccggcagccggccgcccgcctccctccctcccggggtcgccgacaggtgggacccacctgtcagacccgtttcccacctcccgccgatcccggcgcgccgccgcgcccgcaaccgtcgccgcgcccacg

SEQ ID NO: 24965 - DNA, 835 bp, Oryza sativa
gttgccaagattacacgcggtggacaagaatgaccgatttgtgaccggtctgacactgatcatatcgtcagcgcacagccatgctcccacgacgcgctcacccccggcggaagtggaggtaggcgtgggctgtcccatcggagcgtcattcggacagcaaccgtgctgatctccgcccgttcaagagaaaaagaacagtccagtttggaaagagaagggtgcatgtggtatccccttgaagtataaaaggaggaccttgcccatagagaaggggctttttgattcttttccagattgtgagcttagaacgggggagaagtcagctcacacttgtagcccattcatacacagatccaccaaaacacaggagtagggtattacgcttctcagcggcccgaacctgtatagatcgccggtgtctcgtgtttctggctggcagacgatctttccacatacagagagagagcgagagcttgagatttcaccctaagcccccggccgaactggcaaaggggggcctgcgcggtctcccggtgaggagccaccagctccgtcaccattcaagatgggcattcgaatgtgccatagtacagcatgaatggatggaatcaatttctgatacttcttccgttccaatataagtatgcaacctagtacggatgaaacatactacctccatattttaatgtatgacgccgtttgtcggtgacacagggccgggggtatcgtgactagaggattgggttgccgcggtcgcccacgtggcctgaccccctcgggggggtcgggcccgagggtaacgtggccacccctccctctgtctccccgaggggtc

SEQ ID NO: 24966 - DNA, 656 bp, Oryza sativa
acagtagtccatcaatcctttaacaactcaaggagttctgtaaaactctggtccgaccagccattactagccttaagcttcatgagttccaacacgcataacaacttgctgtgcttcgacttgcatccatcatacaacggcatctggcaatcttccaccaacttactaaacttctcataatctctgcgttgtcctctgcgtcttcaatgtcatgcaacattgtagatagacattgagtgtccaaatctatggtctctccacctaaaggagaaatgacattggccatcttcgcacacctgtgcgagatgttcattggggtgcgcccctctcttcagctgttccggtggttcttcaccgtgcagtcggtgtcaccgccatcggtggttggcggctgctacttccagccgcgggggccggtgttgaaccgctacatcccctgcgtcctccgcaagaagtgggacgactggaagagcgactggttctacaccccccctcgccgacaagcgcgcctccgccttccaagccagcccccggcgcaggtctccagctggcgggcgcccggcagatctgggggaggagtacgacgccggcctctaccgcctggcgggcctgcgatcccaggggctcaccggggccctggtgtacggcgattacct

SEQ ID NO: 24967 - DNA, 1276 bp, Oryza sativa
  unsure (1)..(1276): unsure at all n locations
ttcctgtacatatctatctcccatgtgaatattcatggttggtggagaggaggcaagtatggaaagatgggtggatttgttttggggttttgaggtagtagcaaaattacccacaaaaaaattaggtgaaaaaaaaaagaggagtagaaatggaggtgattcagtgtctcctgtgtgcatagggtgtgtggaggtgaaggaagcacggaaggaagaagatcatggcggaagaagatggccggatttcggccgccgtcgcggcggcggccttgcctatttcagtgatttctggggtttatcctctgttcatcgtttgttgcatcatcgactagctgatgaagatcgtcgatcgatttcaatcaagccccccctcttgttgatttcgtattttgttgatgtaatctttgttttgttaagaaccccaacagcatatttgtaccttagctttaaatctgagaatcttttgctgactcatctacctatatgtggtgatgaagcccccctcaatgtattgtaatcacctgcttcaagtaaatgatccaataatattatgttgctatatgtttcattacttccttgatccaataacactcatcttaatatcttgttcattagtgacgaaatcgatgtgttttgtggagctgagcggngggcgatggtgccggggaacctgccgtgacagagaccggcggagagtgcgacggcggcggagtcgccggcgagtcgttgtcatctttggtggaatcgatggtgcaggattggcctgcacatgctgcagcctctgcttcttccaccgcaccgctgcttggccacaaaaagacacgtcctctntattcgagtatgtacatgtactactacccggtagcgtagcgtcggctttgccttttgcaggcagtgcgactgttcatcgtccgtacacgtcgccggagttggggaagacgacgatgacgccggctgcggcggcacccgaatctgacccggatcgatcggatcgcggcgactccgtctcgagacgaatgggttggtgggttgggtcgcgaacgcatcggtcggagtcagggtcggggtgggggagaaaatatcggctgcttgtgtgtccggttcccacgagacagcaggcgtggtggtggtggcttcttgttgctccgtttcgtctcgcacactttcactttactttctttttttgatgggcatgtctagtccttttcgacccttcctgtgtacgtcacgacctcgcacagtcagacaatctccatacacagtatcccgtagaaaa

SEQ ID NO: 24968 - DNA, 1119 bp, Oryza sativa
  unsure (1)..(1119): unsure at all n locations
cactgtctgtattgctaacttcctcctttactgaaaggtcagtcagggagaaagagagagagagtgagcaatcaatcattgggcaaaaagaatcatcaagcttagagtagatgttggtcaagctcgagctccaattctttaatcctctgaaagctaaaaaagtccggtcatctctcaacagtgaaccctcctatatgcatacagctatgagcagcctctgacatctcaatcacatgatcatgagtggttttcacataggtatatatacttccatttgccatatataccccttccacacttggaaccttggatcatctcatctcacacacccaaaaacctaaattgcttgattgctcttgtactgcagtngtgcttcctacactgccattgcatataaattntgcactgcaagaataantcagtctgagagaccagagagaacatcatgggtggcaagcctgtgcctgctgcggcgttcgccgggtcggcgccgccgctgtcgcaggtggcaacgtcggcggcgcacggcgaggactcgccgtacttctgccgggtggaaggcctacgacgaggacccctacgcacgccgtctataaccccgacggcgtcatacagatgggcctcgccgagaaccaggtctccttcgacctcctcgagcctacctcggaccacccggaggccgccggctggagcaccggcggcgccggcgccggtagcttcagggacaacgcgctgttccaggattaccatggcctcaagagcttcaggaaggtacgtgagagagagagagagagagagagagagtttgcaattcttgctttgcttggctcgaacgccatgctggtggactgatcgagatggcggcggcttgcttggccaccattgttgcttgcaggcgatggcgagcttcatggggaagatacgcggcggcaaggcgaggtttgaccccgaccacatcgtgctcaccggcggcgccaccggcgccaacgagctcctcaccttcatcctcgccaaccccggtgacgccctgctcatccctaccccttactaccccgggtaagccactgtccattgccattgccattgccatgcatctagctagcttgggatcgatcgagc

SEQ ID NO: 24969 - DNA, 1445 bp, Oryza sativa
aaatcatgtggacatgacaaatttgtactctgtttggacaacaaattggaattgtgcctgtattgtatgaataatgtcaataggaaaaaattacctttctcgcgaaatttcctcttccacttggtgcaatgatgcgaacacactcgcgagggtggccgatcttcatggcagtaggttcaaggcaaaagagcgccggcgtaatccgaacaaaagagggtaactagcgcgagcagcaagaggataactaccagatgcgaccaagtagtgagggtgagaacgatccgaagcctcatgaattccgacccgttgttgatatttcttaacgacattactagaaatataatttccagcaatggcgcagaaatacttctggtatattatggttatagagttcatccgcaagcgtacggatataccattgtagcatttcacccgagagtattccaagggtatcgtatttgtttaatcccgtggaaagattataatagagagaatcgtactaataatttatatattatttgtatcaaccaaagtctaagcaggggttaatataattcatggggtagagtgacactaagcagaagcattcatactcttactcataattatctaagctaagtggcaagaatatagaaagatcctattcctatacttctagtatacatatatattatacatacatctgtcacgaactcaccgagatttcgcggcggaacgccagcttaattggaaattggaaaagaaattgggtttcagatgaacaagaggaagaacaggttggggaatgagacaattcacatgaggagtagttgattttgattgctctttctcgataccgtttccctgacggatgggtcctcctttaaaggttacaaccactcacgcgacgtgaccaccgaacctgcacggcacgtctgcaaactcactcacactcacacggcccaaccggcccaatactcagaacaccacacaacaccagagatacataacattctccaccccttaaagattggcttgtccccaagccaatgctgcgggaaatctttctttcaattgccgtaaattctcccatgtagccaactcatcagggagtccagaccaacgaatcagcccatacggtacaacagatttgcctcgcttgatcaattgtggacgaagaactgcgacaggagtaagctctacattgtcaatgaagcaatgctgaggaatatcagaactcacctgaatgtctggtttgactgccttcttcagaagagacacatgaaccactggatgaacatgagagccagccggtaagtcaagacgataagcaactgctcccacacgctccagaattgtaaagggcccaaaagtatcgaaaactcagtttgtgacaagagcggtgagccactgacatttgcacataaggttggagcttaaggtatacttggtcccccaccgcaaaa

SEQ ID NO: 24970 - DNA, 1948 bp, Oryza sativa
tattaatttcgaaatttttagtatccgggggtggttagttttaatcgtcagctctctttctctgtttgcttggttctggggggggttttcaaatggggacgaccaggagaaatgttaacaccggtgaaggcaaccaacccgaaggcagcaaccacaaccaccaaggcaatccacctccacctccacctccgcctccaccaccaccgccagacaccaacgccattctcacccaaatcctcgcccagcaagccaacatgatgaccgctttcctccaccacctccaaaacccgccacaacagaatgctccaccaccacctccccaacactctaaactcgccgagttcctccgcatccgcccacctaccttctccagctccaacaaccccgtggatgctttggattggttgcatgccgtggggaagaagctagacacggtgcagtgcagtgatgaggagaaagtcgtcttcgccgcccatcagctgcagggacccgcatctctctggtgggaccacttccaggctacgcagccagagggacagccgattacttgggctcgcttcaccgccgctttccggagaacccatgtgcccgctggagtcgtggctcttaagaaaagggaattccgagagttgaagcaaggcaaccgctccgtgatggagtatttgcatgagttcaacaatctggcccggtacgctccgcaggatgtgcgggaagacgaggagaagcaggagaagttcttggcaggaatggaccctgagctgtccgttcgtctagtctctggggactatcctgattttcaacgactggtggacaagagcatccgcttggaagctaagcacaaggagctggaatcgcacaagcgccgcttggcgaatttccgcaatcaacagggtgctaaccaaagggtccgctacaccaatccctatccagggggatcctcctcgcagcagcaacaacagcagcagcaacctcgctccgcgcctcgacctcaattcgtggtgcgcgtcccacagccgcagcagcagcagggtcagcaggggactcgtgcgccccgtcctcctacgccaactgtgcagcctggtcaaggccgcagggacgctcaaggtcagcagcgtctgtgcttcaactgcttcgagcccgggcactatgcggataaatgcccgaagccaaggcgtcagcaaggccaagcgcctccccgctccaacaacggtgggaaggatgtcattcggggtcgtgtgaatcacgtgacggccaaggacgtgctgacaactccggacgtcatcgttggtacgttcctcgttcattccatccctgctaccattttgttcgactctggagcttcccactcgtttatatctgtgccattcgtggggagaaatcagttgggggtagaaaggcttagaaaccctctgctcatcaccacccctggaggggttatgacagcaaagtactatagccctgccgtccctatagaaattcaggggattccttttccctcggatctgattctgctagacaccaagaatttggatgtgattcttgggatgaattggttggctcaattccaaggagtagtggattgcgcgagacgcactgtcactctgtaccgagggccggaacaaccggttgttttctttgtacccccaacctctgtcaagagttcagaactgcatcagataggactgtcagaaatccccatcgtcagggagttcggagatgtgtttccggaagaactacccggtatgccgcccaagcgagagattgagttccgaatagatcttgctccaggaaccactcctctgcacaagcgaccctaccgtatggcagcaaatgaactgaccgaagtaaagaaacagttggaagagttgaaagaaaaggggtatatacgttcgagtacttccccatggggtgcccctgtgatttttgtagagaagaaagaccagacgaa

SEQ ID NO: 24971 - DNA, 22423 bp, Oryza sativa
accaaaatatcctcgtcttctacattcatcccttcttccttctctctcctctcttccggccaacaaactccgatgtgctgccgcccgtcccgctggaagaacttggcgagggacctgctcgattggagcaggcagggcagcgacctccgtgctcagaggacacaacattcagggcagcggacggccacgcggtcttgagcacagaccggaaggatgctgcatcaggggacaagaggaacatgagattagttagcacttagtacgacccatttcctccatcaatgaaagaaccaaactgattaagcatgcctgaattcagattaatcaacataaatgttattcatatgacaagataagccttttctattcctaaaattcacagtatcaatcagttggcagtagcaacactagtataaaataaacttgccaaccaacgcaacattccagaaatcactaactacgcaagaaagtaaaaacacaaaatttcttcaaacattgagacccctcagatctgtcaacacaatcgcaacccccaaaaaagagaactttttcatcaccatccacaagcactagcaaaccgcataagccgcactatttactactcctcgacggcggcagcggcaagcattggagctctctctcccccgcggttgccgtaaatggaggcagggacctgctgcagcatgatgcgggtggctgctcgttggagttcattgcctgcaaaagaggagagaaggggaaggaagaagacgggggtattttcgtctaaaagaattgataattgaagtgaaggggtatttagtagcatatctcttatacttatgaaattgtaatggtatacttttaaatagcaaaatagtaatggtgttttttaaaaccgtgaaatttttaatggcatgaatccaattaaccctttttttttggcgatgccccattttacaaggcgtgatgatttttctgctgattttctctcgggagtacccttcgcacacatgcaaatgaccccttgatacctgcgtttaataactaatccattaactatttgccacttttagatttagctaattatttgtaaacccactgaattactcgctgaattcagtgggttggcactgaactgaactgggccagaagagatgagagaaatcgtttccactaaaagttgaaaagggtgtttagtacgtgttagttttttgaagaatggaaaggttgtttccctagctaattcgtttcccagtaacacgagttgcttgttaaaacttggtttttaattttctttacaacgaaacatcagctggttctatcctgtatttttcgccgaaagctagaactaagagcagtagagcatgtagtgatgtacaatggtacaacacttccatcgagattagggtgagttcgaatctccctcttctgaacttatattctctcgttttccaagttgactttcggagaaaactaccaagttggatgcacaacaggcaaaaacataaatggaagcatgaacacacgaacagatgcatgtatcccaaatttccatacacacaaaaaaaaacccaatcttataaacaaatcaggcccaaaacgcatgtttgtagtaagacaaattgaatccagaagaaaacaaagagaaatcgagttggagaagataaaatcaaatacaggctcgaggaggacatgggtctggatgcttaaggggcatgagtgttgcaacatgggtctggatgcttaaggggctcgaggaggacatgggtctggatgctaatcggatatggcaacgtcgacggcgcggcgtcgacggcctggggagaagggaagacggtggttgtggtggaagaggaggtggcgacggatctggctcctaaccatgttgtcatccctgttccgcaccgtcaaccccgtcttcgtcctctgctccaagccgcctcggccagtccgcaacaacagtagcttgacggcggcctcctcgaatccactccaccgtgccgtcggtcatcaacacgcgtcggagttctctggctcccacgctagcaacctccgctccgtcctgctccacgtcattgagcggccatcccgctcgtagtccccgagcttcacgtcggcgcgccagtcaggggaggagggacgccggtcgccggtcgcgggaggagatgaggacgctagtcgggggaggaggagagggagctgaagtcgccggctcgctgtcaagagtgagtggaggaaagtccgagaagggataagggagagagaggggggtggagggggagctttttgtttctggagtctggggcatttggtgtaaattttgaacctctacacaaaagtgaaagaagggactgaaatataaaattaaagccatacctaaagccacttgcactgtggagaactcaaattttggattcgtagccctagcatacgtggcactttgtggcctctcatataagtgagacgcaatgtgaatgccctatgcaaaccctccgactattcctctcctttttttttcttctatcctttttgttttgttcaccggatcttgaatcgtgatgcttaaaagaatgtatgtgttggaaatcaaagctattcactcactcaatctcacaagaacacaagcgcacacacacaaggactcagaacacagagagtttgcaagtgcgtagcactctttttctgtttttctctcacaatgaaactgattacattgatctctatttaaagatgcacatgacctgcttaagcctaaagaaatgcaagaatcctagataacaaactcatccacgtctaacagaattctcctagtcaatcgccgatacgtgcatgcagcgttcgaccgcttcctgctcctgacgtgtgctgatcccttcgccacatttgcatgcatggctaactaattagctagatgtactctcacctcctggcaacacgatcagccactactcactgccaatctctctactcactaagccatgcagcacaaccactaagctagcactcacgccatgtaacacacatacatgtgacttctactcagctactaccatataaataaacatgctgaaactaaaacaacaagattatacttctagtaatcacccccttaatcttgttggctttatttgacaccttccatttttttcttcaaagtagcgttggctcgttgtcggcgctcgcgactgcaagcaacgcctgcttctccttcagaccagcacacttctcctcccatgaataatgcccgtacccttggcacttgtagcagcgcacctttgccttgtcaaaggtgtccttcttcttcttgctcttcatgcgttccatccactgctcttccgtgagcagtaaacggccatatgcttcacttccattgccatcgatttcatacctttcttccacggacttgagacggccggtaagttcctcaacggacagcgtcttcagatcgatcagctgctcgatggagatggccacttgggtgtacttggatggaaccacacgaagaaacttcttgaccaccatctcttcttccatcattgcacccaaggtatggatgttgttgacgaggcccgttagccgcatggcgaagtcgtctacagactctccttccttcatgcggatcagctcgaactccttgcgtagggactgcgccttcgcctcgcgcacacgctcaacgcccatgcgcatcgtgcgcacggcctcccacgcctccttcgcggtgtccttcgacgccaatgttgccaacatttccgacggcaccgcttggaggatggccgccaatgccatcctgtcgatccggtgctcagtgttgccgagctcaacagcatcccaaacaccttgagcttgcatgtttaccttcatcaagagtgaccactcgatgtagttgctgcttgtgagcacgggatagcgcaatgtcaccccggcctcctttacttgctgcacaacaagctcacgactatcgttcctgccatcggtgccgctgccggtcggtgccattgccgctactgctactgcggcggccgggcggcgtgtacactccatcgccagacatgacagtagacactcacctcagctctgataccaattgttggaaatcaaagctattcactcactgaatctcacaagaacacaagcacacacaaacacaaggactcagaacacagagagttgtttgcaagtgcgtagcactctttttctgtttttctctcacaatgaaactgattacattgatctctatttaaagatgcacatgacctgcttaagcctaaagaaatgcaagaatcctagataacaaactcacccacgtctaacagaattctcctggtcaatcgccgctacgtgcatgcagcgttcgaccgcttcctgctcctggacgtgtgctgatcccttcgccacatttgcatgcatggctaactaattagctagataacacatacatgtgacttctactcagctactaccatacaaataaacatgttgaaactaaaacaacaagattatacttctaatagtatggctgcaacttctaggttatatggaaatctctatcgttcttttttcttcttattttttttactcgtcattttgttggaaacagaattgtttttctttgacttagatagtaatatgttaattttattataaaccaaagtagtattcttttgtgtgcgcgatattgttaaatggataacttaaccactcaaataacgaggaggtagctcaactcactaactatgaccaagcaaataaaatctcttttcattcatatccggccaactaaacatcttaaatcagtcaatctgaatgtagtccagcaaccaaacaacccaacatggattaggcaaatgagccaggctacctgttatgttgctcggtggataggaacgaagtggtcaatgggttggaactgagagagacgataatagacagagatagagattgttgctatacaagccgatgattagaggtatgaattttttgagtatttgaaaaatcattctcaatcggcatcaaggatattgaaatataaggctcttaaatatgttgtatttgatgatgatctttattatccgacgattgatggagttttacttaaagtggttatgtgtgaagtgcacgaaggaatttgtggaactcatcaatcgctcacagaatgaagtggttgattaggagagttgggtatttttagtcgaccatgctgaaggattgtttcatatattataagggatgtcaagattgccaaaggttttgagcaatttagagagcacctgcgtcagctatgaacccaataattaagccatggccgttcagaggatggggaatcgatatgaccggccagataaatccaccaccaaggaaaggtcacaatttattttggtggctacatattattttaccaagtggattaaagcaattccactgaagaaggttgattctaaggatgccattgaatatgtcaaggaacatatcatatatagatttggaataccccaaacaataaccacatatcaaggatatatctttgtgtccgatgagtttattcaatttgctaaaagtatgggcataaagttattaaattcttctccttactatgcacaaagccaatggacaggcaaaagcatccaacaaaagtttgatcaagttggtgaaaggaagattgccgaacaacctaaaaagtggcatactatattagctaagtctttatggtcttatcggatggcatgtcatggatctatacaagttccactttatcaactagtttatgggcatgaagatgttctaccatgggaaactaacatcagctcaaggagaattattttacaagatcggttaacaactgatgattatcataatttgatggttgaggagccagaagatttggtataagctagattatgtggaatggaaaaagttaaaggagacaaagaaagaattgtaaggcattataataaaaggttgtgccaaagtctttcgtggaagaaaaacttgtttggaagatgatattattgataggaataagagataacaactttgaaaagtggtcaccaaattgggaaggaactttcgggatccataaatatgtgctaaaaggggcttatatgcttaagggtcttgatgaagaagtttttggaaaaacacttaatggaaaatttttgaagaaatattacccaagtgtatgtgttaactcataattggttgattataatgatgtatgataatagtcgatgtttgaacatcgctttttagatgtccgatatataatatcgcccttagactaaaattttgtgaaatatcgcaagtgtgagataagcaagagtaaaatcggcttagtagctgatggatatattacatgaaaatgtttaaagttgcggtatcaaaaaatatttacggagctaaactattacatcagccaaaaagttctaaacttaacttaatgctacatccgttaagtttgatctattaagtcgtgatttgaatctttaactctggcctactttttgattgccaataagggtagaatcgggggtttcagccgatcttacctgatatagatgttttaatatgtttagttaatctaatcatgcttttcatgctatatttgccattatatatatgtatcacttaagataaataaatttggtgtacatcgagtatatttctgtgacatcttggcccaatcaggatgaggtctgtgtggcccatgtgagctgtgtgcgcatgtttagtactaccttgctagtttagcaagggtggaacaaactcataaggccttttcccttcaaccataccactctcgagttaacctttttacacgaagcgaggacgaaagtataagtggggtggtatgtgtaagtgggtctgcccgtcggatgggctggctacgcggttctggagggagggttgttacaaattctctagattgatatgtatatataaagttgtattagagtattagctaatacattatctttttatccaagtattgtctatgatataaacatatctaatctctgagtccatattgtctcggttaggtccgatctatacagtttgtctataatttagataagattgatttagagattatatgattgtttggctgtggtattagagtattagctaatacattatctttttacccaagtattgtctatgatattgttggaggtacaccacagggcccttcggccggaaccaccgaaaccaagagcttaggtgacaagcccggacgggaggcaaatggcgaaggtcaggaagacaaccacaacgggcgaagggcgcatggcgaaagccgtagctgggaatacgtcaacttcgccaagcggagaccatgtcggagggccgcacgggcgaaggtgaagaggcgaaagcctcggcacagaggcacgggtttcaccaaggtaccgaacctcatcgccaggaggcccagcgggccgtcgagccctcgggagacttcggcaaatagatgggccaagccatttatggcccaataggggctcgtacatgtaaaagacattgtgtacccctgataatgtccctatcataagagtaaccatgtaaattctcctgtaaaacctaaaccctaaagggggagcctataataggattataaatagccccctaagactatgtaatggggggatcaaaaaaattttcaccaagtaatacaattgttcttactttcaaccactgttgagagaaccacgcctttctgcgtgacgcagttgtctattcgacaacagctggcgccgaccgtggggacctctgagcgaaaccactaagagtgagcgaaaccactgatgccaccgaagaaggtcggcaaggagaatgttgccaagcggaaggaaggtggaagcgaaggtgagacggtagctgaagagggagcagagccttcggcctccgagggcgaagctggagctacatcgcctccgctggggccgccatcctacccgccttcggcacccacaacttcgtccgatgtggaagcggtgaaggcggtagcagcggcgaaggccctccaagtcagagacgcggtcttgtcatcctatgcaccatgggcgccttcgatcgctgctttcgcccaaccagcttcgacgtcggcagcgatcactacctcacaagccaatgccaacctcgaagctcaagctgaagctgacatgggggccatgtgccaaaacatggccaaacttcaagacacgcttcgccagatgcaagagcagcagcaagcgtatgagcaacaagacaagccaaggcccacacccaatagttctacactcagccccaagtcactcctccatacgctgcgtatgaaccggtgtacttcgccaggcccgccccagccattgtcgtgcgcctgacacctcaagtgatccaagcaccggttcgcccggcggtgcctcaagtccagtacccgaagcccactcacacaccgcaagcgatgatggaagcagcttcaaccttgcaggctcaattccaagcttttttgcaacaactcaaccagccccacaacaacttaccaagagcttcgcctccggctcaggccgagggaagcacaactcagggtacatcggcggggcagctgatgggacagttcgccttgccaagtcaagtccaagggccttcccctcaaggtccaccttcacagttcgacccaagtacaatggcccaagcaccaacaactttcgcacaagccgtatccccaggatacggaatccccaggatacggaacagcccaactaccgaatcaggcctagaatcaaaccatgatcgacccagccacgacggtacaagtcacttcgacagaccagcaaaatcaggaaatgatgttcggcttaacgcatcaaccgttgcccacagctcaaccacctatgcaagctgtggcttcgccgttcgcacttccatacccacaattgagttggcctgctcagcaaggggctatgatcaagccgcgaactgaaaagggtttgcctctcaactgggggatcaagaatcaccccatcccaccccaattcaagtacccccccagtgccacggtactcgggagagacagatccgaaagagttcctgtccatctacaaatctgctatcgaagcggctcatggcgatgagaataccaaggcgatggtaatccacctcgcgctcaatttcatagctagatcttggtatttcaatttacctattaatagcatttactcatgggagcaattgcgcgatgtttttgtccttaacttccgaggtacctatgaggagccgaaaactcaacaagaccttatgggcattcgccaaaggccaggggaatcggcaagggtgtacattcgccggttttcgcaggcacggtgccaagtgcaagatataaccaaagcatccatcatccatgctgcttcggcctgtttgctcgagggcgaactcacaaggaggctcgcgcgaaaggagcccagaacgtttgaacacctctttcgcataattgacggatatgctcgaggtgaagaagataccaagcgaagacaagagatacaagccgaatacgacaaggcagccgcggctacaacagccaccatgcatgctagcacccaagctcaggtccaagctcaagttgtaagtccaacacccgcccaggctcatccagtaccttttgcgaaccaagtaccgcatccaaggcctaaccaagcacccatgacatggaagaagtttaggaccgagcgagctggcaaagtggtgatggcagtcgaagaggtgcaggccctccgcaaagagttcgacactcaccaagcgggcgggcaacaacaaccctttcgcaagaagattaagaaggacctgtactgcgcctttcatggatgctcttcgcacacgaccgagcagtgtcgaaacattcggcagcaacgcaatgcttaagtgccaaggtcgtagcagccgagggtcgaagaggtaccacgtgaagcagccacaaaccaggcaccccaggcggagcaacgccaagacgtgcagcgaagagtgattcatgacataacaagatttgatcccccctcacaagtgtcgaaacgacaaaagaagatgcaacttcgagccgtgcacaatattgtctcagcaggtgatggggttccaagatacttgtcgcagccaatatccttcgggctagaggacaccgaaggagttcttttcccacaccaggacatgttgttcgtttcggcagagatggctggctttgaagtacggtgcatcttgattgatggagggagttcggctgatgtcatgttcgccgggacatatgccaagatgggtttgccaactttggcattatctcaagcaccgacttcactcagaggttttggaggcgaagcggtgcaggttctgggacaagccctcatcaaagttgctttcggctcgcaagagaacagaagagaagaagagatactcttcgacatcgtcgacatcccctacaactacaatgccatcttctgtaggggcactttgaccaagttcgaagcagtctctcatcacaattacctcaagctcaagatgcctggcccagccggtgtgatagttgtaaagggttctcagccttcggctgtcgcagcaacccctttcgacagggaggtccacaccttagaggtcgaagggcaggaaaaagcaaagtcaataccgaagcccaccccacacggcaaagtcatccagcgacagatagatgattttgaccccgccaaggtcatatcactcggtggagacctaagtgagcaagaagtcgatggcatactagccgtgctaaaaaagaacattgacatcttcgcttggggactagacgatgtggggggcgtttcgccatatctcatcatgcactacctcgcagtcaaacctgaagcaaagacgaagaagcagaagctaaggaaaatgtcggcagatcgccaagaggcggcgaaagtagaggtgaacaagctactgagagcaggagttatacaagagattgaccacccagagtggttagcaaatccagtaccgatgaaaaagtcaaacggcaagtggcgaatgtgtgttgacttcacagacctcaacaagatgtgcccaaaggacgatttcccattaccacggatcgaccagctggttgattcgaccgccggttgcaaactcataagcttcttggatgcatactccggatatcatcagattcacatgaacccgacagatatccccatgacagccttcatcatgcccttcggcactttctgccatctcagaatgtctttcggcttaagaaatgcaggggttacgttcaccaggttggtgtacaaagtcttggggttgcagctggggcgaaatgtcgaagcctatgttgatgaaattgttgtaaaaagctgcaaagcttttgaccacgcatcagatctgcaagagactttcaacaaccttcgcactgctggcatgaaactaaacccagagaaatgcgttttcggtgttcatgccggtaagttgttgggattccttgtgtccgaatgggggatcgaagcgaatcccgagaaaatcgatgccattcagcaaatgaagccaccatcgagcgtacgacaagtacaaaagctcgcggggcgaattgcggcactaagtcgattcttgtcaaaagcagccgaaaggggcttgtcatttttcaagacccttcgaggggcaggaaaattcagtttgacgcccgaatgcgaaacaacctttgatgagctcaagcagtacctccaaagccctccggctttggttagcccggtgttggcgggtgttaaatgtcgattctataccgccaacatctgcataaagatcagataataaaacatccaacatagagataggcacttaatctcacatattccacaggtgttggtgtatatttgtatgcagatgataaaccctgaaggtgggaggaaaatcagactaaagtgaggagaattctgtatccatgcaaggatgggttgtgaacttcatcgaaacatccgtaaatcagcccaaaataccaagaaatggatagaggaggaccaggggaggactcgggccaaaggccacgctagatgggcccagctcaggttcggccgaaccccctggttcggtcgaaccacaatctcagccatccaggctggggtttggcatggacgtcccagatgcatccctgatggcggttcgagggcacttcggacatttccccttcgccaaccgtcatacctattgtactatattgtactatattatataaggacatcatctcactcacttcaacatacacttccaagcttgagctgaattataagaggctctattgtactatattgtatactagaataggaagagagtagagtaggagtcggaagaattccgaagttgtcggtaatcttctcctatttcttttattctgtttattactctgaattcaatataatattcttcttgagtaatttagatttatcttgtgataattatctcttggttagttcctaatcagcatacaggattattgttcgctataatcaactaaagtatagtgattgctttggtgagttataaacactaaagtagatattaatttattagatgtggtgtttaggtaattattatccagtaattgctgcgtatcccacaatatgttgaggtgggtgtagaggtggtgacagccctcgagatcactgaagtcctccctgtccaggtacgtagtagagtgacatctgggaacagcgggttgccagtgcctgaagtattgcattaggattaaaattaagctttccctggacactgtttctcactagtaaatcctctctatcctagcctatcatttgcttggtgtccttggatgaactggaggaagctctgatcaaacacgttcccttggattcgataccgttggaatactccgtaggggaagtgctatatcggtatatccgtgcgcttgcggattttatctgtaaccgtatcaaataccaacaagcatttctagtgccattgccggggaacggttgctaatcatttccgaacccagttcatcttcgtatcctttttcattttttattcttccttcacccctgctatcctagagaagtattcctgtcaacacttctcgactatggagcaacctctgtttgagctgtctgctcctcggggcgaattctatgagccacctccttcatcggagcccatttatacaactggctatgaaattcgtcctaagctaattagtatggtcagggaaaatcctttttctagctttgatttagaaaatccctaccatcatctgcgagactttgaacaagtttgctcatgccttaagattcgtggcatgagacaagaaattgtgctgtggaaattgttcccgttctctcttcaagagagagcaaagcaatggtacacctctaccgttggatgtgtaaacggtagctgggaaaagctgcgagacagattctgtcttgccttcttcccagttacccgtattactactcttcgagtagaaattctcagtttcaagcagatcgaaaacgaatcaatcggtgcagcttggtccagattcactaatttagtgcagtccggaccaaccctgtctttacccgagtatgtgcttctccaacatttccatacgggtttggataaggaatctgcattctatatggacataaccgctggaggatcattcatgcacaagacaccgtcagaaggaaaaacgattttggatcgcatcctagaaaacacttccttcatgacgcagtccaatgaaccccagccggaggcatccatgtccaagatagaggaacctctaaccatcgagccacttgctgaaccatctacttctgctagctcgattgatgagaaggttcctgagcagccgtccgtcgagaatgaagaaattcagacttttgattgtgccgcaattatgtttagggaaggttttgacgaagactacggcaataccctaaactactttagtaagaggaaaccacccgttcctttgtcacctcccgatcctatggaacttgggttcctacgagaaactgtccgggagctgacatccataatgagcgacgaatggctaagggaggcagagcgttcatccgaagtaattcggataaataccgctccccgaatcattccttgacatctggaagggaacgatgtcggcattcgcttatttgagtgataaggcagtgaccctgataaacaaattcttcaagcatccgaacggaaatatcatcgaaggatttgggattgtacaaggcgtgactgtctgctttgaagatagggaggcgatcttagatttccacgtctttgaaatccaagactttgatatcctaatcgggctgcccattgagcaacttctcatcaacacaccccgattaggtagcctcaaaataacactgggagagaatgaattctctattccattcttgcgggcaaggatcaccttgaccgaccctctcccaaggcccttctagaagatgaggtccccgacttcatcaaggaagaagcagatcccggtgagactctcgacctgccaatcgtggaaccgctacctcgacctctgcttgagcttaaacctctacctccaggcctacgatatgccttcctacacaaagacagagaggctccggtcataattagtgacaagctctctgaagatgagactcaacgtcttcttactgtgttggaaaagcatcgttctgttcttagctactcgcttcaggaccttagggggattaatcccgcactttgcacccatcgtattcctattgaccctgagagtactccctctagggaacctcaacgacgactcaataatgcaatgcgagaggttgtaaagaaagaggtcttgaaactgctgcatgccaggattatctatcccgtaccatacagtgagtgggttagcccagtccaggttgtgccaaagaagggaggaatgacggtcgttgcaaatgctcagaatgaactaattctgcaacaaaccgtaaccggatggaggatgtgtatcgattacaggaaactcaacaaggctacaaaaaaggatcatttcccgctacccttcattgatgaaatgttggaacggctggcaaatcattccttcttttgtttccttgatggatatttcggatatcatcaaattcccatccatccggaggactagagtaagactacgttcacatgtccatatggcacctatgcgtatcgtaggatgtcctttggactgtgcaacgctcctgcatctttccaaaggtgtatgatgtctattttctcggacatgatcgaggatatcatggaagtcttcatggatgacttctcggtctatggaaagactttcggtcattgtctgcaaaatctagacaaagtcttacaacgatgccaagaaaaggacctggtgcttaactgggaaaagtgacatttcatggtccgtgaagggatagttcttgggcatcgagtgtccgaacaaggaatcgaagttgatcatgctaaaattgatgtgatagatcagcttcctcctcccgtgaacatcaaaggtatccgcagcttcttgggtcatgtcggcttttatagaaggttcatcaaggacttctctacaatcgccagacccctgaccaatctgctagccaaggatgtgccctttgagttagatgacgcgtgcctaaaatctttaaaagtttctcaaaaaggcactcgtctccgctccagtcattcaacctcctaattggactctacccttcgagattatgtgtgatgcaagtgacttcgctgttggtgcggtcttgggccaaaccaaagataaaaagcatcatgcaatctgttacgctagcaaaactctaaccggagcccagttgaattatgcaactactgaaaaagagctgctcgcggttgttttttctatcgacaagtttagatcttacttagtaggagccgaggtgataatttatactgatcatgctgctttgaaatacctgctcactaagaaagatgctaaacctcgtctcttaagatggattttgctactccaagaatttgacttagaaattaaagatagaaagggagtagaaaattctgtagcagatcatttgtccaggctgcagatcactaacatgcaggaacagccgatcaatgatttcttaagagatgacatgctgatgacggttagcgactctaacccatggtatgtcaacatagtgaactacatggtatccatgtacataccaccaggggaaaatcaacgaaaattgaagtatgaaagtcgccgtcacatatgggatgagccatacctgtatcgggtctgctccgatggcctactacgaagatgtgtgccaactaaagaaggactaaagatcatagaacgatgccatgccttaccctatggtggccattacggtgcattccgcacccaggccatgatttggcaaagtggtttcttttggccaacaatgtaggaagactcaagagaattcattagaagatgcaccagctgccagaggcaaggaggaatcactactcgcgatgcaatgcccctcacatacaatttgcaagtcgagatattcgatgtttggggtatagacttcatgggacctttccctaagtctcgcagctgcgagtacattctggtggcagtcgactatgtctccaagtgggttgaggctatgccgtgcagtgccgcggatgcgaggcatgccaagaagatgttcaccgaaatcatcttcccaagatttggtacccccagaatggtcataagtgacggaggttctcattttattgacaaaaccttccgagaccagtggtcaagcagaaacattaaacaaacaaatcaagaatattctgtaaaagacggtcaacaaaatgggaacaggatagaaggatagattgtcggacgcactgtgggcataccggacagcatacaagacacccattagaatgtccccacatcagatagtttacgggaagccatgtcgactccctgtagaacttgagcacagagcatacttggccatcaggaactggaacatggattttgagggagcaggagaatggagaaaaatgcagatcgctgaacttgaggaatggagagaaaagacttaccacaacacaaagatatacaaagaaaagacaaagcgctggcatgaaaaaaggataaaaattaagaaattcaagccaggagacaaagtactgatgttcaactccagggttaagcttttcgaccatggaaaactgcgcagcaaatgggaaggaccgtttgatgtcatcgacatctcttcgcacggggcaatcacactccgcgacgactcaggtaacatatttaaggtaaacggtcaacgcctaaagattttccatgagccaaacgaaactttagatgaagaagtggatgatatagaattaattgactatgagccatgatcccatctattgcatgcttaaaaccctgtatagttgtcatttttgtgcttagaataggtttttgtgggcctaggaaaaatttgggggcctgccggacccaccagggtttggccgacctgatggtttggccgaaccggggcggcccccgatcggccccaattttgaatggcagtctcccccgctcatcctgagtctgtttagatgcgagttaggaggtagatcagtcgtacctgaaccagagcccctgttcttcctcctctctctcacatttttgcaacctttctctccatctcaacccaattcccttgctccaccatctccaactcaccgatggctggcaaatctttgatcccattcatcggctcctcaaattccacatacaacctcgacggaaagccgacactgacgaatcaattaatcccggtggagcactacacaatggaaggggtaaatgcactgtgggcgcagccccttgcaacagtgccaggctccgtagcaaatttggagcccgtcggcgagctccctggttcggccgaaccaggggttcagccccccgttcggcagcgcgatccctctcccctcgacatgtcgcaagaatgaaaatccggggggattcgcctgcacgatggccgactatgggagagctcggcttgttaaaggcacgatgccttttccaagatgataagaaggccactacgcctcccgccgagcattatgtgggcaccctcttcaccaaagcaagggatgaggtgctccacaagtaccccacacccaccgctactccatctactccaaagggggagcgtttctgtattcagggagtgcgaactctcggcggtgggtatggtaagggtctactccggcctttgacggcatcagagaaggagggggcagcggagtcctgtagccctccacctgtgatggtgaagcgtcatttgatgccccctccaatggtgagggctcccggctaattccaagaggatgaggtgtaatcgctggagcccttgatccacaagctcgccgcacaagtgaagaaactccgcaaggagaacatagaggttagggatcgcaatgcggagctaggggtagaacttgctgaacttaggaataattttgataccctgagtcgcggtttgtgctctaagatcaagcgtgcattcatagagatgggaaaggaaaataagtattatgctaattagatgtttcctttcccatgaataaaatagtagtaggtgcttggttttatttttccagtcatctaagcacttgctataaataatgtggctcattggtgttaaccctaatgtttgccaaattttgtttttttatgtttaataaaattcaggttttgaataagtgtgggggagatatcccagcttctgacgtgcatatgctctgagaattgttgaaatatctcaacacctggaagcactgaactatgcagaaagttgcagagggattaggcactagagtggttcggccgaaccaccaggttcgaccgaaccaagtctagccccaacccttctcaactttcacaggtaagcaggtgagcatgtcttttatctgaatatctccaccatggtgtagtactagagctgaaaattcagaaacaattggttcaagcataagtgaaagataaaatttccaactattgaaattcttcaagtgattgatcttgtatatttattattctcagctgaacttgtgcttgtgaacaaccatccatgttaatggaaccttatgcatctaggtaattgctttatgtgagatgattaagatgaaaggaatccttgtaactttgttgtgactcttgggaatttgttttcaaaaataaaactgttttaaaagctatatcctccaattgactttaccttatacttaccaaggccatatgcaagtacattaatgatcaaccttatcatgcatatgattgcttgacattatattgagcttagtcataattgtgtgacttgtgttagatatctttcatactctcatgatcaaggggtcattatcatttccacatataaaattgagctaaacttctacactggaagttggctttccacacaaatattcattcaattaaactcctacaatgaactatgcattcttctcctagaaaagttcttggcaaaaataaaatgagaaaaggagggaaaggcatggctatgaaaaaaaacgagaagaaagagacctatggaaataaagtttgctctcaaaacattgagcaaagaaaatatagccatgccccctccacaatcatgccaaaagaaccaatttggagagaaagtgtagaaaaaaggaaaatcatctctttattccataattccacaaaatattttacttttccattttccacctttatttaagacccttgatctaggagtatgactgattatcttcttgagtccatatttttggctttgcaatatatatgatgcaggtatgtcacaatttatccctaccaagccccacatatcagccttagaatagggatgaattctggcacatttttgccttggagaggatccaaaaagaaaatatacatctttgagagacaagagagaaagtcaatatgaggaaaagagctagtttgcgaaaattcatgaaaatcccatgagtctgacagagaagtaagaaggactggaatcaagatcgttccatttatcaattactcaacatggtaagatagccactgaaaaagttcacaggtgcaggtatggttgtgaatgatttatatgcttgattcatcttttgaagaaattcattcacaggtgcaggtatggttgtgtgggtggtttttttggcgggtgttaaatgtcgattctataccgccaacatctgcataaagatcagataataaaacatccaacatagagataggcacttaatctcacatattcgataggtgttggtgtatatttgtatgtagatgataaaccctgaagttgggaggaaaatcagactaaagtgagaagaattttgtatccatgcaaggatgggttgtgaacttcatcgaaacatccgtaaatcagcccaaaataccaagaaatggatagaggaggaccaggggaggacttgggccaaaggccaggccagatgggcccagcccaggttcggccgaaccacaatctcagccatccaggctggggtttggcgtggacgtcccagatgcatccctgatggcagttggagggcacttcggacatttccccttcgccaaccgtcatacctacccctatataaggacatcatctcactcacttcaacacacacttccaaccttgagttgaattataagaggctctattgtactatattgtatactagaataggaagagagtagagtagaaggagtcggaagaattccggagttgtcggtaatcttctcctatttcttttattctgtttattactctgaattcaatataatattctttttgagtaatttagatttatcttgtgagaattatctcttggttagttcctaatcagcatacgggattgttgttcactataatcaactaaaatatagtgattgctttggtgagttataaacactaaagtagatactaattgcttagacgtggtgtttaggtaattattatctaataattgctgcgtatcccatagtacgttgaggtgggtgtagaggtggtgacagcccttgagatcactgaagtcctccctgtccgggtacgtagtagagcgacatctgggaacagcgggttgccagtgcctgaagtattgcgttaggattaaaattaagctttccctagacactgtttctcactagtaaatcctctctatcctggcctattatttgcttggtatccttggatgaactggaggaagctatgatcacacacgttcccttggattcgatacccttggaatactcctaggggaagtgctacatcggtatatccatgcgcttgcggattttatctctaaccgtatcaaataccaacacccggtagcagggagcgaactacggctctatctggcagcttcgcctgtggtcgtcagtgcagctttggtacaagagaccgaagcaggtcagaaaccagtttactttgtttctgaagctctccaaggggcgaaggtcggatacattgaaatggagaaactcgcttagaccctggtgatggcttcaagaaagcttaaacagtatttccaagcccatagaatcgtggtaccatcacagtaccctttgggcgaagtgcttcgaggaaaagaaatcacggggcgtctaagcaaatgggccactgagctatcacccttcgacctgcactttatcacttgcactgtaatcaagtcccaagtcatcgtcgactttgtggccgaatggacgcctgcgactgtcccagagcccaaaccggtcgaacaaacatgggtcatgcactccaatggttcatggtctcataagggggcgggcatcgctgcaatcctaacctcgccatgaggtgtcccaattcggtatgcagcaagactgcagttcaacacaaccaacaacacagcagagtatgaagcagtgttattgggcctgagaaaagcgaaagctttgggcattcggcatttgctagtccggacggactcaaagcttgtcgcgagccaagttgacaaatccttcgaggcgaaggaagagggaatgagaaagtacctagaagccgttcggtctatggacaaaagtttcgccggcataacggttgaacacttgccccgaggccagaatgaagaagccgatgcattagcgaaatctgctgcttgcggaggaccgcattcgccaggtgtcttcttcgaagtcctttatacaccaagtgggccagaagatagccaagacatcatggcaattgaccaagtggagccgggcgatgacccaggcgattggcgtacgcctttcgtcaaacacctcaaagagggatggctgccagatgacgaagcaatggccaaacagttgcaaatcagagctgtgaattataggctaatctctgggcaattgtaccgaacagggatgctgcagcctatgcttcgttgtgtttctttccccgaaggtgagtgatgaactact

SEQ ID NO: 24972 - DNA, 23522 bp, Oryza sativa
gaaatcaaaggtgttgttgagataagcgcaaagtaggcccaagtgcatacccgaacgaggaggctcttcgccgcggtgcatccttcgacaaactcattcagttcggggaagggcacaaggcctcccaccggtgaaacaaggtgtcccaccccctgcacaatagggatgagttccgcacgagtctcgaaatcggaagagacgaagcggggagcagacagcgaattgtccgaacccgaagtttcgaccgccgcctgcttcccccgcgcgggtgccaggagcgaaaggtgaggcccagggagggagcattgaaggtggcgcaagccgccgccacagcaccttcggcagatgcagtggcgcccaccatgaagctttgcacctcctcaccagcagatccagcgacagcagtggggaccggggatctcgaggtccgctcagccagcaaagtgggggtgccatgcgatgggtcatcatcactgaaagcattcccaatttgcacgacccctcgcgcacgggcctcggttccaacctcggtccgaagtgggggaacccccgcgatcgcggtgagagtttccgcccttccacctctttcaagtgaaggggagatgagctagatgcaacccctgctttggcatgggaagggctcagagtgtaacggggagacatcaatttttccctagtctcatcgacggtctcctcctccccctcctcttcgtcttcgccctcctcctcgtcatcggcgtcggactcaactgaggcagccgccttacgctttcacgaggcagccttacccttcgcgcgcttacgcttctgtgaaggctcaacatcgtcagcgtcaattaagacggtctttgtagggttcgcccgggccggcagttcgccggagaagacacgattcgcccggccgcctgcctggcgggagagcaattgactgaactaatttatggtgagttcgccaatcatcttccgggcctcgctttcggcctatggcagcgtaagaactgtcgaaaacaatagtacagggcataagtgtaggatcgagatgtcgactagaggggggggggtgaataggcgatttaaaactaaatgacacctaatcaaaactaacctaagttgctaggctcagtgaggaacaactctaactaagctactaagttatgttttgcaaacctagggtgatagtggctcaattatatctctaggaaagtaaatcacactcctatgtcaatgtctctagtgatatgatcttaagtatgtctctagaaatgtaaattgcataaatgtaaatgcgacaatcaaatgagacaatgagacaagagatttttcaccgaggttcggaaactcgccggtttcctactcgccattgaggcgagcccaactccaccgctcaaccacgaagccaccgcacgcccccttcgtcaaggggtgggcaaggcgggagccggcccacggagaggactacccaagcctcgatcactagggtagttcttccttcactccgaaggtggtgaactccaaaccactcacaaaccggcgccgggcctcctccacaatcttctcggagaggtcaccgggcaactcctccacaagccgtctaggaggtggcaacctccaagagtaacaagtaatgacccggcgtggagatgatcaagtgccacactagctctacaatggaagtaaatgcacttgactcttggctaaatcaacctcagtcactacaatggatgaacactaagctcaatggtgtgtgagagaggtgcaaggggtgtatgcaattgaattgggtgccaagagagtccccttgctgctggtggaggagtatttatactcccacccaccaaaactagccgttgggggtgaaatcccccaactctgtgctctgccagtctgaccggaggaatgtggccggtcagaccgtgctactctgcaacggctagaaaactagtcgttgtagctctgtcagagggccccatcggcatggccggtcagaccgacgttgagtggccggtcagaccggcattggctcggtcaaaccgccatcagctcggtctgaccgaatacggctccgtcggctctgtatcggccaccccgagcaacaccatgccggcctccagggggccggtctgaccacacatgtgccgccggtcagaccggccatatgcgccggtcagaccgccgttttgtggccgattagactggccagggcactccggtcagaccgccactctgcggccggtcggaccgcccctggtcaggccgaacccagtgaagggtgatatgagaagtgtgtgtgtgaaatgtgagcacaagtctaaatgcataatgacctaatgtggcaattaaaatcatctctttgctaggtcattacccctcttaatagtacggcgaaactaaaaataaactagcaaatttgttcgccctatacctcgatcaattctaaattaaagcgctagttttaccgtcttctttccctttactttgcaccgtcaattttaatccatcgataatcatccatgcgcacatgtgacgtggacctaacttaaaatatatagctcaaagacaacggttagtccacaattagtgcttgttattaattaccaaaattagcaccgggggcctagatgcttcaatctcccccttttttgtaattgatgacaaacaccacaaatatatataatcaaatttaaatcacacggacatatattgcaatgacaagcaaaaagctccccctaaacatatgcataacaatcacaaatagcaaatatggagccaatgcacatttcaatttcacatttcaacatagcacaaacacaagagcaatatctcaatgtgaacttcaagaaatatttatccatgagcataagatggtcacatatatatcaatatcacatacaccatccatcatcgcacaagttcacatcacttaaccattcaaatcacataagttacaaatcatcttaaaagggctcacaaataaatataggctattacaagaccacgaagggtccaaatgacatatagatcaacaaaacgataaagaacacacaatatagagtaatagtccatacccatacataatatagcccaaaccaccttaacctattagatatgaggtgactaacctcactaccactagtcccaacccacaagacataagtatatatatttcattgttaacatatatttcgatctaagtgatttatattatctcagcatgacgtccgatctatcccaatcacttgatttaagtatgtatcgacataacgattatatattgttaatatctacagccgatcgaatagatttagtcctttcttatttatttacatctgccgatcgattcaactatgacatcgcctcagagaaaaatgatatgtcatcggcaattagccgatcggctatcatttatggttttaaccgcggtttatttgtctttatttcttgtttattgctggaccaaatcaactggcacgctcacgaacctaaaaggcaagatttttggacctgcactgaagttaagcagatcttccaggcctcgtgtttttgcatcaacacgcttttggcacgcccagcgggatccgataaacttgtcaggggacaagcaagctttgaagtcaacagatcctcaaaacaagccgccaaatccagctgggtctgaagttcacgaaggaaatattattctagtcacactagacaaattgtcggctgaacataggcaggagcttgaacagatgatgagcagcatgaaggacaagttcatgaattcattcaaagaaacccgccaagggacaattgtccagaaatacaagttgaaagtggtcgctgccgatgaagttggttcaagctcagctcaaggcgataaaggtactgctggtgaaccaggcgacaaaggtagtggtttttaggagggcatggttgaagatcttggtccagatggcagtggattacaaccacagtttgacaacttccaagatcggattgactacgctatgcaacatgctttgatcaatcaatcaggagtcttagtcaatactttaaccaacatggtgaaaacaatggttgatggcacaatagctgagcatcaagttacagaaccagtgtatttgccaggtggtgtttttccaaactataagcctttggttacaggcaatcaacagggttcttctaacacaccatcaactctgctgatggcaccggttacaacttctgctccagctgcaccatcatcggcacaaaggcaaatgaccaatcctcgattgtatacaagagaacagccacagcatggtggacaaaacatcaatcggctaactcaggagcaggtggctgctatgttctttccaaatccaccagctgccaatccagcactgccgagccagcatatgccaccaaggcagcagattactcagccgattcaatagcaaagtttgctaaatgcatcagctaggttgaggacacctgataatcagctaaggcagcatgttgcaactcaagtcgtccttgagcacttggttcataatgtgcaaccagatcaatcagttatacctcaaattatccctgaacatttggtgcgtaactgtcacgcccggaatttctatccaaaattccaaacgcttacatgtgtgtgaaccctcgtccaggaatcagccgaggcacacaataacaaattgataatagagtacaattattactctaattaataagcgaataaaatgtcattacagaggtagatagttcctctcaatcaataaagatctaagcagtggaaaataagataaacggcgcagacggctccactccacaagcagctcgaccagggctacacctaatcctccacaccattagcaccactgtagaactcttcctctgatgaatgattgcaaggtgagtatatgacatactcagcaagccacgcagcaaatatgcaagtgcacaggataacaaaggatggcatagtatagggctcatttgcaaaagcagcatttagcaaacatttgagaattataaaacagttaagtgataattaaacaatattaatccaacactatacaacataccctgttgcataggcccaaccattctgaacaaccatacccggctgtacagatctatctccaaaccaggaatgtaccattccaaaccaggagctaatcaaattattaccagttatagcatcatttattatggtgagaagtgtgagactaatcacgaaagacattgttagacccgcccataaccgcgggcacggctattcgaatagttttactctgatcagaggtgtaccactgtacccacaagacacagccccatatcatgtcaccatgtgccgcaataccaccacggtacctcggaaaggagctgtgacaatacccctcgtacaacacaatccactacagcgcacctttcctggatcataatcacccccttataaacaaggcatggactccccagcgacccccgtgggcttatctccgccacttctcagtctggtgctccgcaatgaaccatgctatacaaaaggtaaagccgttgcccacgctggcttgtggttggcacggttaatgtgtaacgtcccgccttcccccaggccgggcccgcttacatatgatagctttcataggtcatagactgccctcacagaccaacacatgtcttttctgcacactttgtcctcactcgtgtgcacccgggaagaatttcccggtcggtcacccatcccaaattgctccaggccaagcacgcttaaccctggagttctttggagattggcttccagaaaagaagttgcaacttgttgatatgagtattctattaatcctattaagccctaggccgggatgttacaccctcaccccttaagagagatcgacgcccccgtcgatcaaccctaggctaggaacgtcctctcttggccacgtccatgtgtccagtgccagcgcatgtagtcggctctgataccattttgtaacgtcccgccttcccccaggccgggcccgcttacatatgatagctttcataggtcatagactgccctcacagaccaacacatgtcttttctgcacactttgtcctcactcgtgtgcacccgggaagaatttcccggtcggtcacccatcccaaattgctccaggccaagcacgcttaaccctggagttctttggagattggcttccggaaaagaagttgcaacttgttgatatgagtattctattaatcctattaagccctaggccgggatgttacataatgtttcacaaccgaaactcgtgaaccggtccttaattgtcatgagcacgaccatcaaaactatgtgctcacaacccaccattatcaagttttagttggcaagtaattaattaacaaatcacgattgaccatcgtgaactatcattaagccatcattaaataatagtgagtcatatgttatcccaatagtgtgctaatgtttctaagcatggctaagcaatcacatctaatatctagctgaaccaatatatagagctcaactagtcaagttataataacccaaggtatcaaggaataaagtaatcaagtacaaaagggccataacaaagaataggttaattccacccaatgacattcgaaaatagatgcaatagttgaatagaaacaatagctttaaataggatcaacatgctcaaagggttgtttgggatctgtgtgacttgccttgctggccttggaactcttcaaaatcttctcctgcgaaaacggactctccggaaacgtcggaatctaaacagaaaagagcaaaaacaccaaaacagcacataaacaagcatgaacagtacatgtggatatttttaatatgtagatctcaattttagaaaaatttagagacttgaaccaactaaatccgagctaagatgaattagttatgaatttttgaagatttaatcggattaaaacacttatattgattttaattgaattatgacgcaataatgaattatttttgaaaaggaaaaagagatttattgcgtcagcggctagggtttgcggtagaccgggcgcacggcggcggttcacgggaacggacggccgagatcgatcctatccaaaacggacggccgagatcaatcgggtccacggcgagtctacgggaacagcgacaatgacgtcagcgatgacgtcagcgatgacgtcagcaccggcggcggctcggcggctcgggagcacttgctcgtcggcgaacgacggcgcgaaggcgcgaacggagggcaccaacgggtagaggacgacgcggcgaactcaccggtgaccaaaacggcggcggaagatcaacggacggcgacggcgtcgaggtcgaaggggcggagaagatcgggtcgacggcggcgacggtcctccggcagtcttcagcgacggcgaaggagcggacgaggatggcgacgacttggcgaccacgatggcgaccttcccgagcgacggcgacgactggaacggcggcggcgcacggctggagcggcggcgacgacggcggcgctaggttacacggcgctggggcgctaccggcgacgagaggcgaagacgagggtggcggcgggcgggtagaggagacaccggggatccttttaaaggggctaggaggcggcggcaaaggcccacggcaaccggcggcgagatggaaagctcgggctcggagagagagagaccgatccgaatcgacctcgaatcaaacactttccaagcgattttagccgatgattccaaaagagaaaaggtagaggagatcccgaagatcattttccctcaattgatttcaccggaaacggaaaggatcggccgaatttggaaggagacggcggcgcggctcggctagggtttcgggcggcggcggctggaggttgacgacgaccccgacaggcgggccccacctgtcagcgacgggaacgcacgcgcgcgcgcaggcgctgctggactgggcggacttggcccgagggacagagagagagggttttgggccgactttcggcccaaagccaaaagaagacttttaaaacctttttcaatttaaattattcatgaaatgcaattccatttattaaaaatacttcctcagctcaaataaatcccagaaaaatctaggaattatagaattaagcaaagtatttaatgaaattttatctggccccattttatattggaatttattatttaaaattagatcttcttttctagacttttaaaatcaattctaataattccaattaaacaacaatttatatatttggaatttttagggtgtgacaaacctaccccccttaaacagaatctcgtcctcgagattcgaaagaactggcgaacagatgcggatgagctgacttcaattcatcttctcgttcccaagttgattcttcttccgagtgattactccattggactttgcaaaaacggataactcgatttctggttcttctctcatctatttccaagatacgaattggtttctcaacataggtcagatcctcttggacttctatttgttcaagattagcttcttcggtaggtactcttaaacactttttcagttgtgacacatggaacacattatggacccctgccaaagattgaggtaactctaactgataagcaacctctcctcttctactgacaatcttataaggtcccacaaaacgcgatgccaattttcctttggtgtggaaacgatgaactcctcgaagaggcgtgacacgaagatacacataatctccttcttcaaaacttagatctctacgacgattgtcggcataactcttatgacgagactaagccactcgcaatctttcttgaatgatctttaccttttcttctgcttcccttaggatatccgtcccgaaaacctgacgttctcccgtttgatcccacaaaagcggagtgcggcacttccgaccatacagtgcttcgtaaggagccatctgaagactagcttgataactattgttatacgaaaattccgcataaggtagattcttatcccaacttccaccgaagtctaaagcacaagctctcaacatgtcttccaaaatctgattcaccctttcggtttgtccgtctgtctgtggatgataagcagtactaaagttcagcttagaacccatctcttcctgaagcttcttccaaaaatttgaagtaaactgactgcctcgatcagacactattttcttagggactccatgcaaacacacaatccttgccatatacaattctgccaaccgactaccagaatatgttgtctttactgggatgaaatgagccactttggtaagtctgtcgactatcacccaaatagagacatgacctgatgacgttctgggtaaaccactgatgaaatccataccgatttcctcccatttccattctggaatcttcaaaggctgcaacaaaccggcgggtttctgatgttctgccttgactcgctgacaaacatcacatactgctacgtattctgcgatttcacgcttcatacttgcccaccaaaatctttccttgagatcctagtacattttggtactaccagggtgaatggagtataaggtatcatgagcttctttcagaattgcatcttttaaatctttgttgtcggggacgcagattctctcacccaaccatatagttccttgctcatcctccaaaaaaccgatagcttttcctcttctcatattcttcttgatttcttgaatatcatgatcattaatttgtgcttctctaacttgatcaattagtgtgggcttcgcttctaaggctgcaacgaaacctctaccgacaattcccaaattcaatctttcaaattccttacataactccaatggcaactgtcgtccttccgtagcattgcaatagcctttcctactaagagcatctgctacaacattagcctttcccgggtgataatgaattcccatgtcataatccttaattaattccaaccatctccgttgtctcatgttcagatccggctgagtaaagatgtactttatactcttgtgatcggtatacacctctgtacgagtaccgaaaagataatgacgccaaattttcaacgcatgaactactgcagctaactcaagatcatgagtagggtagttcttctcatgcggacgtaactgacgagatgcataggcaatcaccttcccatcttgcatcagaacacaacctaacccaagtttagatgcatcgcaatacacttggaaacccttctttggatcaggtaaaatcaaaataggagctgatattaagcgactcttcaattcttgaaaactctgctcacattctgtcgcgtcccaaaacgactctaaaatacatcctcgaaattgtgccgagaataattaaaattcatgtgaaagccttcaacaattaaaatgtgcaaatttaaaaagtcaaataaggcttggaggatttttgtatatttcctaaaagcctaaaatgcgtaaataaattttagtggaattttcagagcacaaataataattgagaagaaataaacaaagttgaaaaggttttataaaaagaaaaatccctaaaagtcttcttttcccccccttcccttcttgggccggctcggcccaattccctccctctctctcctctcccccgcggcccatcggccctcccccgcgcgcgcgccgttgacaggcgggcccgcccgccaccctcgctgacgggtggggcccacctgtcatcgcctacctcgcgccgcgcccgccgcccgcccgtgccctagcgccgccgccgccgccgaatccgccgcatcccgccgtccccgcgcgccataaagagggggaaatcactccccgtgattccctctcccttttcccccgtttttccctctctctctccctcggattcgtttggaatctctcccgcaatcctcgccggcgcaatcaatggcggccggatcctccgcgccggtttccatctcctccggccgccctctctcactcccgacgctatataatcgctcctcgtgcttcgctcctccgtttccgccactcgccgcacactctccccgtcggattcgtgcccgcgccgtcttcctctctctccgccgtcgccgccgagctccggttcgccgccgtcgtcgctccggacctcctcccgactcggcgtcacctccttcggcttcgccgcgttcccgtcgacctcgtccaccccttcgtttcgcccgccgactgtcggagcgccgccgtcctcgtcgatccgaaccgcgccgccgccttcctccgctccggttgtcgtttccgccgtcctcgtcgtcccggggtgagccatggaccgcctccttcgcttcccccttccctcccctctctcggccgccgctccgccgcgccgttggtcgccggcggcgaccatcggggcgcgggtgcgccgcctcccgtcggccgtgccggcgaggccgccttcgggcgcgccccgcggctgccaggtgggcccggccgtcagccgcccgcgcccgcgggtgcggctgacgcgtgggacccacggcgccggtcggcgtcagccgcgtgcacccggtccaccgtggaccgagaggctgacgcgtgggccccactcccgtggacccggtccgcgcgccctctctcccggctgacgcaataaatgagtttttaattaaaatttaaatgaagaaattcgtaaatatccatttaaagagcatataaacttcaaatggtcataacttggccatttgaactcggaattggaccgttcaagtctctaatttttccttaagaagtcaagaacccatttttgtgctttgtttctgctgttatgtggagtttattagagtaaaagccttttcttttccgttggtcgtgtagacgctgcagcttcggaagatccgctcttcgtggaagttgaagccgacgtttgggaaagcgagcaaggcaagtcacatcatctttgaacatattgaatcccagtttgtaaaattatgttgatttaaattattgcattatcgctttatttaaattcccgcgttatcactgttttatttagccatgcctatttacctttgttacgaccttattattgttattgttattatttccttgttcaccctagattaaacaaaacctcaactagtggacactctactcatgacaccactagtttaattttaggtagatgcttcgcaatttaattaggtaacattaggtggttttacaactatagactttgggaattattcacatcacctggacactttggaatggtctggatattgtggaattggattcacaccactccttctattcaaaatccccaaaatggttttaggctgggctcggggtgcatggttttgatggtagcacctcggccatataaggaccggtcttcgggcctctgttgcaaagcactaccgtacttccacatgtctagtgggtaaggcttagtttgtggctcagtctagtcataaacaaaagtacacggattggagatggatgaagtcgggggtcgatggacattctccagggcaaatgaaggctacacgagctgcggcccggtagtcgagatgtcatggcacagggccggtgtcctgctgctaggggctcagtcctgcctgcctgtcccgggtgttccggccgtaggcgggattgggtcggtactcttgtctatggctaggatgggttggaaactatgtcacgtcttccgtctgtataccgtggtggtatgtggcacgtggttacacgtgaggaagaggtgtcttgtgggtaaagatgtacacctctgatcagagtataatctattcgaatagccgcgccctcggttatgggcaagccgagcaatgtatccaagttagtgttttaattcttaaaacctgcttaacaactaaaatgtggaatggttggcctgggttggcttaggacgagctgggacccagggtcgggttgccagttcggtctgaatcatcataggccttgggttaaggcaggttcgtgtgggttcacggccttgattaataacattgtgtagttctaggatcgtgtttacaaaatagctttgagcaactaaatgtccttaaatgctgtttactgcaaccctaaccctttatattataattcccttgtactcccttgcatttattctgcatttgtgggtgtgtcttgttgagtacggtggttgtactcagtcttgctcaatttttcccaagcccagaagaggagctccttgaagatgaaggctttggtgtctagctcgtgcctgccgtcaagcgcctgtggtcgtcgccctagtcttctgctgtttctcgtttgtctttgtgtgtgctgggccttcgctgcccatgtaataagttaactatttacgcttccgcttgttaaactctgaattgtatcaacttttggtgtaccttgcctcctgggacaaggattaatgcacgcacgtcaggaaagcccgttgggttatttccggtcgtgacaagttggtatcagagccacccttgaccctaggacgagccgtagaacccaagccttagcaatattttcaaaaataaaaatcctttgttatttgtgaaaactgtctagtctctctctgtcttgctgcttcatttatcgccaaaatctgacctttgaaaatgttgcttttctttttgtttttgtttgtagatggccggcagcgtcacccgtcgtggtttgggcatgactggcttcgtcttggagttgcggggcatgtgcgtggccctggggtatccacacggagtggactaccaggccaggccgcttccggagcaggagggtgacgatgcggagccccgcgctgcttgggaggtcactgcagtgatcctcgctggctcttctgagcggacttcgctgacagtcaccgcgggtggcgattccttccccgccgcttgccagagcgccgctctcctcgccatcggcactctccaccagcgctacccggacgagttgcagcactcgccctaccgctaccacccccgccgcggaggagcccgcgactacgccaccttccgggatgctagctcggaggatgacgctaccatcgtgcacctggcgcgcatggtggaggcgtacgacgcggctcgtatcgacttccatcagatggtgcgccgtgggatggtcgagaacaacatgaagatcctggagctgcgtcaggagaacctgcagctcaagaaggacctggacgcggtggaggcgcagctgcatcagctcaagatcgcccagggagaggtctgccgccccaagcgtcgccgcgtctgccgcagccagaagatcaccgcccgcaagagcacctccaggcccgagcttgttcgtcagtccctggcgtggacttgcttcgtcgagacccctcgtgccgagcccgcgcccgtggttccccaggagggggaagcctccggcgttggtagcacggagggtgcgctgttgctcaccttccgtcctggcccgtcgcagcggtagacgagcagttagtaggtttgcgcgtgtgttctttctcgtttgtctttttgagttgtgtggggcatggtttatgccggtgtgtggcataactatgtcggagcctgtcttattttatttgcctaagcaacttgaacattaatgaacccatttaatagcagtaataaattcaagaattatagtagtcgtgggtggttagttttaattgtcagctctctctgttgctggttctgtgtggggttttcagatggtgacgaccaggagaaatgctgttaccggtgatggcaaccaacccgaaggcagcaaccacaaccaccagggcaacccacctccacctccacctccgcctccaccaccaccaccagacaccaacgccattctcacccaaatcctcgcccagcaagccaacatgatgactgctttcctccaccacctccaaaatccgccacaacataatgctccaccaccacccccacaacactctaaactcgctgagttcctccgcatccgcccacctaccttctctagctccaacaaccccgtggatgcgttggattggttgcatgccgtgggaaaaaagttagacactgtgcagtgcagcgatgaggagaaagtcatcttcgccgcccaccaactgcagggacccgcatctctctggtgggaccacttccaggctacgcagccagaggggcaacctatcacttgggcccgcttcaccgccgcttttcggagaacccatgtgcccgccggagtcgtggcccttaagaaaagggaattccgagagttgaagcaaggcaaccgctccgtgatggagtatttgcatgagttcaacaatctggcccgttacgccccggaggatgtgcgggaagatgaggagaagcaagaaaagttcttggcaggaatggaccccgagttgtccgtccgtctagtctctggggactatccggattttcaacgactggtggacaagagcatccgcttggaagctaagcacaaggagctggagtcgcacaagcgccgcttggcgaatttccgcaatcaacagggtgctaaccaaagggtccgctacaccaatccctatccagggggatcctcctcgcagcagcaacaacagcagcagcaacctcgctccgcgcctcgacctcaattcgtggtgcgcgtcccacagccgcagcagcagcagggtcagcaggggactcgtgcgccccgtcctcctacgccaactgtgcagcccggtcaaggccgcagggacgctcaaggtcagcagcgtctgtgcttcaacttgttcgagcccgggcactttgcggataaatgcccaaagccaaggggtcagcaaggccaagcgccttcccggttcaacaacggcgggaaggatgtcattcggggccgtgtgaatcatgtgacggccgagaacgtgctgacaactccagacgtcatcgttggtacgttcctcgttcattccatccctgctactattttgttcgactctggagcttcccactcgtttatatctgtgtcattcgtggggagaaatcagttgggggtagaaaggcttagaaaccctttgctcatcaccacccctggcggggttatgacagcaaagtattatagccctgccgttcctatagaaattcaggggattccttttccctcggatctgattctgctagacaccaagaacttggatgtgattcttgggatgaattggttggcacaattccaaggagtagtggattgcgcgagacgcactgttactctgtaccgagggccagaacaaccggttgttttctttgcacctccaacctctgtcagaagttcagaactgcatcagataggtctgtcagaaatccccatagtcagagagttcggagacgtgtttccggaagaactacctggtatgccgcccaagcgagagattgagttccggatagatcttgctccaggaaccactcctctgcacaagcgaccctaccgtatggcagcaaatgaactggccgaagtaaagaaacagttggaagagttgaaagaaaaggggtacatccgtccgagtacttccccatggggtgctcctatgatttttgtagagaagaaagacaagacgaagaggatgtgcgtcgactacagagctctcaatgaagtcaccatcaaaaacaagtaccctcttccccggatcgatgatctgttcgatcagcttaaaggtgccactgtattctccaagatcgatctccgttccggatatcaccaattacgtattcgggaagaagatattccaaagaccgcattcaccacgcgatacgggctgtatgaattcacggtgatgtcgttcggtttgaccaatgctcctgccttcttcatgaacttaatgaacaaagtgttcatggaatacttggataagtttgttgtggttttcattgatgacattctaatatactcacaatcagaggaagaccatcagcaccatctccgtctggtgttgggaaagttgcgggaacatcaattgtatgccaaacttagcaagcgtgagttctggttgtccgaagtcaaattcttagggcacgtgatatctgctaaaggtgttgctgtggaccccgaaacagtgaccgccgtcaccgattggaagcaacccaagacagttactcaagtccgcagtttcttaggtttggcaggatactaccggagattcatcgagaacttctccaaaatcgctcgacccatgacacagttgttgaaaaaagaagagaaatttgtgtggagcccgcaatgcgagaaggcgttccaaactctcaaagaaaagctggtttcctcgccagtgttaatcttgccggatactcgcaaggatttcatggtgtactgtgatgcttcgcgccaaggattggggtgcgtgctcatgcaggacggtcatgtggtagcctatgcctcacgtcaactacgacctcatgaaggcaactaccctacacatgatttggagttagcagcggtgattcatgatctaaaaatctggcggcactatctcattgggaaccgctgtgaaatatatactgatcataagagtttgaaatacatcttcacccagtcagatctgaaccttcggcaaaggagatggttagaactcatcaaggattatgatgtgggaattcactatcatcctggtaaggccaacgtggttgccgacgctttaagtcgaaagagccattgcaacactcttaacgtccgtagcatcccacccgaacttaatcaacagatggaagccctgaacctaagcatagttagtcgtggatttttggccgcgttagaagccaagcccaccttgctcgatcaaatccgcgaggctcagaagaacgacccggacatgcatggactcctcaagaatatgaaacagggtaaagccgctggtttcacagaagaggaacacggaaccctatggaacggaaaccgggtatgcgttccagataacagagaacttaaacagctgatacttcaggaagctcacgagagcccttactccattcaccctggcagtacaaagatgtacttagacttgaaggagaaatactggtgggttagtatgaagcgggaaattgcagagttcgtggccctttgtgatgtgtgccagcgtgtcaaggcagagcaccaacgaccggccggacttctccaacctctccaagtaccagaatggaaatgggatgaaattgggatggatttcatcaccggacttccaaaaacccaaggcggatatgattctatatgggtagttgtggatcgattaaccaaggtagctcgatttattcctgtgaagaccacctatggagggaacaagctagccgagctctacttcgctaggatcgtgagtctccatggtattcccaagaaaatcgtatctgataggggaagccaattcacctctcacttttggaagaaactccaagaagagctgggtactcgattgaatttcagcaccgcctatcacccgcagacagatggacagaccgagcgtctaaatcagatcctagaagatatgctccgcgcatgtgtcctagatttcgggaagacttgggataagagtctcccctatgccgagttctcctacaataacagctaccaagccagcatacaaatggcaccctatgaagcgttgtacgggcgcaaatgccggacaccgctattgtgggaccaagttggagaaagccaagtgttcgggactgatatcctgagagaagctgaagctaaagtcagaatcattcgggataatctaaaggtggcacagtctcggcagaaaagttatgcagataaccgtcgccgcgacctggaattcgcagtggatgactttgtgtatcttcgggtcacgccattgcgaggtgtgcacaggtttcagacaaaagggaagctcgcacctcggtatgtgggtcctttccgtatcattgctcggcgcggagaagtcgcttaccagttggagctgcccgcctccttgggcaacgtgcatgatgtgtttcatgtgtcgcaactcaagaaatgtcttcgagtgccatccgagcaggccgactcagagcaaattgaagttcgcgaagatttgacctatgtggagaggccagtgaaaatcctggacaccatggagcgcaggaccaggaaccgggtaatccgtttttgcaaggtccagtggagcaaccacgccgaagaagaagctacttgggagcgtgaagacgagctgaaggcagcccatcccgatctcttcgccagttcttccgaatctcggggtcgagattccgtttaaggggggtaggtttgtcgcgtcccaaatcgactctaaaattcatcctcgaaattgtgcaaagaataattaaaattcatgagaaagcctccaacaattaaaatgtgcaaagataaaagtcaaatgaggcttggaggatttttgtatattttctaaaagcctaaaatgcgtaaataaattttagtggaattttcagagcacaaataataatagaaaagaagtaaacaaagttaaaaaggttttataaaaagaaaaccctaaaagaagttctttttccccccccccttccctcttgggccggctcggcccacttccctctccctctctctctcctctcccgcggcccatcggctccccgcgcgcgcgcgcgccgctgacaggcgggcccgcccgccactctcgctgacgggtggggcccacctgtcatcgccttcctcccgccgcgtccgccgccgcgcccgtgccctagcgccgccgccgccgcggattccgccgcatcccgccttccccgcgcgccttaatgaggggggaattactccccgtgattccctctcccgtttcccccgatttcccctctctctctccctcggatccgtccggattcatcccgtaatcctcgccggcgacatctatggagcccgagatccccgcgcccgtttccttcctctccggccgcgttctccccctctcggtgctatataattgctccccgagctccgctcttccgtttccgccgctcgccgctcgctctcgccgtcggacccgtgctcgcgccgtgctcctctctctccgccgtcgccgccgagctccgtttcgccgccgacgtcgctccggtcctcctcccgactcggcgacacctccatccgcttcgccgtgttgccgccgaccccgtccgccgctccgcttcgcccgccgaccgccggagcaccgtcgtcatcgtcatcccgaaccgcgccgccgccttcctccgctccgttcgtcgtttccgtcgtcctcgtgtcccggggtgagccgaagaccgccgttcgctttcccccttctctccgctctctcgggcgccgctccgccgcgccgatggtcgccggcggtgaccatcggggcgcgggcgcgccgctcccgtcggccgtgccggcgaggccgccttcgggcgcgccctcgcggctgccaggtgggcccggccgtcagccgcccgcgcccgcgggtgcggctgacgcgcgggacccacggcgccgaccgccgccagccgcgtgcgcccggtccaccgtggaccgagcggctgacgcgtgggcccccacccccgtggacccggtccgcgcgtcccctccctcggctgacgcaataaatgggatttttaattaaaatttaaatgaagaaattcgcaaatatccatttaaagagcatataaacttcaaagggccatatcttggccatttgaactcggaattggaccgttcaagtctctaatttttccttaagatgtaaagaacccatttttgtgctttgtttctgctgttatgtggagttatttagtgtttaagccttttcttttccgttggtcgtgtagacgctgcagcttcggaagatccgctcttcgtggaagtcgaagccgtcgattgggaaggcgagcaaggcaagacacatcatcttgatcatattgaatcccattttataaaattatgttgatttaaattattgcattatcgctttatttaaattcccgcgttatcactgttttacttagccatgcctatttacctttgttatgaccatattattattgttattgttattattactaccttgttcaccctagacaaacaaaacctcaactagtggacactctactcatggtatccctagtataattttaggtagatgcttcgcaatctaattaggtaaccttaggtggttttacaactatagactttgggaaatattcatatcacctggatactctggaattgttgggttattgtggaattggcttcacaccgccccctctattcaaaatcccctaaattggttttaggctgggctcggggtgcatggttttgatggtagcacctcgtccatataaggaccggtcttcgggcctctgttgcaaagcactaccgtacttccacatgtctagtgggtaaggcttagtttgtggctcagtctagtcataaacaaaagtacacggattggagatggatgaagtcgggggtcgatggacattctccagggcaaatgaaggctacacgagctgcggcccggtagtcgagatgtcgaatggcagagggttggtgccctgctgctaggggctcagtcctgcctgcctgtcccgggggttccggccgtaggtaggattgggtcggtactcttgtctaaggctaggatgggttggaaactatgtcacgtctttcgcccgtataccgtggtggtatgtggcacgtggtgacacgtgaggaagatgtgtcttgtgggtaaagatgtacacctctgatcagagtataatctattcgaatagccgagccctcggttatgggcaagccgagcaatgtacccaagttagtgttttaattcttaaaacttgcttaacaactaaaatatggaatggttggcctgggttggcttgggacgagctgggacccagggtcgggttgccagttcggtctgaatcatcataggccttgggttaaggcaggttcgtgtgggttcacggccttgattaataatattggatagttctaggatcgtgtttacaaaatggccttgagcaactaaatgtctttaaatgctgtttactgcaaccctaacccctttttggtataattcccttgtactcccttgcatttattctgcatttgtgggtgtgtcttgttgagtacggtggttgtactcagtcttgctcaattttccccaagcccagatgaggagttcctggaagatgaaggctttggtgtctagctcgtgcctgccgtcaagcgcctgtggtcgtcgccctagtcttccgctgtttctcgtttgtctttgtgtgttgggccttcgctgcccgtgtaataattttatatacgcttccgcttgttaaactctgaattgtatcaactttggtgtaccttgcctcctgggacaaggattaatgcacgcacgtcaggaacgcccgtcgggttatttccggtcgtgacaatttattctagcattattagtactgtacatctattactgtactaatggctcatttaccagcaaaagttttacgatattgttttatttaatcttgctgcaaaaaaaaataaatttagcatgttgattttataactttcttttatttcttttggaacctgatgttcaaaagtacaaaatttgtaaccttgtttccaactgtttcaacttatcttgcaagcttgttttactttatttacttacctttttactttgattttctaactttattcaaattaatccaaaaacttgtgctattaattggataaatgtcttaactccctcctttcacttgtctttagatgccgcgctacaagcctgagtacttgtttggtgttgaggggtttgtccaggagttgcgtacgatgtcctttgtcataggatttgggactgcccctttttatgcccagattcctcatgatcgtcacgaagaaaagtgccgagtcaaagtcaccctaaacagtaatagtgaagatatcccctcagtgatgttcgaagctggaggaagaaactacattcatgcatgtcaggaggtggcaaggatcgccataggagagctccgtgatcgctacagtgatcagttggccgacactgagtatcgctaccatccttgccaaccccagggaagtgaccgtggcagttaccttgagactgagggaattgagaatgatgctaccacaaggcatttggttgagatgctgtgggctatggatgaaacccgtgcggagattgtgttagcagctcaagatcgtgaagaccggaatcgtggtaagatttgcaagctagaggacaaagtggattgtttggagaaggaactagccgcattgaagggagaagcaccaccgcagaaggccaggattcgtcttaccgcaaggaagagagctctatttgtccctcgctaccaattggcgccaaaagtccgtgtggtggagaaagaagttaccccagccctagcggatcctccggtcatcaacataagtgatgattaagaagaagaatccaagcacactcattccaagatcgagtggggagcaactcaagatgatgaagacgagccgaacgagccttcaatcaactccgatgcccggaagaactagaagccttgtcaagccgttgtcttagat

SEQ ID NO: 24973 - DNA, 2810 bp, Oryza sativa
ctattttctctagtactactaatcctgttgaagctggtgattggctgcatgctatagagagaagttggatttgcttcagtgcactgatcaggagaaagtctcatttgcatcacaccagttgcatggccctgcctctgaatggtgggatcacttccgcttgaataggactactgctgaacctatcacttggcttgaattcaccgctgctttccggacgacgcatataccatcgggagtggtgtctctcaagaagaaggaattcaggtcgctcactcagggttctcgctctgtcactgagtatctgcacaagttcaatcgtttggctcgttatgctccggaaaatgtgcgcaatgatgaagagcgccaggagaagtttttggaaggacttaatgatgagctttcttacccactcatgacgggggaatatcatgatttccagaagttggtggataaggctattcgccaggaagacaagtacaaccgcatggagcaaaagaaacgccggattgctcaattcaaggcacaacaggggaatagtcaaaggccgcgtcttactttgggaccccagtccatgccacagggaggttcttcgtctgttgttcgtccgcagcgtcagatcttcaacaacaatactggcaacaacatccgcaatcaagctccacgccctgttgcggttttgacacagcaacaacctgctaagagggagcaaggcagcaagcccgtggtgtgtttcaactgtggagacctaggacattacgctgataagtgtccgaagccccgacgcgtgaaggttgtccctacccagagcaactctaccgtaccagcatcaaaggctcgtgtcaatcatgttgctgctgcagaagctcaagatgctccagatgtgattttgggtacgttccttgttaacttagttcctgcaacagtgcttttcgattctggtgctacacattcattcttatctatgagttttgcgggaaatcatgggatggaagtagaagatcttagacgtcctttgatggttagtaccccaagtaatcaagcactctctttgcaacgtagcccctctgtcagaatagaaattcaaggagtaccatttctggccaatcttatcctgttagaatccaaagaccttgatgtcatcctagggatggactggttagccagacataaaggtgtgatagactgtgccaacagaaaagtaactctcaccagcaatgatggtcgcgttgtaacagttcatgcattgttttttgagtctttaaggtcaagattgaaccaaatatactttggaaaagattcctatagtccgggagtatcccaatgtgttcccagacgatttacctgggtatccgccttaaaaggatatagagttcagaatagatttggtaccagaaccactccgatccataagagaccttatagaatggcagccaatgagttggcagaagtcaagaggcaagtagacgatttgcttcagaaaggatacatcagaccgagttcatctccatggggagctccagttatttttgtggaaaagaaagaccatacccagaggatgtgtgtggactatcgtgcactaaatgatgtgactatcaagaataagtatccgctacctagaattgatgatttgtttgatcagcttaaaggtgccaccgttttctccaagatagatcttcggtcagggtatcaccagttgaggattaaagaggaagatatacctaagccagcttttaccactaggtatgggttgtttgaatgtactgttatgtcttttggacttaccaatgcccccgctttcttcatgaacttgatagtaaggtgtttatggaatacctagacaagtttgtggtggtctttattgatgacattcttatctactcccgaaccaaagaagagcatgaagaacatcttcgccttgcactagagaagctacaagaacatcaattgtatgctaagtttagtaagtgtgaattttggttgtctgaagtgaagttcctgggtcacgtcttctcagcagagagtgccgtcgatcctagtaatgtggaatccgtaaccaactggaaacaaccgaagatagtttcagagattcgcagtttcctaggcctcgcaggatattatcggagatttatagagaatttctccaagattgataagcccatgacacggctgcttcagaaagaggtggagtacaagtggtcagaagaatgtgtcacgaccggaaataacccaacgggctttcctgacgtgcgtgcattaatccttgtcccaggaggcaaggtacaccaaaagttgatacaattcagagtttaacaagcggaagcgtaaatagttaacttattacatgggcagcgaaggcccagcacacacaaagacaaacgagaaacagcagaagactagggcgacgaccacaggcgcttgacggcaggcacgagctagacaccaaagccttcatcttcaaggagctcctcttctgggcttgggaaaaattgagcaagactgagtacaaccaccgtactcaacaagacacacccacaaatgcagaataaatgcaagggagtacaagggaattataatataaagggttagggttgcagtaaacagcatttaaggacatttagttgctcaaagctattttgtaaacacgatcctagaactatacaatgttattaatcaaggccgtgaacccacacgaacctgccttaacccaaggcctatgatgatttagaccgaactggcaacccgaccctgggtcccagctcgtcctaagccaacccaggccaaccatttcacattttagttgttaagcaggt

SEQ ID NO: 24974 - DNA, 1911 bp, Oryza sativa
gttaagggattggtcatcaatccatacccttggataaatttcctataatagccaaccaaccctaagaatccccttagttgtctcaaatttttgggcactggccagtcttgcacagcctttaccttaccaaggtcagtagacacccctgccactccaattatgtgcccaaggtattcaagatgagacttagcaaatgaacacttgcttgcctttacatacaactcatgctgttgcagtaattgaaatacctccctgagatgactcacatggtcctccaatgtctgactgtaatcagaatatcatccccaaaaaccagtacacattttctgatcaaatgagcaaagattgtgttcattaacccttgaaaggttgctggggcatttgtcagaccaaaaggcatcactctgaactcatagtgcccatggtgagttctaaaagctctttttgcctcatcacattcagttaaccggatttgatggtatcctgatctcagatctaacttggtaaaccattttgctccagccaactcatctagaagctcatccacaactggcattgggtatttattcttttcagtaatgtcattcaatcccctataatcaatgcaaaatcttcaagaaccatccttctttttaaccagcaagactggagaggcaaatgggcttgaacttgactgaataattccctgattcagcatttgcacaacttgcttctcaatttcatccttctgttgaggtgaatacctgtatggtttcttatttactggtcttgcaccaggaatcaaaggtatattgtgatcaaagtccctgtgtggtggtaagctggtgggctcctgaaaccttgctacaaactcagttaaaacttctgtcacttgagggggtacactatctgattctgctgcatctttttttacaacacacaactgaaccatccgtgatacagctcctgatttaaccaacccagaaagttgttttgcattcaccaacttgtagtgttccaccctatccttaactcctgtcagggtaacccttttatcctggagattgaacctacgcttctttctcttccagtctatccacataggactgaattgctctaaccactccattcccagaattatatcatatccaccaagggccagcaccttgagatcagtaacaaaactgctcccttgacaccaccactcaacccccttcacacaactgttgcactgcattcttcccccatcagctatggtgtgagctgcaatttctgtaccaaatgttcagctatgaaattcctgaactgcctgagtccaccaatatcagtactcctatttgttgattaaaccttgcagcctgattgtttttcttcccatggtaccatgcacaacacattcaaataggaccagctcctcctcacttgtatcctcttcatcctgattagagtctgactcttcttcctgcacctggaacacctcaagtaattcttctactacatgcaattgtactgcctttggacacttatgttttggtccccactttctcaccacatttgaaacattcacctctagcctttctagctgccttgagggattcaaatctatcttcccatttagatttctcctcagtttgcttcccatcttctaaattagtacccaatatacccttgcccatatgagttgatttcattgcaggcttaaaagagtctctgaaactgccccctagagtagcttttcttaccagcttcttcaagcaattcctcctgtgtttgagccagagaaagagcagcatcaactgttctaggtttatgcaacttaatagcaagcttaatgtcagctttcaaaccacctacaaacctagtaacaaagaaggtttcatcataacccctattgtacaccaacactaaatgcatcaactcctcaaacttatt

SEQ ID NO: 24975 - DNA, 1808 bp, Oryza sativa
aatgggttcattaatgttcaagttgcttaggcaaataaaataagacgggctccgacatagttacaccacacaccggtgtaaccatgccccacacaactcaaaaagacaaacgaggaaaaacacacgcgcaagcctactaactgctcgtctaccgctgcgacgggccaggacggaaggtgagcaacagcgcaccctccgagctaccaacgccggaggcttccccctcctggggaaccacgggcgcaggctcggcacgaggggtctcgacgaagcaggtccacgccagggactgacgaacaagctcgggcctggaggtgctcttgcgggcggtgatcttctggctgcggcagacgcggcgacgcttggggcggctgtcctctccctgggcgatcttgagctgatgcagctgcgcctccaacgcgtcgaggtccttcttgagctgcagattctcctgacgcagctccaggatcttcaggttgttctccaccatgccacggcgcaccatctgatggaagtcgatacgagccgcgtcgtacgcctccaccatgcgtgccaggtgcacgacggtggcgtcatcctccgagctggcgtctcggaaggtggcgtagtcgcgggctcctccgcgacgagggtggtagcggtagggcgagtgctgcaactcgtccgggtagcgctggtgaagggtgccgatggcgaggagagcggcgttctggcaagcggcggggaaggaatctccacccgcggtgactgccagcgaagtccgctcgggagagccggagaggatcactgcagtgacctcccaaccagcgtgaggctctgcatcctcaccctcctgctccgggagcggcctggcctggtaatccactccatgtggataccccaagaccacgcacatgccccgcagctccaagacgaagccagtcatgctcaaaccacgacgggtgacgctgccggccatctacaaacaaaaacaaaaaggaaaacaacatttaaaagatcagattttgacgataaatgaagcagcaagacagagagagactagacaattttcacaagtaacaaaggatttttatttttgaaaatattgctaaggcttgggatctacggctcgtcctagggtcaagggaggctctgataccaacttgtcacgaccggaaatcacccaacaggcgttcctgacgtgcgtgcattattccttgtcccaggaggcaaggtacaccaaaagttgatacaattcagagtttatcaagcggaagcgtatataaaattattacacgggcagcgaaggcccaacacacaaagacaaacgagaaacagcggaagactagggcgacgaccacaggcgcttgacggcaggcacgagctagacaccaaagccttcatcttccaggaactcctcatctgggcttggggaaaattgagcaagactgagtacaaccaccgtactcaacaagacacacccacaaatgcagaataaatgcaagggagtacaagggaattataccataaaggggttagggttgcagtaaacagcatttaaagacatttagttgctcaaggccattttgtaaacacgatcctagaactatccaatattattaatcaaggccgtgaacccacacgaacctgccttaacccaaggcctatgatgattcagaccgaactggcaacccgaccctgggtcccagctagtcccaagccaacccaggccaaccattccacattttagttgttaagcaggttttaagaattaaaacactaacttgggtacattggtcggcttgcccataaccgaagggttcggctat

SEQ ID NO: 24976 - DNA, 2794 bp, Oryza sativa
tgacggccgggcccacctggcagccgcgagggcgcgcctgaaggcggcctcgccggcacgccttacgggaccggcgcgcccgcgccccgatggtcaccgccggcgaccatcggcgcgccggagcggcgcccgagagagcggagagaagggggaaagcgaacggcggtcttcggctcaccccgggacaacgacgacgacgagaacggcggccggagcggaggaaagcggcggcgcggttcgggatgacgatgacgacggtgctccggcggtcggcgggcgaagcggagcggcggacggggtcggcggcaacacggcgaagcggatggaggtgtcgccgagtcgggaggaggaccggagcgacgacggcggcgaaacggagctcggcggcgacggcggagagagaggagcacggcgcgagcacggatccgacggcgagagcgagcggcgagcggcggaaacggaagagcggagctcggggagcaattatatagcaccgagagggggagaacgcggccggagaggaaggaaacgggcgcggggatctcgggctccatagatgtcgccggcgaggattacgggatgaatccggacggatccgagggagagagagaggggaaatcgggggaaacgggagagggaatcacggggagtgattcccctctctttaatgccccccgggaccgccggatgccgcccaatccgcggcggccgccgcgctagggcacgggcccgcggcggaccccgcgggaggaaggcgatgacaagtgggccccacccgtcagcgagagtggcgggcgggcccgcctgtcaacggcgcgcgcgcgcgcggggagccgatgggccgcgggagaggagagagagagggagagggaagtgggccgagccggcccaagagggaagggggggaaaaaagaacttcttttagggttttctttttataaaacctttttaactttgttcatttcttttcaattattatttgtgctctgaaaattccactaaaatttatttacgcattttaggcttttagaaaatatacaaaaatcctccaagcctcatttgacttttatctttgcacattttaattgttggaggctttctcatgaattttaattattctttgcacaatttcgaggatgaattttagagtcgatttgggacgcgacaataacctagggtcaagggagctctgataccaacttgtcacgcccggaatttctagccaaaattccaaacgcttacatgtgtgtgaaccctcgtccaggaatcagccgaggcacacaataacaaattgataatagagtacaattattactctaattaataagcgaataaaatgtcattacagaggtagatagttcctctcaatcaataaagatctaagcagcggaaaataagataaacggggcagacggctccactccacaagcagcttgaccagggctacacctaatcctccacaccatcagcaccactgtagaactcttcctctgatgaatgattgcaaggtgagtatatgacatactcagtaagccacgcagcaaatatgcaagtgcacaggataacaaaggatgggatagtatagggctcatttgcaaaagcagcatttagcaaacatttgagaattataaaacagttaagtgataattaaacaatattaattcaacgctatacaacataccctgttgcataggcccaaccattctgaacaaccatacccggctgtacagatctatctgcaaaccaggaatgtaccattccaaaccaggagctaatcaaattattaccagttatagcatcatttattatggtgagaagtgtgagactaatcacgaaagacattgttagacccgcccataaccgcgggcacggctattcgaatagttttactctgatcagaggtgtaccactgtacccacaagacacagccccacatcatgtcaccatgtgccgcaataccaccacggtacctcggaaaggagctgtgacaatacccctcgtacaacacaatccactacagcgcacctttcctggatcataatcacccccttataaacaaggcatggactccccagcgacccccgtgggcttatctccgccacttctcagtctggtgctccgcaatgaaccatgctatacaaaaggtaaagccgttgcccacgctggcttgtggttggcacggttaatgtttcacaaccgaaactcgtgaaccggtccttaattgtcatgagcacgaccatcaaaaccatgtgctcacaacccaccattatcaagttttagtgggcaagtaattaattaacaaatcacgattgaccatcgtgaactatcattaagccatcattaaataatagtgagtcatatgttatcctaatagtgtgctaatgtttctaagcatggttaagcaatcacatctaatatctagctgaaccaatatatagagctcaactagtcaagttataataacccaaggtatcaaggaataaagtaatcaagtacaaaagggccataacaaaaaataggttaattccacccaatgacattcgaaaatagatgcaatagttgaatagaaacaatagctttaaataggatcaacatgctcaaagggttgtttgggatctgtgtgacttgccttgctggccttggaactcttcaaaatcttctcctgcgaaaacggactctccggaaacgtcggaatctaaacagaaaagagcaaaaacaccaaaacagcacataaacaagcatgaccagtacatgtggatatttttaatatgtagatctcaattttagaaaaatt

SEQ ID NO: 24977 - DNA, 21413 bp, Oryza sativa
gcaatatatcatagcagctggtatgatttgaacaaatttgctaacaaaccctgaactgtaaaaagtcttatgttgtctgacttccttgaaatgtcttcagggaagtttttgttcagtcgattattatttggtggctaaagcagatttcaaaaacctaatggcctattggattgaatagatctccactgttttctttgatgatgtttcagattgctgtgctggcagatgatatcttgaaaaatgttgagtatgatgctctaagggttgtttttaacaagttccactcggtcatatcattcaagcccacaatgacaaccatactttccccagaggtaaatatcggtgctgaggacatgaatttgtgctcctataaagtaatatgaatgatgtgacgttaatactagtggtttgaattgttttataggttatggagaaagaatcggaatctggtaaggttggtgacctggattcatatgaaattgaaggaggtgaaactaaatcagaaattcttcagaatcttaccgagttccagttttcttgtgtaagtttgtcttcattaatcatatatacctctcaatagatgaattagctacaactattacagccacaaaatcaagtcgcatccataagggtaaacgttccctttgtagagagcgcaatcattcttttttcaaggtatcctagtggtatcttatgtttttgctttgtggcaggttatgtataatgctgctctagagaatgcatgcagtgagcttggagcacgtatgtctgccatggacagctccagcagaaacgctggtgaaatgcttgatcgactcaccctcacatacaacaggtatggtcgtcttaccttctccatctgtttatgtgtgtcgactgcataacggtcggaaatggtcggaaacggtatcattattttattattttctcgaaacgaacggaaacggtcgggaaatttccatatttatgaatttatctatttagtgtcaacttcaatgccacgccgacataaattaaaaaaactaaattttgaatacggtaaccatcggttaaaatattattattatattagttttgcggaaatggtatcggtacggtcgggaaatttccataccgttttcacccctattcacatgaaagaactgatacattcgatttcatccccgcaggacacgtcaagcatctatcactacagagctcattgagattatctctggcgcttctgcccttgagggataatgatgaaacttttgcccatctttttttgttttgctgttcgaaaaaagttcacttgtcatatggagcagcctttccctcgagtggatcctcatgctaagttgcaataattagcccagttacgtgacggtgctatgcatatatcagaaatgcttgttccagtcatccttgtttatctgaatggcgacgtattttaaacaatcttttacagctgtgttcattttgcataaatgattgatcactgttctgcgttgaatttatctagagctttctcttttcttttttttttttgtgtccgcaaccattcatcggtatatcccgctcattacacaaattcacttatctatctgtttggtcagactgaatcgatttgtttagttggtcagactgaatcgatctgcttggttggtcagactgaatcgatctttttggttgggattcgtcatgtttgagatggtgggattcatctttggcgaatccctccccattgggagggataatgttaacggcgctgcttcctctctattcttcagcaattcgcccttcggctgcttgtgttggctgagagcctggactgcagttggcaggctttgggctctcaatcctccgtaattgctagttcgtgaccagtcgtgcgccagcccgcgcccgtgatcaccacttttatcattttgcctagatgagtttttgtcaatccatctatttcattctaggtatcttaatgtgtggctgaatctataatttatgcttgaaccacaatactaggtatgacttgtcccttaactcctaaagccagtgcaagtaagatcgcaaggtggtttagacggtgggttttactgacgtggtgcctacatgacgttgatgtgccaccaacatgatgacgttcacatggcacgttaaaagtaaaaaaaaaacatgggatccacatgtgagtgagtgtttgattaaaaataaaaaaattatagtagaaccctcatcttcacccctctccccttctctctcccttcgcttctctcttatctttgctctcttttgttggcaacattttgtgacaagtcgacaagtacgatcgcagcacctaaacgccttgcggtgatcctagagtcgtcaaccacttcgatctagccaaagggccaaattaagatgggttttggagaaaaacagctaaatcggttagcggagccgatttagagatcaaaatcagcctctaggccgatttagatcgatatgaggataactacccgtctcgtgggcgaaacggaaggtttccagtacaaacctacaaagaggtatcgcactctcgcagcggtggcggacggtttacggtgcaaaccgacaaagatggactaaactagggtaaatagaaaacatagtaaaagaacgattcaagtagattgtattcgggggttttacaatgaaccggccttgtcccttaaataggggttggtcttgccctctacaggcccttctccatgttcaactcgggatagaaactaaaggaaacacgaaacatgccttcccgagcaaggaaacccgagacccgacgaaaacagactcagactcggaccctgccggtctgaccgcccacatacctacggtcagaccggttctactagccggtcagaccgcccatatacgtgcggtttgaccggccctgtgaaggaaacccggtactttccaaactttggcaattttcccctatttcgtccataggtgccaaatttgggtgtaaacatctttctcctctcttctctctgctctctttctcttctctcagagcgtctattctctctcagagcgtaagcacggtggagctcgggggcagccatggatagtgttgatggaaaaaaacacactggcctgaaagagttgcttcactctagtgcatgtccaaatcttgctttcgagttcaatgcatgcagttggtttttatcctgcaaccaacaagaacagaataaaacagttaaatctgtaaatgatagtcgataagctagaaagcttatgacctatcgtctttaacctagccgatgctatcaggtatagtcacaaaagaatatgaacaaaccctaagtatgtcgtatcggctgtaaaggcaaacaatcatataatctctaaatcaatcttatctaaattatagacaaactgtatagatcggacctaaccgagacagtatggacttagagattagatatgtttatatctgttgtcgaatagacaactgcgtcacgtcgaaaggcgtggttctctcaacagtggttggaagtaagaacaattgtattacttagtgaaaatttttttggatcccccccattacatggtcttagggggctatttataatcctattacaggctccccttttagggtttaggttttacaggggaatttccatggttacccttatgataaggacattattaggggcacacaatgtcttttacatgtatagatattgggccataaatggcttggcccatctatttgctgaagtctcccgagggctcggcggtccgctgggcctcctggcgatgaggttcggtaccttggcgaaacccgtgcctctgtgccgaggcttttgcctcttcatctttgcccatgcggccctccgacatggtctccgcttggcgaagttgacgtattcctagctacggctttcgccatgcgcccttcgcccgttgtggttgtcttcctgaccttcgccatttgtctccggtccgggcttgtcgcctaagctcttggtttcggtggttccggccgaagggccccgtggtgtacctccaacaagcccctcacgggcaagggtgagtagggagtttcggccgagatcgtgcacaccatgttggtataccgcggggcgcctcatttcggccgatgttcctaccgaaacctgtcttctattctgcataaaataatatttcgatttggttgtcttggttttcatgcttgtgaacagtgttgggcttattgggccgaccgtttgcaatcttcggccattcactgtttcggcccgcactgatgggaaattactgttccatacactcctggcttacgtggcgggttttgattgggtggtaggcgaatcgccttgcgggtgagctatatataccccctcccattgctttcacttttactttcacccttagttatttttgccgttttccctgccgcccagaccgtctctctgcgcttaagagttttcgacttttaccccagcttgccaacccttaggttactctaggctcctgcgctatcctttcatggctcttcttcaaccaacggccctgacccgggaaaggtcggtgaagaccactccggatacctaggtgcctcgctcattgatgaggcggatttgacaaagcttgcctcggccagggttgtggcgagcggtcaggtcttcgcatctgccaaggctgttgtgccgaagcccggcaagaatcagaccgtggtctttgttgcctttttcgacgcagggcttcgttttccgtgcacctccctgttgccggaaatacttcatcttttcgacgtcgagtttccccaactcagcccttccgccctggttcggatcaatatcttcgactgggcatgccgaactgccggtttcgagccgaccgccgagctgtttggggcgattttctacgccattgtcaactcgaagacggtgactaccccagctggcactcagaaaaccgtcttcggaagtgcgaacttcaacattcgcccggagcgctctgacatatggccagtgaacgcgtccatgcccaagtgggatcggcactggatgtcgaaatggttctacctgttgatgcaaaaacacgaggcctagaagatctgcttaactttagtgcaggtccaaaaatcttgccttttaagttcgtgagcatgccagttgatttgatcctgcaatcaataagaaataaagacaaataaaccgcggttaaatccataaatgatagctgatcggctaattgccgatgacatatcatttatctctgagccaatgtcatatttgaatcgattggcagaggtaaataagtaagaaaggactaaatctattcgatcggctgtagatattaacaatatataatccttatgtcgatacatacttaaatcaagtgattgggatagatcggacgtcatgccgagacagtataaatcatttagatcgaaatatatattaacaatgagattatagatgctcatagcatagccgatcagatagatcagcatgtatcggctaatactccgataccactctatattaagatattaatgcaagtaaattatatcaagaaagaagtgtaatatacctagatgcaacaagatcttaacataaagggcggatctagcatgtcaattaagcacataaaatataaggctaaatcaggtaagaccggctgaaaccccgatactactctaatcggcaatctaatcggcaaccaagaagcaggctagagattaagattctaatcacgacttataaggtcaaactcatctgatgcagctataagtataaaaagaagaacaatatctagacaatcaagccatttgatgtttcatagagtggtggatatcctatataatctaagccaacgttgctacttaacctaatcggctgccttgcaatgatagatgttagccgattgaaggttaaataacgatattgtcgaagattatacagaatatatgataactcgatgaattacataaacaagattagagtatcatgaagatggaagcactaatcccgagaacgcaagccgccataacaagttttacctctagttgaagatcgaaaccaatgcagctcaacccgaaagcaagaactcgtcgaaacaaaacgaaagtaaaagggtggcgatgcgccaagattgtattgaacgtctgttgtttattacatggggctcggggtctatttatacccgagattaccatgtcggacacgactcttatctctaacaaactctaagataccataagtgtttgcgacagacttttgcccaaacatatctctaaggaaattacatgaaatatcctaattaatagatacaattgccttctcaggactcaatccgtgcatggcaatcctcatgaagcacattaactcaacccgacaacgtgtaccgcgtcacattttcggactcgggtcaatcggctaaccctatccaactcggattctgccaatcccggtcgcagccgattcagactttagccgatccttgctctgttttcggaacgatttccatcttggattccgcctcagttttatctccatctccgatattgaaattaccaagtttggttgttaacacatgccctcaagtccggaatatttggtaatgtttcggatttgccatatccgttcctccaagaatatctctcattgccgtttttccgaccgttatcgcctcgctttaaatactaaccgttgtccccgagaaatttcacaccgttagctccgttttcactgcttaagccaactttgtcttctctctctccggcgatcccctcggcgcaccaggcgatcccaaggcgatttcctctccggccaatcttccgcccgcagagatgtcgtcatccgccagtccgtccgtcgcgccatccgccgaatatgcagaggtaagtatccatcggctagatcctctcctccgccagtccgttcttccttgcctcatcttgtttccttcttctctattcttgtttacatctgtagcacttgtccaatctggtcgcgaccccaagtttgtcacatgagcatcactattttcttggttcgatcggcaatcttgatcccactgagttcatcatcgccgaaaccaataggatcccttttagattggccaacccaaatctaggtcactggaagaataccttcaaatcttggccttctcttgacaaaacttctcctgagaaaagttgggctatgtggtataagcgcgtatcggctagcaagcaagttcactgggacgaattaggaatcggccaagcgcttgctcttactctagcaaattcggccaaggatgaacccctgatggcctccgcagcatacttttggtccaacacccttaaagctttcttgttcaaccaaggccgatgaccccaactctgctcgacatcactatgattactggattagatgtgacttcatcggctaatcctatgagcctgaacaccaaaaaccaatttgacttcaggaccaagagcataggtggctggtctggctatgtagcagcatacatgggcaaaggatctgtcaccccccgagagcacactgcctttctcttgatgtggctcgagaagtttttgttctgtggatcaagttgcggccttaccaccaactggcagttcttagctgaagcccttgaaaccaagagacaattcccattgggcaaaatccttctcgactatctatatcagatgttgagcaacgcatcggctaagatagttacaggctcagtattaagtgcaggtggaccatggaggctgctgcaaacatggctcaaacttgtcatcatgaaggttgtgaatcggccacctttgatagacgcagaattcccaaggctggagctgatcacaggtgatgatggagaggaactcactcaccgccgatgcatgtcatatggagaagctgcatcgacaccagccgattttggagcaaagctatcggcctaactgctcaaagactggttctgcagtttctatgagggcttccaaagagatgctcgagtctggtttccatatgaggactcagtaaactttgatctcccagcagacttcaaatttgaagacatcaactctgaaaaatttcaaaaatctagagaagtcttctcggctgctattagtccatgcatccttcctgttggcatccaccaaggaagaaatatacaagtgtcctatgagttctatcatccaatgagctcagctaggaaatctggaatgggacagttaccaatcggcttgttctttaccgataagattcagtgcagtggagaaatctcatcaacattgatgatggatctgctgctcaacatcccaggacctcccttggccagtatcgagaacatagaactggcaaggttcaggagcaagaactttgatagatggtggggtgaatggaagcaacacatattccatcagtcggcctctatttacatgacagatttgtttccagatgttgtcccccaggtacattttactttgtcaattctgtttgaaccattgttagccaattcatattttgactaatctccttctttactttgcagacaacaaaatcttcccctcctcgcacaagcaacaggggcaaggacatagaatatgctccaggccttctaccaaatggaggtgaattagctccccctgtcatcagctaccatgcccccaggacctcaagtctgcttcaagggcagatgagataaccggccgatgtaggcaggaagaggaaaaccaaagcatcggctattgatccatcggctctggctcccaagaagaagaccaagaagaataaacccaagccagccgatgacttgcctaccttagatccatctatcgagcaagccttggatgaagaagaaatcggggaagatttcgatcaggcagcagccgaactgagtgatgcaggagaaaaaacaccatcggcttcgcccaaacaaactcctccaaatccagctgctccagctcacttttcaagggtaaaccacttgccttgattactttttgtaatcatttcatttatagcagatcactcataaatcttgcatttgtagaaaaagaagactgctgtgaagaagaaatcggcaacaacaacacttaaaccagctccaccagtaagattttcctatacaaatcctttaactcatctaatcatagctgatatttacttaacacttgtctttttgcagcctccttctcctccttcaccacctgtgtagcaaatgtcaagtgaccgtaccccatcggctacagcaagtcacaatatcgaggaagaagaacaaccaaccgctcctgctatcccagtaagtctctctttatcataagatcttagatcggttgaatttgtttaatatttaacaatcttcaaatttctcttttgcaggttttagccgatctattctcctttgacatcaaggattactttgatgaagaagcagaagaagaaaccacaagcaaggctctagcccctctagatgaaactttcaagaaaacacttgaagatatatcccttcggttagagtcatcattagataatctggtggccgactatggttcaattcgggctcgatttgcaaaaatccaagccctaatcccagatgatctggcaaacaccatcactccagcggtgtaccttgagcaacatcaattcaagctggagaaggctaagcaacggatagccgatcggcgggagcggaaggacattaaagccactatccaagccaatcggcagcttgtgcatgaagaaaaagccaaacttgattagctctctgttgggccgattcagtctaacatagattggcttgaagcccgcaagattgatctaatagctcaacttgaagaatgcaatgccgagctggatttggagaagcaaaagttagccaatcttccaaatgctgtcgaagaacaaaaatccagacttaaatcagctatcaagaatgtggctgatatgaccaagtcctttaaggccatctttgcaaccgatgcccaagacattcaagctattgaagaagtagatcaaattagacaacgggctgtatcagctatccagcgttacctatctgcatgattggtcttgtaataggtcttagaacaatttttgtaatcggctactgaaactttgatatccctcaatataatttctctgtaccgatcaacataacttttaaatttgctcaaaaatttgcaaatttgtatatatgtgcacgctaattttgcaatgacaaggcattgataaaattataatttggactaaggtcgatataaccatatcggccattgtatatcggcaaaacacaaccgattacaacaagaaaataactaaaggcgatataaccatatcggccattgtatatcggcaaaacacaactgattacaacaagaaaataactaagggcgatataaccatatcggccatctcaaggcgatgtaaatacatcggctatcatgtatcggcaacatccaaccgatcatgtatgaacccaaacacttgggtaacatttcttcaagtatttgccgtttagcgctcgtccataaacttctctataagctcccttggacacaaccttatggatttggaacggtccttcccaattcggtgaccacttgccgaatttgttatctcgagtccctattggcaaaatcaatttccaaacaagttcaccttctgaaaaagacttgggcactacttttttgttgtaatgtcgagcaatcctctccttatctttggtaacttttgcaagagctcttaatctcgattgaaccaaatcttctttttcatcggccataaggttataatactcatcggctgtcaactggtcatgcaaatccattcttcttgagccgattctaacttcccaaggtaacactgcctcatgcccataaacaagcttataaggaggaacctgaatcggtccatgacaagccatccgataggactacaatgcttcggccaacctattgtgccattgccgaggataatcagaaatctttttcttaatcaacttaatcaaactcttgttagatgcctcggcttgcccattagcttgtgcataatatggcgaataattcaacaatttgatacccatgctatcggcaaactgaacaaactcatcggacacgaagatcgagacttgatcggttgtaatggtctgaggaataccaaatcaataaataatatgctcttgaacaaattgtatagcatcccccgaatcaactttcttcaaaggaatcgcctctatccacttggtaaagtaatcggttgccaccaatataaacttgtgtcctttgctcgatggtggattaatcataccgatcatatcaattccccaagctctgaatggccacggtttgatgatagggttcatagctgatgctggtgctctctgaattgctccaaacttctgacaatcttgacatcctttgtaatatttgaaacaatcttccaacattatcggccaaaaatatcctgcccgcctaagagaccacttcatattatgagccgattgatttgtgccacaaattccttcatgtacctctcctatcgcaaccttggcttgatcggcactcaaacatttaagcaacaccccatcaatcgtccgataatacaattcatcatccaacaaggtgtatttcaaagctttatagcgcaattttcgtgaagccgattgagatggattctgcaaatattgaaaaacatcatatctccaatcatcggcggttatcgtagcaacttctactttgacatccttcatcatcggcttgaaccccaatgctccttgagccaagtccattagcttcaacgttttgctctcgagacacatgctgcaaagtcaccagccgaaatccattcatcaattcttggcacttctcattgtaaaccattaatgtatcattcttgcactcatattccccggccaattgacagatcaccaacaaggaatcacccataatctcgatagcatcagcttcaacttccttgagcaattgcaaccctttgagaactgcttcatactcagcttgattgttagttgcatcaggcttaatagtataggcaaactcgaaacttgcccccagaggagaaattataaccaagccgataccacaaccatgagtacacactgatccatcaaaaaacaaagaccaaggtacaatttcaaccgagccgattgagtcatcacgatgatcaacaataaaatcggctatagcctgccctttaatcgccttcggtgattcataccgaagatcaaattctgtcaaagcaaatatccactttccaacccttcatttcagaatcggagccgatagcatatacttaactacatcggctttacatatcacagtgcattcattggacaatagataatgccttaaccttgtgcaggagaaatataagcacaaacacaaattttcaataggagaataccttgtctctgcatccaaaagccgacggctcaaataaaacacaactctctctttctcttcaagctcccgaatcaagactgagccgattgacttctcaccagccgatagatataatctaaaagccatccccttttgtggaggaatcgaaactggaggagagctaagatattccttaatactatcgaaagccttctgctgctctgctccccaagtatattcttgatcggccttcaatctcaacaatggtgtaaaaggttctaatcttccagacaaattagatataaaccttctaacaaaatttatcttgccgatcaactcctgcaactctgttttgtcctccggtggttgaatcttcttaattgcattaacactcatctgagttatctcaatccccctttcatgaacaagaaatcccaaaaactgaccagctgatacgccaaaagcacactttatcgggttcatcttcaggccatactttctagttttctcaaaaacttttctcaaatcggctatgtgattctcaatttcttttgacttaaccaccacgtcatctatataaacttcaaccaaccagccgatcagatcatggaatatataattcatggccctttgatatgtagccccagcactcttcaagccaaaagtcattacaacccactcaaacaagccgattgcaccaggacatctaaaagctgtcatatgaatatcttcctctgccataaagatttgattgtaaccagcattaccatccataaaactcaatatctcatgtcctgaggcagcattaaccaactgatcggcaaccggcattgggtactcatcctttcgagtagccttgtttaagtctcggaaatcaatgcacactctgactttgccatttttcttgataaccggaactatgttggaaacccactcagcatatcggtatggatgaataaacccagcatcatacaaacgtttaacctctgccttgacaggttcgagcatataggctttgcatctcctcggcggctgctgatatggtctaacccccggtttgacagggagccgacattcaacaatcgatcggctgagtcctggcatctcgtaatactcctaagcgaagcaatctccaaattcttttaacaactctaacatggttctaaattccggagataaattcttactgatgaatgtcggtcttggtctatcgcctggacctatatcaatttcttccaaatcatcaatcgacataaaaccttgtccttgtttgtcatcgagatcatctaccgtgtccttggtgtagacatttgaaccctccatgatgccctaaaaacaataatttgggctctccatcttcaattggttgtatatcacaaccggacacttttagaaaatctcaatcccaaacctttccagacaagcaatcaataccgtccatatcccaaagagctaaatcggcactggcaacgttaactgacctgtctactggcacgatctcaatcttgttgccttgccattgaatcaagcattgatgcatggttgtcacgtcctgataaatgcatcccaaaataaaaatcatcttctaaaaggaataatagaattaattaaaattcgaaaagaaattggcaaacactaaaatacgtacaagaaaaattcaaatgtggcccggagaatttttgttaaattctccttggtccaaaaggagccctcaaattttagtggaattttcaagagcacaaataataattattaagaaataaacaaagttgaaaagattttataaaaagaaaaaccctaaaagaagtcttctttcccccccttcccttcttgggccggctcggcccaactctccctccctctctctcctctcccccgcggcccatcggcctcccccgcgcgagcgccgctgacaggcgggcccgcccgccaccctcgctgacgggtgggacccacctgtcatcgcctacctcccgccgcgcccgccgcccgcccgtgccctagcgccgccgccgccgcgaatctcgccgtttcccgccgtccccgcgcgcaataaagagggggaaatcacccccgtgattccctctcccgtttccccctcttttccctctctccctccctcggattcgtccgatttgaaacccgcaatcgtcgccggcgtcttcaatggagccgagatctccgcggccgattcctctctctccggccgcgctttccccctcccggtgctatataatcgtcccccgcgcttcgctcttccgtttccgccgctcgccgctcgctctcgccgtcggattcgtgctcgcgccgtcctcctctctctccgacgtcgccgccgagctccggttcaccgccgtcgccgctccggacttcctcccgactcggcgtcacctccatcggcttcgccgcgtcgtcgtcgacctcgcccgctccttcgtttcgcccgccgaccgccggagcaccgtcgccctcgtcatcccgaaccgcgccgccgcgttcctccgctccgttcgtcgtctccgccgtcctcgtgtctcggggtgagctgtggaccgtccctttcgcttccctctcctctccgctctctcgggcgccgctccgccgcgccggtggtcgccggcggtgaccatcggggcgcggtcgtgccgcctcccgtcggccgtgccggcgaggccgccttcgggcgcgtcctcgcggctgccaagtgggcccggccgttagccgcccgcgcccgcgggtgcggctgacgcgtgggacccacggcgccgaccgccgccagctgcgtgctcccggtccaccgtggaccgagaggctgacgcgtgggccccactcccgtggacccggtccgcgcgccctctccctcggctgacgcaataaatgggtttttaattaaaatttaaatgaagaaattcgtaaatatccatttaaagagcatataaacttcaaatggccataacttggccatttgaactcggaattggaccgttcaagtctctaatttttccttaagaagtcaagaacccatttttgtgctttgttcctgcttgttgtatggagtttattagagtaaaagccttttcttttccgttggtcgtgtagacgctgcagcttcggaagatccgctctttgtggaagttgaagccggcgtttgggaaagcgagcaaggcaagtcacatcatccttgaacatattgaatcccagtttgtaaaattatgttgatttaaattattgcattatcgctttatttaaattcccgcgttatcactgttttatctagccatacctatttacctttgttatgaccttattattattgctattgttattattaccttgtccaccctagaataaacaaaaccctaactagtggacattatattcatggttccactagtataaatctaggtagatgcttcgctgattaattaggcaacattaggtggttttataactttagactttgggaattctcataacatttggacactgtggaatggttggcttgtgatggaattgaacacacacctcccccctctattcaaaactcccaaaatggttttaggctgggctcgaggtgcagggttttgctagtagcacctcggccactataaggaccggtcttcgggcctctgttgcaaagcactaccgtactaaccacatgtctaatgggtaaggcttaactcggtgctcagtctagtcctgaacaaaatgacacggatagagatggatgaagtcgttgcgacgatggatatctctgaggcaaatgaaggctacgcgagctgcggctcggtaatcgagatgtctaggcaaatgaagactacacgggtcggtgcccgttagtcgagatgccatggcactggactagtacgcgggtggtctcacccctatgtgtgtggcgcacccggtctagatcttgttgctaggggctcaaccctggcctgcctgtcccgggataccggccgtaggcagggttgggtcggtacttttgttcacggctaggatgggtgaagggttatgtcacatgtttacaacgggttccaaggccatggaatgcggagtaaagatgtgtcttgtgggtaaagatgtacacctctgatcagagtaaatctattcgaatagccgagccctcggatatgggcaagccgagcaatgtacccaagttagtggtttaattcttaaaatttgcttaacaactaaaatgtggaaaggttggcctgggttggcttgggacgagctgggacccaggtcgggttgccagttcggtctgaatcatcgtaggccttgggttaaggcaggttcgtgagggttcacggccttgtttaataatactgtgtagctctaggatcgtctttacaaaatggctttgggcaactaagtgacttttaaatgctgtttactgcaaaacttaatccctatattattattcccttgtacctcccttgcattaatcatgcatctgccggtgtggcttgctgagtactgtggttgtactcattcttgctcaatcttttcccccttcagtaagagaagctttggagaagatgtcttaggtggagtcctggcttataccccagttgagcgcctgtgaagatggagccgtaggccgctagtccgctgctgtttatttttgattgtcaggccttaagcgcctttgtaataatgtaaatattatcgatataataaagatgtgtcttttatatcatgtttgtatggtgtaccccggcttttcctgggacggggattaatacactagcgttcgggaaaaggcaattttcccggtcgcgacaagctggtatcagagccatctcgactgtaggataagccaagtggataaaacccaaggacatattttataaataaaaattatttgcgaaagttcctttttctccttcccctaatgctatttgcaaaaggtttactccgttcttccttcttcggattttcaactagtactagatggtcaggtcagtgaagaagaggacatcgtcagttgtttgccgaagctccagaagactgcaggatctgctagtgaagtggaggaagcagtgaagccagctgtgaagcaggagtgaagatcttggagaacccgtcgcagaacctaagccaccctctagggtagagtcgttagtcgtgtgtttccttgtttgtgtgtgtagcgcgtggtttgcatcagtggggtgtgatgtaaccatgctaggttgtttgcttaatcaacttgcagaataagcctaacatatatcataacagcaaaagacttagatctgttaaggtcctatccttagtttctaatctgtctctcccctttgttttccctctctccctctccaaacctttgcaacagatggctgacaatgagaaaggcaataaggtcagaagtcaggacattggtacctcaagctcccgagtgaatgaagcaccagacaccagttgtgtggcagtggtccaacacctgattaaccagaacaaattgcttatagagatactacagcagcatcggatgccaattttgaacccgagtcagatgcaacctcaagtgcagttggaggcagtccaagcactcacaccacaagtcagcgcaccgccaacatcccagaaggcccctcatgccatgccgcatgttgacccaaaagaagcaagtatcatctgttttatgtgtgatgagcaagggcactacgcaaggaactgtcctcagcagaaaagaaaagcaccaatgcgaaccgaggatgaagtccgtaagatgatcattaccagcacagaatggcctccaccaggaatgacaaaacatcagagaagaaattccttccgaggtgcacaacagttgacagagcatcttttagctaatggaggtagagtgtctggtagtgaagattcagatcaagtctcctcagatgatgaagatgagaagtctccccaaggttttaaccagaataaaatagaacttaaggcatgctctcgttgtggagaaatcggtcatgttgccagctcgtgtgcctctacatgcgttcattgtgaggaagaccatccgcccgacaggtgtccaacgaacaagatcacttatttcttttgtgaaggaactgatcatgtaccaaaagattgtcaattcagttttctgctgacgaagaagatggccaaccaacccgccagttccaacggagagaagcatcaaggcaacacaaatccccgccaagatcaccgtttcagcctaactccagtgccaggacagaggaatcgaaatgagaaaagaaaatgccgagtccgggaagacatctgttgcttcaattgtcaaggaatgggtcatttcgccgacaagtgcccaaaaccgagaaacatagctgccggcacgtcagtccacgcaactccctgcaatcagaagcttgctcctcaacgaattgtcatccatgcatcccgaagcagtcctatagcccgcgttgcaacagctccaattccaatgaatgcactaccacaaggtgtcaatgctcaatttcagccccagccaccagctgacaagacaggggccagtatctgcgttgtacctttggaagttccaatacagcagctgagaaatcaagtacaagatgaagaacccgagtgtaagaaagttattgtttgttacaactgcagtgaagaagggcattactccaaaaactgtccccaaccaaggcaaaatcgacctccacattaccgccaatttacacgaagcagacattccaatcgtattgtggtcactggagcaaacgccgtacccgtaaggcctcgtgttaatcagaacccatagcagaaacaatgcaccaatgctcctcctgctgcacctgactcggcaataaatcatagcaaccactctctgcatcgacagcctcagcaaagaattgtcgtagatggaagaagttgtgtctctccccgacctactccaggccgagccaagggcaatcaacctccggagggcgataccaagcagaagaccgtcatccgcttcaaccagcaatcagaaggaagcttctcctgtgaatgatagcattatgcagtcctatcacatcatcacagaaccaatcaaggatgcagtcactagaacaatgccagctatatctctccagaatcaaaatgagcagccatgtttgtggttttcagttcgctacttatcatggtgtaatcgaaagtttgcagcaatcatgtaattcataaatataatcatgtctgtaaacagtgagcttgctatgtttagagatgattcatgttgaggatacaatgtaccgatgttaagcaccgtccctttttgtttaaggcagtgcctcgtattcatgtaatgagggagaaatgtgtaatacagacaagttccatgaggattcgtttgaaagatgcggatatgtgatcatgtgtataattgtttactgacaaaggagacctagggtctcgtgtcagaggaactatattctaacctcgagttaataaccaacctgtggatggaaaagaaaaacaattaaactgtgttgggttaaaaagccaacgagacagtagttgaggataggagtttggatacgccttttacagatcaagataaggattgttggaggaaacccctaagggtacccgccatgcctctacattgataagatcggatatacctgccaacagttaaggagatccaggagacatcaatgtttgagaacataatagtcgatggttggtaattagtttatctggtatcagaaaaaggtcaaaggtgatgtggcagaagaacaatttggatgctccccatctcgaggaagcactaaagatgaccatcggcaattaaaccctagtggtatagatacagatagcaggcaatgtatttccctgaaggtagtcagtgcagcttttgacgaaccacatcaaggtttcaccgaaaggcagcaagccaaaggacctcatcgtccccagaagcgtccgcaatccacattaaagaataccacctgttagagataagccgaaagatgattgataaaagagattggcaaagatgttctctagcataaaagaagtaggccgaaaggtgattgataaacagaaacatgctctgcatcgctcaaggaagacccctgattgtaattgccccgcaacagtcaccttgtcattaagtaagcaagatgacctaggtaaaagtgtttctatgaaggcaaggaatgaaatcttcaactcggtatcagatgctacacgaagtgaaaagtgcaagcaccggttaccaggtaatgccaagtcttgggagatgatccaatgggaaagaacacatcaaggttaaaggtgtaaaggaatacgttgaatgctaactgaggacaacctgaagacaataatgggaagtaaactgaatgtaaagaaagtgaatccgagctgcttgttcgtgagagccattcccagttatagaaccagtgatatgttcgaagatagtctatagaggtcagattaaaatcacctctcacaacgaagcctcagatttgacagggtaatgattagacaataacaaatccagcaataaagccatgggagaagacgtcaaagtatgtcaagtgggataaattggttctcttgggaagcataacttatagttagagtggttgacccttgcatcgaatagccgaagtacctagcaccggagaccaggaaagctaatatgagacagttgatggcaagttagaagtgaatgacaagcatgatattcttatgatgacaaacatagtatcctagtaatgacaagctagtgttgacgcatgacgtgaagtggtaacttgtctgaggttgactccgaagatatgaatcatgagaagttctggaacggaagcatcactgcactaccgcaacctagtctgagtcagccaaaaggtgcaccctggtccaagtcaggtgaagaggagattccacccgcaacaggaggtcaagccaagcagttccgagtggtgaagttttgctggaagtttgtcaagacgcaacggaagaagtcaaacaagaagagaagaccgcccaacctatcttcttggtagcctcctcgaatctcggggacgagatttttgtaaggggggtggatttgtcacgtcctgataaa

SEQ ID NO: 24978 - DNA, 3939 bp, Oryza sativa
tatgtcacatgtatacaacgggttccaaggccatggaatgcggagtaaagatgtgtcttgtgggtaaagatgtacacctctgatcagagtaaatctattcgaatagccgagccctcggatatgggcaagccgagcaatgtacccaagttagtggtttaattcttaaaatttgcttaacaactaaaatgtggaaaggttggcctgggttggcttgggacgagctgggacccaggtcgggttgccagttcggtctgaatcatcgtaggccttgggttaaggcaggttcgtgagggttcacggccttgtttaataatactgtgtagctctaggatcgtctttacaaaatggctttgggcaactaagtgacttttaaatgctgtttactgcaaaacttaatccctatattattattcccttgtacctcccttgcattaatcatgcatctgccggtgtggcttgctgagtactgtggttgtactcattcttgctcaatcttttcccccttcagtaagagaagctttggagaagatgtcttaggtggagtcctggcttataccccagttgagcgcctgtgaagatggagccgtaggccgctagtccgctgctgtttatttttgattgtcaggccttaagcgcctttgtaataatgtaaatattatcgatataataaagatgtgtcttttatatcatgtttgtatggtgtaccccggcttttcctgggacggggattaatacactagcgttcgggaaaaggcaattttcccggtcgcgacaatggtcgaaggaatacaacaattaacatgaatccaatctcttccaagcaacaagctataggaacccttcccatcgatgacaaaaaatgttgtagggacggttttgctgccgactgtcagctccacattcaaaaccccttttgtttccgatggattgccaccaaaatctttgagcaccatgtttgtcttgatgagatcatccgaatttctgcctagcttcctgaatgtagcatatggcatcaagttcacagcagccccacatcaaccatcatcttagacatcggcttcccaatgacatagccgttaatgtacaatggtttgagatgccgattgtctgtcccttttggcttctcaaaaactgcttgctctagtgacaaaaccaacctagccgaagcttcctcgacttcatcaacatcggcttgttcagctccaaattccgcagtcaatgtaaaaaccaagtttaccgatgcagtcacgacactcttccctttagcaaacctttttgcttcatcggctttgacctcatcggctgtggcagcttggttcttaacacgccactcttgcctcggctttgttttcttcagccgattgttagtctcctgttctacctcatgaaagcgcactctgttccttaacctttgaacccttctcttctgattcttcgtgaaaataccagaagggcaccattgagcttttctgtcctcatcatcttcttgatcacagtcttggtttaccggcccaatctttgatgaacaggaactcttgtttgcctcagccgattgcttctattataagatcgacttgagctccctgcagcctcgctgcatccagggcaatcttcaatagacggcagcctcatacctttgttccagcagaatctgaaaaactcgtagtcccaatgaggatcaaaatcaccatcaattttttcataatacctttcctgctactgcttgtcatatgtcctctaatacttgttgataattctagccgaattcatctaaaagtttctatttttgcctccatcggctgtcctcccagatatatgcaccatgttcaccgggaaaggattaccatcaaccttcatcggcttctttgagtcatcaaatttaatctttcccccttcaatggccacctggatttgctgcctgaaaactttgcagtcattagtagaataggaaccagagttatgccatttgcaatacctcctcttgcctagttccaaagccgatgatatcaaagtcaaatctctcctcttttccagaactcttccccatgggcaaggtacaacctatttactcctgacccattcggctgccgctacttcggaatcatcctcttcatcagaaccatacatgtaaggatacacatgattgattttcttgaaattcttcttggcctctgcaaacctttgctcatgcagagttaccttccgtgcatggtgagataagctttcaaactactgggatgagaatttctctttaatcggagctatcaaaccctgaaaagctaaatcggctagctgagaatctgttagagccaagctgtagcacctattccttgtttccctaaatctctgaatgtagtcctgcacagattcaacatgcctttgccgaattgctgtcaagtcagaaagtttcatctcatgaattccactgtaaaaatagctgtgaaattatttctccaaatcggcccaaccattgacagaattgtatggcaaagaagaaaaccaagtaaaagccgatccggatgaggacaaaggaaacaacctaactctcagggcgtcaacagccgatgcttcaccacattgagctaagaatcggctcgcatgctcataagtcgaaacattatcttgccctgaaaattttgagaagtttggaaccttgtatcgagcaggcaatggaaccctctcaaaccactcaggatatggatgccgatataagtttccagtatccttcggcttaagcccaaattgctccctcattacatctgcgatcatatcagcccattgtctctgctgaggtgccccttgcgtctgctgctgtatcggctcaaactgattaaactgggagcaaactgaggctggggtgaccccccttggtggacctgaggtgaaggaggctgataatgataattcaagtgacccccgttgtaattctgagtatttcgttggatgttactgtcacaccctaaaaatcccaaatatataaattgttgtttaattggaattattagaattgattttaaaagtctagaaaagaagatctaattttaaataataaattccaatataaaatggggccagataaaatttcattaaatactttgcttaattctataattcctagatttttctgggatttatttgagctaaggaagtatttttaataaatggaattgcatttcatgaataatttaaattgaaaaaggttttaaaagtcttcttttggctttgggccgaaagtcggcccaaaaccctctctctctgtccctcggcccaagtccgcccagtccagcagcgcctgcccgcgcgcgtgcgtttccgtcgctgacaggtggggcccgcctgtcggggtcgtcgtcaacctccagccgccgccgcccgaaaccctagccgagccgcgccgccgtctccttccaaattcggccgatcctttccgtttccggtgaaatcaattgagggaaaatgatcttcgggatctcctctaccttttctcttttggaatcatcggctaaaatcgcttggaaagtgtttgattcgaggtcgattcggatcggtctctctctctccgagcccgagctttccatctcgccgccggttgccgtgggcctttgccgccgcctcctagcccctttaaaaggatccccggtgtctcctctacccgccgccaccctcgccatcgcctctcgtcgccggtagcgccctagcgccgtgtaacctagcgccgccgtcgtcgccgccgctccagccgtgcgccgccgccgttccagtcgtcgccgtcgctcgggaaggtcgccatcgtggtcgccaagtcgtcgccatcctcgtccgctccttcgccgtcgctgaagactgccggaggaccgtcgccgccgtcgacccgatcttctccgccccttcgacctcaacgccgtcaccgggtgagttcgccgggtcgtcctctacccg

SEQ ID NO: 24979 - DNA, 618 bp, Oryza sativa
tcatccatttcgttcttttttttttctaaaaaatatattttctcttgtttggaggggtatttgtctgatattttgccattaaactgctttttgttcctgcaggaatctcttatggtactgatgaccagagtctgaaggaagcgtttgctaactacggtgaagtcattgaaggtatgtctcttgtttttttgttttttggtttttgtttttttttgttcatattgatgataagcatgttcctatacgtatgaacaatcagtagtggtgatatttttcagctagggtgattgtggaccgtaccactggacggtcgaggggatttggttttgtaacctacacatccacggatgaggctgcagctgccattactggcatggacgggaaggtgtgttgtgcaaactttgttatatctattggtttgcaattcaacttctacttgaggtttaatgcataggtgttttatgtctaaattaatctggcatccttatttggtaaatatttaaatcaatttgacttatgaatgcaatgcatatggtgtatcagtatgtggtatggttgcttcaaaggcactctagttggtactgaagatctttactttgatgtactgccttgcaaagt

SEQ ID NO: 24980 - DNA, 1249 bp, Oryza sativa
actgtgatgcttcgcgccaaggattggggtgcgtgctcatgcaggacggtcatgtggtagcctatgcctcacgccaactacgacctcatgaaggcaactaccctacacatgacttggagttagcagcggtggttcatgctctaaaaatctggcggcactatctcattgggaaccgctgtgaaatatatactgatcataagagtttgaaatacatcttcactcagtcagatctgaaccttcggcaaaggagatggttagaactcatcaaggattatgatgtgggaattcactatcatcctggtaaggctaacgtggttgccgacgctctaagtcggaagagccattgcaatactcttaacgtccgtagcattccgcccgagcttaatcaacagatggaagccctgaacctaagcatagttggtcgcggattcttggctgcgttggaagccaagcctaccttgctcgatcaaatccgcgaggctcagaagaatgatccggacatgcatggactcctcaagaatatgaaacagggtaaagccgcaggtttcacagaggatgaacacggacctctatggaacggaaagcgggtgtgcgttcccgataacagggaacttaaacagctgatacttcaggaagctcacgaaagtccttattccattcacccgggcagtaccaagatgtacttagacctgaaggagaaatactggtgggttagcatgaagcgggaaattgcagagtttgtggctctatgtgatgtgtgccagcgtgtcaaggcagaacaccaacgaccggccggacttctccaacctctccaagtgccagaatggaagtgggatgaaattgggatggatttcatcaccggacttccaaaaacccaaggtggatatgattctatatgggtaattgtggatcgactaacaaaggtagctcgatttattcctgtgaagaccacttacggagggaacaaactagcggagctctacttcgctaggatcgtgagtctccatggtattcccaagaaaaatcgtatctgataggggaagccaattcacctctcacttttggaagaagctccaaaagagctgggtactcgattgaatttcaacaccgtctatcacccgcatacagatggacagaccgagcgtctaaatcatatcctagaagatatgctccgcgcatgtgtcctagatttcgggaaaacttgggataagagtctcccctatgccgagttctcctaaaataacagcta

SEQ ID NO: 24981 - DNA, 747 bp, Oryza sativa
catgatttggagttagcagcggtgattcatgatctaaaaatctggccgcactatctcattggggatcgctgggaaatattttccgatccataagagttggaattactttttcccccagtcagatctgattcttcggcaaaggagatggttagaactcatcaaggattatgatgtgggaattcactatcatcctggtaaggccaacgtggttgccgacgctttaagtcgaaagagccattgcaacactcttaacgtccgtggcatcccacccgaacttaatcaacagatggaagccctgaacctaagcatagttagtcgtggatttttggccgcgttagaagccaagcccaccttgctcgatcaaatccgcgaggctcagaagaacgacccggacatgcatggactcctcaagaatatgaaacagggtaaagccgctggtttcacagaagaggaacacggaaccctatggaacggaaaccgggtatgcgttccagataacagagaacttaaacagctgatacttcaggaagctcacgagagcccttactccattcaccctggcagtacaaagatgtacttagacttgaaggagaaatactggtgggttagtatgaagcgggaaattgcagagttcgtggccctttgtgatgtgtgccagcgtgtcaaggcagagcaccaacgaccggccggacttctccaacctctccaagtaccagaatggaaatgggatgaaattgggatggattt

SEQ ID NO: 24982 - DNA, 12196 bp, Oryza sativa
agagaaacaaaacaatatagttcatcccactggtggaatttgggtattgcggggtaatattaattcctctaatgttcttcagtgtagctctgaataattcgtgttcctaggttgttacaattggagaagtttcgaattttctcaacatgtagaacatcggatcttgattaattacttctgaatggaatacttggccccttttggttcagttgttctgaatggaaatcagattctatcaacctaatcagttgtttaagagcaacagagccaagcgtgagcaccatcagaatgaccgaagctgctcaccttgattaggctaaacctggttcatctaatttggcaccttggtcaatataggtcgcctgaagtaaattttactcttattttatttatttgtaccatatgtacattaaattactacttgtatatatgatttacggtgtttgaaaattttttatgtgtgatgaacttgtgaagtaggactacccagtgaaaaatttctggctgcgccaccggctctagtagctttcctttcctcttttgtaagctttgtacttttattagaatactcttttttatatatttatggtattgaaatactttccgagtatataaatgccaactttactttatgttcatgttatactaattatactgctagcttatctggtagatgcataggtacgggtataatgtttgcttatgcaattactctatgtcatgacgatgatattagagtagtatatggtagtttaggtgtggtgtctagattacgggatattattatttggggttatatgctgcggatgagaggtggcccactgatggtgacagctcagtacgggtatttctccgcgcgtgtatatagtcctaagttaatttcctggggagggtactcctccgcatttagccccggttgtatggtcataacggactgtcgtaaggaacttggcagtcaagggtggcttctcgaagtaccaggagggcataggatagagggtattagctagttaatcatataactagaatgtatatatactatgtatactagaagtataagaatagattctcttttattctcttttcacttagcttagatattttagggctcctttgaaacaaaggaaaaacggaggatgtgaattcctatggattcattcactgtagcagcctttgatttgtaggaattggtcatagaaaaactgaaggaaatattccttcgttgctgattctacgggagaaacacaggaaaatttccatccagtctgagctcgtttttcacttgctttgcgtaggatcgaggcaatcaagctcctaatctctttcttcactgcaggagaacaagcaatgaatggatataatttgtgttagctgcagtatatttattagaaatagaaagtgggcccaagttcttaagtaaatattcttgtgtttttcctataccccattcaaacgcatactcctatacatttcctatggttttacattcctctgttttacacgtgaattcctatcatattcccgtgtgtttcctattcctgtattttttcaatcctatgtttcaaaggggcccttagtatgagaatgagtagttccctgcttgtgtgtcactctatcctttgatttatcttaacccccgcttagactatggtttattacaagtaacatataaattattagttcggttatctctactatgatcttcccacgagattaaataaatatgatacccttggaatactctcgagtgaaatgctacaatggtttatccgtgcgcttgcggatgaactctgtaaccataatataccaggagtatttctacaccattgctgggaattatatttctagtaatgtcgttaagaaataccaacaattatcttatatgatagaaagcgcaatttggatggggtgtctcttggatggggtgaaatttttagtaggggtgaaatttttagtaagtattgatcaccttgaaaggaaggtgttgcctagaggggaagggggggtgtgaataagtcttttatgaaaattattacaactttaaagcgggttaataagcaatcaaaactttgggttcaaatcagagtttctgatatgacattggagtttccgatatgaacctaaagttttaaatcggagtttctgatttgacatcggagtttttgatatgaagtggaatgttcaacaactatgagagaaacactatctatgaacttttagcttaaacaaatcatatgtatatgaatcaaaaggtgataaacaaaatatatacacaatatatatggtcaccaagtactaagcatacaaatagatcgggtaagaataaactaaagcacaatatgaataaggcaagaacatacaaaccaaaagaggagacacatgatttgtttactaaaaattcggatccactgatccaatgtctccattgaggagccacaaatgccatatcctcacaaaggtggtgtttgaatctcctgaagatgaagatgaagattaagtgtttcacgcaaacgatgtggtagtaacgtgtgattaattgaattttaattattacaaacttgaaaaatggattaatctgatattttagaacaattttcatatagaaagtttacgcacgaaatgtatcgtttagcagtttgaaaaatgtgccattttaatccaaaagtttatcctcaaacttcagaggaaacgaatagggccaaagtcttcacaaaccatagatgctcacaagtgactcttagctatctaggagacctcaatctccaagagcaacaaatgaccacgaaatttgttgggatatgaactctaatgatcaagaaacaagatttgttctcaccactagaaacccaactcaaatccacacccacaagattcaaatcacaaaaatcaaaggggatttaagagagagataaatcaataatcaaagcacttagcccaagcctcaaagccacaaagaatcagaatgaaaagggctaacctgacaaagggtttgattgggggtttaaatagatccccaaaatatgaccgttggggggaatatttcagcacacatcagatagtccaattttatcgccctccaaagacaaataagaacgagagatagagagtgaagttcaataatattttggactctctaagacatcgaacaatttgatttaacataggatagtctgatgtgtctaagcacatgtttctcgtccttaagcaaagacccaagtttggtgatatttcggattctctggatcatcgcatagtgtgatgtatttcgattagtctgatgctgctcaaataaaaaggcaagaacttttttactcctgagtctgatttcgatgattttgggctctatggaaagcttgttttgagagataaatcaaacccagcgtaaagatgattcaaaaacttcaagagatgtttaaaagaaaccaagtgtaagtgttgtgacatgtgaaataatccggagttggtatcttggtttaggttttttaactcacacaatgataaataattttgagcacttgagacataactaaggcttcgctataggaaagtttctttaaaaaatcatattgatccatttctcaagtttttgttagctatcactgaattaatcatgcactaataagttgattcgtttccgttctagagagaattgtttcgaacagaccggttcgaatgcaacctaaccaaacacgtttgcatctcttttgatagtatggcattcatatactcaatccggttttactataaacaccaagaccggtaaaaaggctaaaaaaacttttactataaacaccaagaccggtaaaaaggctaaaaaaacatacttagctttattatacctttgccttgtgcacatcctcgtggccttagtttgttgaaaatgaacatcactctctttagtcaatacttaattcatcatatgatgtccggtcactttcatttatttaagctacttgatgcccttcaacttatgccatctatcctttgcctttcatcaatctcttgatgtagatcaaggcatgatatccatcttttagatctttatcttgagtctttaggagtcttgatctgacttgagcctcaaacatcatttttaattcttgagatctatttcttttattcaactaaatgacattgttagtccaaatgattcgattgtcaacctccacttgttgaccaaccaatcgcatatacaccacgtgtcatatagtcaaaatgtaaagttcccaattaagtttaagggattagcttggctcaaagacatgcataactaaaatatagaatttgcttcccctaaatatatctatataaaatatttgtgtgaagcaagagtatacattgagatgaaacattgggagcttattctataccaggatagaggttcattatcaacaaaattaaatgtattgggggttcaaaattaattgtattggttttaatgtcatagagacgacgagcaaaagaaaaatagcaaaaaacctccatcaccggtggactccaccctatcctctgcagccagccatatggagcacgatgtgcaaatgtaggacctgtgcagcccatcaatttagataaggtaatattggagattatatgttaatttgatttgcaaaaataaattagggttcatgagtaaaggtaaaggagagtttttagattggtgccattttaagctattggtaaaattgacaaatatatagctacatttagttgttaccaaactttggtaatgcataggaaattttggcaacaacacattgatcacattctaccaaaatttaataatgttgttaacttgccaaaattttagcattaccaaaatttaccaagattaattttggcaataatatgaaaaacccttaaaccaaggaaaaagaaaaagtcgagggggtgatcatatggatttatccagtatgaaattttgctcctgagtcctaactagtttgctctgctgagccgatacaataaatatttgctgatacaatttacgaaaatgcccctgagaagaaaaatcctaaacctcaatcctccaacttctccccttcctgagcagcagtcgcctcaagggttttgccacccgaatcgccgccgcctccgttttctccaggtaagagacgcttccaaccctaatccccccaacaccatcaacggatccacccactggttgtccgcctgcttctccccgccccaatccaccttaggaatagcgcctggctggatcccaggccgtttgcttgtttgcgtccggagattggagcgccgattgggatgaaaccgatcggcccttaatgtttatttttccccatcacgcgattgtatttgttgcctccgagagattctgtgctgttgctgaatccaattttcgtgtgatttttggcaggggattctgagatatggccttcttgcggaaggttgggaacctcgtcaggcagtccgcaggctcgggctcgccgctgttccaggcggtccgatgcatgtcctcctcgaagctcttcatcggaggttgttgtcgttttctctgttcctcactgctcatccatttcgttcttttttttttctaaaaaatatattttctcttgtttggaggggtatttgtctgatattttgccattaaactgctttttgttcctgcaggaatctcttatggtactgatgaccagagtctgaaggaagcgtttgctaactacggtgaagtcattgaaggtatgtctcttgtttttttgttttttggtttttgtttttttttgttcatattgatgataagcatgttcctatacgtatgaacaatcagtagtggtgatatttttcagctagggtgattgtggaccgtaccactggacggtcgaggggatttggttttgtaacctacacatccacggatgaggctgcagctgccattactggcatggacgggaaggtgtgttgtgcaaactttgttatatctattggtttgcaattcaacttctacttgaggtttaatgcataggtgttttatgtctaaattaatctggcatccttatttggtaaatatttaaatcaatttgacttatgaatgcaatgcatatggtgtatcagtatgtggtatggttgcttcaaaggcactctagttggtactgaagatctttactttgatgtactgccttgcaaagttaaaattctgaattccgtcaactccatttttctcttgcattgcaaagatttgttggactgactaggtgatggatgaaagttaagtggttggaaagcgtttgcactgaggagcttggctctcgcactcgcatattaggctttctgcaaattgataaggtaaatgaatataaagtttctatagaagtggtgcagtgggaacacaatgtgaacattcagaattgcatatgcactgaaccttcatggctcgcactgatccaggagccatgtgcaatttgcattgggtgccgtgcaccttcatggttgtctgtgggtttcatcaaaccggttgtgtgtgtgtgtgtatgtcctttttgctgtgctgagcagtctgttgtcatggtccacacgcagagacatgaatggcctgttgtcgttggtgcctctttgcaagtgtgttagacaaagccttcgtagatagatatctgctctgagaccatggtactaaatattggtggtagtgtcacactattgtggccacaattgcaggtggggaatgacgtggacgatgtgaggtctaaacccgcaaacgctaaaccacgcccttgtcgttatcaaccgtggcacacccgactgacctattcacgaataatgtttcctgcaatgcaaacggagaacacaagaagaaatagattgaggcaactcaggtagctagataggtaaatgcgcacaaatatgaagaagcaaacttatatttgctagataatgaagtggtgaactgatagcaaagaggttctgaagacaaactatgatctaattgatcacgaccaatatctgggtgcatttaaagagcaaaacacaacctaaaaaaaatctatgaaaccctgaatgggtacctagctatttaaagaggtgggaggacgaccaaagggcacctagggtcgttctctaccaggttggtgcgcactcatgttgggccaatacttggaccggggtcccagacgaagttacaagcccaatggcccatgataggtggcgcaacaccttgttttttcaattgtggctggttcagatggaatttggagacgaggctagatccgttttaaaagatgacttcgagggctttccatcatactagttaggtgcccatgcgttgctatggggaaaatatagatcaaccttatcgaagctcaatatggttgtgctgtggaaaacaaaatcaaattatgcttctttaaatacaaaaattagttagtgcatcaggaagcagtcaaggacatcacagcatgaaaattatcaaggagcatgcacttgcaattagatatttatgtactgataatgtgtctagactatagagggtcctgatgtgtgacatttctctattttcgtctactgataatatccatcatcaaaacttcatgttatatgcctataataggctatatatatatataactgaatattatctcgagagattacaactgaatttacatgatcaaatccaattcattaagacataaacaaatacaagtaaatttctggataatgcactaatgctcatagccatctcttaagagattctcaatacaccgagttgtaagtttgcataaatatgctgatctttaagaaacatgaatgaatcaccgttaattaggtactgtagcaagctgacattgtctgtttgctgtgaatcagacgttaaaaaacttcaaaaatcacaacactgctcacctctgacattattgcaactaaaataagaggagccttgtcaaggtgattgtctccgtatggtagattgccattaatccgtccaattctcaattccattatactcgtatctgcatcaagccgaagagaacaatcaactttgcactcttcaattgttttgctagtagcctttctatcaacaagaggacggggaatcaaagatgcaaatgtcaacttttatgatttagtgtaaagcccaattgtattcaattatctagcgacaacaatgctgataagtcatcggaaggaaaaaaagaactccattattgactatagaacaaatgtcagcgtataatcacttgaattgcttatatagaaagtatgttgatgacaacaatatacagtaaaattagtgaccgctacatagttcatgcactacaacatatttattcttcccctacattaattttgattactcagaagtgttttagcaatggaattttctttgcagccacatgacacggtttacgttttttaatgtacatacaattgcttgatataagggagttcacagttaacacaaagccatgaagactcagatttttttttcattttttattttttaattttattaatagacctttccgaaaactgaaccttttggccacgctggctggcagcgttgttttgccacgccagccacggtggcgtgacaagaggctggcatggtaggacaacgctgccatgccagctgcgcatggtgtgacaaagtgatttggccacgccaggcagtctggcttggccaaacgtttcagatttggaaatacttttcggaaaggtctattaataaaattaaaaagtaaaaaagtctaaaaaataaaaaaatttcgaggactcacctgctgtgctaacttgcacctctatccacaaaaacatgcacctacagctgtaaaaataagatgggagacagaatgattagcttgttgcaagacatttggttggcatacatgagtgcctaatcctgagaaagggcactgcatggtagtagaggaattgtccatgcacttatgatgagtccccgcaatagttcaagaggtaaaaagggattataattgtgagtagcagaatccttcaagcaaaaccctgcataggcaaaggattagttggtgagatttacatgttatgtatcaaacagagaagattagtgccacaaaaagattataattgtgaaatgtaagttactaaaagattagcagcttatctttgagtagcacacatctttaggactacttatatactatcttttgctgcaaaacagcttggcaaattgataaaattggcacaattctgcttgactatattagaaaattaactaagcagaaatatcgatcagaaaactataacaagtacatctgttagtaaatatgttcctaaattatggaagtcactggaacattgataacatcactttgtatggcagaattcatcagaatctaaaatctacttgagatttattattcctgtggtttgttcagcacaatactgtagtgctgaaggaaatcattggcataatagtggtgaactcatgtgtgtcatgactcaatcaaaacaatattgtgttattgatctttgagcatctcaggaagaagcaattctgccatgatgtccatcttcgctttttactgaacatattaaaattaaagaccctaatgtcaatcaaactgtcattaacaatgcaaaagagaataatattttgtttttcaacccatacatagagatgaaacatttgcagtaatacatatacttagtagtaaagcctcacattttattaaattatcaatgctatgaaaaatgaagaaaatcgagcagttctttcaagttatcttttttacataaatgtatgaaaacactatgcaggcatattgtgccagttatattttgagttttactaacatccataataccgctaaaagaaaatatagatcaacgagtggatttaggagctacttattccatcaaacgttgatgtgtgcaagacagatctttcagatccaaccttttagtcaggcacaatgatctgaaaaagatacatgagataaatggtcaacaaacatcatggaagagaattagaatttttaagtccatcaaatatgataatttttattttcttaatccttcaacaaaatctacataggaaatggtaaacataacacatgaactacatccttttagtacatctagcacaaagacaggtgttaattcttttcctgtgtcgcatgccaaaaaatttagatcggttacagccgagacaatagcagtattcagattagttaactgaaaggcctggaaaacatctaatgcggagaaaatgaacttcggcctatgaatcattgacctcaccttcattgctgctggttcagcaaaaggttggctgcctgccgagctagggcaaggctgcagcccattctgctgtgggttcctctattcccctcttccacgcccattgccagactgcctgccctcatgccttgcaccatgtgggaatggggatggtgaccgaggatagactgatagaggaaggactgatgtgcagcggtggggaaaaggaaggcatgaggtttgaaattctcacgacatgtggtgggaagctgtgtgatgttggtcggatgagtgagcaagcgacagcagcctagtgccgtgcgggggttgctagggtcagggtgagcgtgcgatatggtggatttggcggtagaggtggtggctgagatagatggtcatggcggttcgacccttgctgttgataaattggcttcgcgtgaaactgagtggtgaggggagggatgaccaacgagcggaggctagagggaggggagtcagcttggtgcaccgaagaatgacaaccctgatctagcaggctgacggcaaaggagttgggtgaatgacgagggatgtagcggcatggcgagggttgtgtcagaccggcgggcgtgggcacggctacagcagcgtgttgatggtgaggaggggaggggcgaaccaagcgagagggccgtcggcgtgaatgggagggcaccggcagcacgacgatggatatgttgtatcgatggacatggagagtgggatgatggatgaggcgaagacgctgcgtgggtagaaggcgtgcgtggcataggtgaggagcgatgcggaggtgttacgagctattctatctagcgatccatgcgtctgccgtgtcaggaatcaagaccaccactacggattttaagtagtaagactcatggacccaaaacggagctagtttgcaaatttggcggctgtttgaagtcaatgctatcttgggaggccgaattggattttccacaatgtaggggacttggtctctatctcgtcttgcaccatgagtgatgtctccaactccattatatgttcccaaacatcgagatcacccctgaacaaataaatgtatatatttcaatcactagttagcatcatattcttaatacaagtaaattggccatgttaaggaacgagttcaccggttgatatatgatggaaacaatggtcggatccatactgttcttggtgacatcataccgctgccacaatgagctagcagttctaaatagcggcgtggaacacagtggctgccattgcagcccgagaagaaaataacggccactattgctgcctgacaagcgcaatagtgaccgctattttgcacaaaaatttgaaaatttaaatttgaagtttgaacttgttattttcaactgattattgttgcttccttgcctgaatatttatatgataatgaggatctaaatatttattatcttatcgattgatatcatgtttcatttatggagatgtagtgcatatatctatttgaaccttttatactgggtttagacttggtagtctttattttgttatgttaggagggtcatgaactcatgatacatacacaattaacatacaattttgagtctcttccatccgttattggaatatagtggccgccatctgcaatagcaaagccaatggatgtgcaggatggccatgctttggttgcagccagtgtggaactgaatgttgatagtcttgggatcttggcaggacagttgcacagggtgcataatggagcatgtagtgaagtagtgcacttggttgagctgcatgtcaccaccaaggggatcagcttccacgatcaaggggggaatgtggaaaattgttgaaggggtacccccaggaaaaagaaaagccgctaagattgagtgttgctgttggggttggcgagttcatgtgaagaaggggattggtgagttcatgtggtttgtcaactcatgattttggtgagaggagcata

SEQ ID NO: 24983 - DNA, 1036 bp, Oryza sativa
ggtagtagttacttgtgaagattacatgtcatgccaaattgcttagcaacaggttttattccacgtggtggttatctgaatttatagatcaaattgtgggatatccgatgcattgtttattgtcctcaaagatcatatattgctaaataggaaataaggtaagaactaaaattccttaggagtttgaaccagaaagcttctaaaattcctcagggtctagtcagtggaccactggacccctattaggccatttttaaactcaattcccatccaggcagtgtagcaattctctgttattcttgtttaacgtgtctttctgctttagcttgttttgtctgtcataatcaataccagttgttcttctcaccagggactcagacttacactatttttagtttctacccaatatgaccttaagaacatatgtgctgggtctgtggttttcttcaaaatttatatatgttccatatttgtttatgctgtaggttttcttaacaaaacattacaggaataggcggtgtaacgacccagattttttccttgattttgaagagatatatgttattgactcaaaagcaaggtcaatcacgagagcaaaagttgtggtaagacgtttgaaatttaaattcttgaagcattcagaacagaaccattatatatttaggttgcaggagctctttcatcactaattttagtagaaaaaagtatattagtatctgcatgatgatttgaaggaactagtttaatggtttccatcctttgaaatattgcatgcaaccatttggatgactggtaaactgggtctgtgatgtcattggtttcacagttagtcctatgccttttcatctagacatttgtgacaagcatttatcttcacttttttttttgcatagtttaattaatttttgttttgttgagattattgatatcgagctgcctattacaggttagtgtccctgaaggaaagaagagggacaggagaaatgacttgctactcatacgagatggaggggaatcattcagaataatcgacaag

SEQ ID NO: 24984 - DNA, 735 bp, Oryza sativa
cacatgtaatgcaatataaactcttggtgcattggttacatcattcagtttcattgacgcatgcgtcaggtttgctgtcaacgttgtgttggttaatggtgaggagcaagtctcaatcgagagttgcatgagaatgataggtttggtggaaatctcattgtcaaaaggttcatgattgatcgatgcttaaagaccgttttcagaagctgtattttatatactagtgtgcttcaacagctgatgttatctttttattaaaaaaccaaaccggcatgacatacacaagattctccttgattgcaatagctggaatgaggaaataaaggtgcatgccttggacaagttgttatgctaatcttcagaaagaattaattctgaacagtcacagattaatgctaattggtgggggtgcatgggacatacatactacacttatcagcatcatagtgctaactgctaacatttgtgcgtgttactcaatgtagggattgagagatgcgtgggaggaggtgaagcagatgcgatgcagagaggaggagaccaagcagagggcatcgtttctccagcaaggcttcgcggcggcgtggaaagacggcatccacaccgacatcgccgtcaggcctggaactgggcccccaatccaagcccataaggccatccttgtcagtctctctctctttcagtttcagcccaataggccggcctttcttttatttgattgggcccaatgaaact

SEQ ID NO: 24985 - DNA, 502 bp, Oryza sativa
tcctcgtttacggagtagtcgaccacggtgtcggaggcggagtcctgcgtggagacgaagctctgggcggcgaccatggcgatgtccccctcctcctcctcgtcgccctcccccgacagcgggcgcggcggcgccttgacgggggcgagcaggcggtcgtagtcgacgtcgtagtcctgctcgttgtcgaggtcttcgtcgtcccccacgccgtccccgtcgtcgaggtcgaagtccccgaagtcgtcgtccatgtcgtcgtcgccgtaggccgcggagacatcgcgccgcaggaggggcagtggggtggcgccgcgggagaggggggcggcgaggagaagggacctggaggaggaggggttagctagggttttggagagcggcgaggggaatggataggggaagccggagacggagacgacgagagagagcgacacggtggccgccatgtctgagcttttttttttttttttttgcgcgcgcggtcgagagcgagtatatc

SEQ ID NO: 24986 - DNA, 1687 bp, Oryza sativa
aataaagaaagagagcgaggaaacaaccaacggttacggacataatagcgcggaatccaaaatttaacatgggttggcccacattgactcccaggccatctgctcacacgccacacggtctcatccacacagggaaatgcacgaatcatggcgcaaatcctacggatagaaaaacgacaaatattgggggtgaaaatctgttgacaaagatctagcaaaatcgttcccaaatatgcagagtaagcctttcaccaaaaacttccccactggatggtaaatttacaattttgcagaggttgatcctcggtgacaattatgtgcaattagcttgattcacgtcgaatttgcaggttgtttaattttctggatcaatggtccagtttgttgggctgtttactagtactactgaattatgcagagaatgtggccccgccccgaattcagtaaaccttccaccttaactgccatgttcgtgctaagcctgcaattttgcaggcagatgatcctcctcttccctcgccgaaatcagcatggtacccaattgtgcgaaatttgcttgattcaggtggaatttcctttcctatatgggtaaggacttgagacccgtgtttagtcttttagtttatttagtgcgtttcacgttttgtttgtcagagctgcagtctgcatggtaagaatccgcaattgatgcatcgttacctactagtaactgccaaattctaatcgagttaccactagaagaaaccatgtaaaatctgcaaatccatttgatgcaaatcatgcttctatcaggaaaacaaatcactgcaaacacatgatgaacggcatgcagcattgatgcaatccatcagatcacacacattcacaattcagacttggaaacattttgtggtagaaaagggagaaattaatactactatccagcatttgtagcaactgtaccaatccacgattatgacatcaaattttgactgaaactgtaactgcattatccttggcagcaagaggactgaaactgaaactgcaattgcaatcttgaagcaaatcttgaacaaattgacagcaagaatacctgtaccaggacgggacgatcgatcaaactaacataacggggtagaagccacgccggcggtgagtagttcgacgggacttgctccggcaaagaacttggccgctggcaaccacgttgaagtcggcggccggatagtcgtccgcattgtacgatctgcactgcagcgacgaacaggaacagcatccgcccacccagcgattccaagcaccctgaacgcgcgcggacgtcttcggcggataggggaggacatgggtgcagagtggttgatggcggcgaaggttgtggagactgaggagcgcgtcgtgtggcccaaggagatgaagacccagccaccgtcgtagtagcccaagtaacgcgtggcgcgtgcgtcgtcctggagcgcgtgggtggcgcacccggcgagggtgcggcgcgccggacgaggatcgacggggatggctgggcgcgcgccaattgtggcagacttggtccgccggtggaggagccaaatgtgggcgatcctgagcagcatggcgtagccctcgccaacgacgtcgacgtggtccttccacgccctttcgcctcgccccgccccgcccgccgtgtcgaggtggagcagagcaggttgcggttccg

SEQ ID NO: 24987 - DNA, 2552 bp, Oryza sativa
tttttaactgtaaagttttccattaattaaccctgatccaaaaaaaaggaggatcacctaacaaaatgcaaaagaataacaaagccccaataatatacatatgacaaattgagcacgtgcacagaattctgcctataaatattcgtgtacatttgactggcaaccagcaacagcactcaagcctccaaaccaaatggcttcccctaaaccctttgcttgcagtgccattgccttgttatttgctgcaaacttggtgtcagctcagcttagcgcaaatttctatgacaaatcatgccctaatgcactgcccaccatccgaatagccgtgagatctgccatcgcaagggagaaccgcatgggtgcatcattgctccgcctccacttccacgactgctttgtcaatgaaagtgtcctgaacctgcagagatattcaaaattttctcacttctaagtattacgtaataaccttcagtattctgacaatgcagggttgtgatggctcggtgctgctagatgacactccaacattcactggagagaagaccgctgctccaaacaacaactctctgcgtggatttgatgttatacacaacatcaaggcacatattgaggggatctgtccgcaggtgggctcatgtgctgacatccttgctgtgggggcacgcgaatctgttgttgcggtaaggggagaaaatacaaaggatatcaaactaaaagttagttatttgtctgtcttaaaaagttaacaggaactcctgacgtcagaagatgagcaactgaaatgaacaaaacataactctttatgtatagctatgaaattctataccaaaccaagccttacaaagtattaaaagtcaagttgccaaagatagtaaaataaattaattgatatttataaaatacaatcagtagtgacatatgaaaaccgacaatttatttttcagctaggaggtcctacttgggttgtccagctgggacggcgcgactcaacaacagcaagcctggatactgcaaacaatgacattccagctccaacctttgaccttggtgatctcacgaagtctttttcaaacaaaggactaagcgcaactgacatgattgcactctcaggtactgtgtatgtaaatggaactttttggtatataataccatctataataaaaccataaaataaaacagctatccttgctgaagcttgattgtcaaaacaaactgtacaagtggtgttacatttatgtaggagtatcaatatatcatggtgcaaccccaacaggttgtttagtatcaagatgctactgatcaattgatcactaacatcaaataaaaatatatgccaggggctcacaccataggccaggcaaggtgcgtcaattttcgcaaccgcatctacagtgagaccaacatcgacacttccctggcaacatctctgaaatcaaattgtccaaacacgactggcgacaacaacatatccccccttgatgcatcgacgccctacgcctttgacaatttttactacaagaacctgctgaacaagaagggtgtcctgcattctgaccagcaactattcaatggtggttcagcagattcccagacgaccacctactcatcaaacatggcaacattcttcactgatttcagcgcagcaatggtgaagatgggcaacatcaaccccattactggatctagtggacagatcaggaagaactgcaggaaggtaaactaggtcataaatttttacagtctaagcctgtgtgtgcctgtgcggaagagtgtaatgttcagagaagggagaagtgtccctttcctgatgctgtagtcgttttgaaaggtgtctgtattgctattaaagaacacatatgtgaaagaataaaatggcataaaaaggcaactggtgtaacagttgatatggcctttcatcttttcatccacaattcttgcacttgaaagatcattgataacaaaactcggctccaagcctcttactatggttgatgaatttcatgactaaaacaaacttgtaataataatggttaagaacaactgttcagaatgacttgtcatgctggcagtgatcattacttggcttaattccaatattcagttcattgactatagtttcttaactagtacaactcataaccgtagtatatcaaagttgacaaattacatatcaattgtgtagggttcaggtatatgatcacaggatgattaaaatcaccattaagaaatgtggcaatcatgcttatttgaaaaggaaaatttgaacattagatattttcctaccgtctgcacttgatatgcagatatgcaagtgcctatatcagcaacaaggaaaagctaataatatatcatatcatgattttgttttagataatatcatatagtcatattcaataacaaagtgaaaacattgacaatttgtcatatagtagatggagatttctccttagaaccaatatttattttctgaggtagacaaatatttgcaacaaaatatattgtttcccacggaaggtttcccagtaaaatgattgggaaggttttgtttttca

SEQ ID NO: 24988 - DNA, 1637 bp, Oryza sativa
cagaggctgaagagagatccaaaggcgccacacctgttggggagaaggatcctcggaaggaagtggaacgtagacggcaggagaggaggaggaaggacgagaaggataagggatcaagcaagagcaattcagattgcgaggatatcgagagaagagtaaccagggaaggggagagaaagcgggattctgatagaagaaatgagccagagaagcgggatgcaacaagagttggcgctgagggtcataagccctataattttgatgctaacaaccagggtagtaagacagtacagagcaaggcaaagtactttggccgtatgacaggcggtctgttatcttcttcaagaggttttggtggcggttccttttttggtagaagtgctcagacctctgctcctcaagttaacaaggtgactaaaccgcttgttactgtaactgaccagagtaacgtagtcaaaagagatgcccaacctcctgcaacagccaaatctgctactgctggaggaacgacaaattcatggactaatgttcatcgatctgtgagtaacaaaggcattattaattgctgcagcagtctatctgttacgattacgacatgtgccattaattgttttcaccctgactatcgtcttacaaataccgtttgcatttttgttatgcttttatgcaggttagtccaaatgtgcagtcacagcctactggacttaaaaagtcatggcaccagctgtttagtcgctcagcatctgtgtcaccttgtcctgatgttcctgctacagcccgtgaaatgaacgggcaaccagaaccatatggagcacaaattagcaatgctcaaatcttcctatcgcagtatccccctctggacagtaaccctagttcaagccgctgtatgcaatttccaggtttcccaccagtgaatggagcacctgccaacatgtcactctctcattttccagctggacatatgccctactattgtgagccagaaccaacagtgtttgaagaaccagaacaatttgaggacccatgctatgatcctgatgcaattgcgttgcttgggccagtttcagagtccctagataactttcctctcgacttggatagcgggttcatctctagtgacatcaccaaggaaacacatgcgaagccttcaccaatcgaatctcctctttcaagatcacgtacattcgaggataatcctattaggcactcaactggaaaagggcctaatggttctattttgcttgaagctagcaatgaacatgggggcacatggcaaatgtggggcacgccattagttcaagaaagtttaggtctacgaggtcctcagactgagtggctcctaccaaacacaaatcaatttaaccatggtccagtcatttgaatggtggaacaagaagctcagtgggttctggtttggatgacaatgatttatggctgcagaaagcgcctttccagcaaatgcctcttgatacaaggagtctgttcctttcacatgatgtctcagagaatgctatacacaacgatttggattttggatcaccaaacaaatcagcccgtttgcaccccattgggccacctggtcattcttggtccaagtaagtatgttgtgacattcttgtaccgctttcagtattttt

SEQ ID NO: 24989 - DNA, 1032 bp, Oryza sativa
tctgcatatattcaggttatatatttttttctgcatatattgaggtttaattccttgacaacatttttgttgggatctcgttctgattgaaaagcaaggtatcggaccagaagcaggcctcacggttacctagatatgggccatgcgtctgtctgtctcatgggccttacccatggcctaaagacgcctaccaataatcgctaactaaaacaattttatttattattattaaataaatcatgtgttaaacaaacttgtgacagaccttggtagtccttgcggagtaatagtgctgacttgttgatcctaacaacatggcttgactccaggccggattatcattgataacaaaacaaaacggaagattagtaggagtaataatacaatgtcacgattactgaatgacgccctaacagaacgttggcggttcggcatatactcatttttagtgcacatttttagagatcaattcatatggaggaacaaataagcataccactgcactgacatcaattgtaatcaaggcatcggaacagcagggtccggatggaatggataattacatgcatagtacagagcagaggatgggatggagtggataagaccatcctagctggatagattaggaggacatactctattattaagataaagataaaattaactaatggagccgattagattattactaattgatcatcgtgatcgtcatcatcttcatttgtctgcatcttgcagcaggaaggaagggtagcactaccagctccacctctcgttctcctgcccgtcgtcggtggtggccggcggcagctgcgagtagaagtcgtagtccaagctgctgctgttgttggtcttggataatgggttgtagtagtggtgcgcgagggcggcgccgccgaggacggcgagggtgagggcctgcgcgtgaagcctggcgtggatcagccgcatctgcggcgtcttcctccgcccgtacgccaccgatgcgcccaccgccgtcgcccacagccctcctgttcgtcacagatcgat

SEQ ID NO: 24990 - DNA, 795 bp, Oryza sativa
gcaacggaaaccacaccacaccccgatacgactaggatttcctctctgcttcttcgatccccttgtattacaatcgatcctgcaagagaagcactctataattgcagcggcaagatcgattttttacaaaccaacaaagcagaaaggattcacgcgccgccgcttgcgatttgtgagttgtctttcccctttcgattccccctcctctcttccttcccctatcgtcaactagctcgagttgcttgcttgttccctctgctgcttcctctcttgtgtggattggattcccggcctggccctttctttttcctcttctctcctagattagaatcgtcgcgatttgattcctcaatctctcgatttggccgccctatctgttattaatccccaattgttcttcacacacatactcaattgcaggtcaattgcagccagaaagaggcgatggatttcaaagtcgcttcctttctcctactcctgttaatcgtcacctgcggagctgctcaaggtcaaggcaatgattttggtacgccctaatccaacaccttcccttcctcccttacctatgctcctcctggctcctgcatgcagtttggaaccaacatgtcaaacattctcaagggaaaattggacaagttttttattgtgcgtagtaaagtatcattctaaaatttatatatatgggcagctgctgtgggtattttatttggttgaaattcaacttgaggataacctgctactgatcctcttagcttggttattcattgcctgcaaaatgcatccattatttttgtt

SEQ ID NO: 24991 - DNA, 2072 bp, Oryza sativa
gggcccaatgaaactacttaggcccagctatatacaggcgaccaggtcggaggtgttccgccacatcctcgccggcgacgacgattgcaaggcccccgccggggactttctgtcgctacgggagctgacccacgaggaggtctcccacctcctcgccttcctatacacgggctccctggcgacgtgcacggaggagcggcacctgcacgcgttgctggtcgccggcgacaagtacgacgtgccgttcttccggcgagcgtgcgaggcgcggctggcggcgggggtggaggcgggcaacgtgctgcggacgctggaggtggcggagctgagctcgagcgcggcgctcaaggagcgcgccatgggggcggtggtggagcacgcggaggaggtggtgttctcgccggagtacgaggagttcgccgtcaggaacgccgccctttgcgtccagatcaccgcgctctgcttgccaataaagcatttcccgccaagacgccttaatatcccttttatttttcttcgtttagaatttagttagacgacgtacgatgtataagtgtaattaaatgatagtacatgcatatctctggaattaatgtgatcaatatatacaatttagattctttgcacgaatatttaaacgacaaaacgccggtcttgttcattcagcacccaaaagatgagcaaaattttacaacataattaactgaaaatatagatagtatactatgtatattcctcacaataagcttgcgctgcggcagatgagtattaagtcgaaacataaagtactttttttagaactaaacatagagtagttcattgtggatcaaattgatgatccgtccatgcatttcttgatggcttgcagcactgcatgccgaaccatttgttcatccacgcttctctctgcagcttcactctgcaaatacaacaactaagtactaataaataattcactaaagagttagggaaatgctacaagacgatatcctatttggacgggataatatctcaggtggtgtccccccgttcgaacgggataccgtcctgtagtattcatcaagatttattatgtaagtactccctacattccatattataagttgtttgatttttaaagtcaaaaacttttaagtttggtaaagtttatagcaaaatataataatatttttaatgcaaagcggtgtagcaaacattggatcgaaataaatataatgctaaatttaatgaaactaatttgaaaatattgctaatcttttctataaatttggttaaatcaaaagaactttgactaaaaaaaagtcaaaagtattatcaacgagtactattcttccgttgtcacaagaaaggggccgggttaattagccaaattaatcaacgaaattacttaatctatcgatagataattagtgtggtacgtactttggctggatccaaacgcttcaaaacgaaatgcggtgtcatctgcgcacgacacgtcagcatcaaggacgtcgaggccaagctcctcgaatgcttctagcaccgacgtcagcaactcaggctgactcttctccatcgacacattgattcgaaaacctctcttcttctctagctctaccgatgaaacactcacctgcatgcatccatacgtcttcaatgctgcattaagttctttttttttcccaacttgaaggaagagtcacattttatgctatgatgagctataaacttaaagtatcatgaggagcagttgtggagctatcaccaccgtcgaacccagacaactaatagtgtttttcagtgatcgactgatttttataggtattagcggctatctacagtggagacggtagcaacgtagcccaagcgtggacaccgtacaagacttgcccgcgagctatctccgttgctgaagaggagtgatccaaagctatattcttcataacttagttcgctccatcggtgaaggcttgtgttaattagactatataaatttatcttttttaaggaaaactaaatagatttgcattattgttgtactcagtccaatcttaaatatttcacgtttaaaatataatttggataaatca

SEQ ID NO: 24992 - DNA, 867 bp, Oryza sativa
tcactttagcgcctagactggagttctagctcgtctgcatcttcatcgaaggactgcattctcctggcggagctgtgaggcacatcaaactctcccacagagcgcagaatttcctgctgatgtgttcacagcttgcctcaccacacccatcaaaatggcactgcactggttcgtccccttctcatgtttgattgttgtagacagaatttctcatgctgtatctgcatcaataatggttaatattcatgtatataaactattaaaatttaaaaaaaaaactattcaggttttgtaaccgatcgttactccgtgattccatggaacacaatcttatcgaccaaattcctggaaggcaaatgaccgcaaaactcttctaggggagttgaactgaattttcactgctatcacagacactattgcatggaatgttcttcctcatggtactgatagtcgttttagttacaattaatgccagtgatcaattgctttctcattcattttcttttaatctgttatgattcaactttcactgcgcagatctattccaaagacttttcaggcaggatcttttggttgctagtctctttcgcaacttcttacttgctgagagaatcatgcggtccgcaaattgttccccaatttcataccttttgttgccaccaactcatcagcaccatatgtggtaattgatggcactagccattctttttatagtttagctacctcttctgcattttctttaatttcctaaattttaattttagggatgcatgggacatggctgcagagatctgcctttctaagcttcctcaattaattgctgatcctaatgcagagtttcaggtgctattaaccgtctttgctttt

SEQ ID NO: 24993 - DNA, 1501 bp, Oryza sativa
  unsure (1)..(1501): unsure at all n locations
gcagaaataattacagttcaatgcatagatgagtactttgcattccttcaagtggacaacatttgcagagtaaaatagcaaggtctacaaattcaatattacccgtggacatgtcaaaggttgatcagatgaggaggaattgctcaactggtagtaatcagttaggacgatgaagcataacctaatcatagtgcacactgaagctctaaacaccataacaaacagaaaataatgcgctttcacaagttaggctaattgttgtgaaaaatctgcaacagactaggatataaagagttctatacattgcgatctcaagctgttgcatacccatgactcatggaatcatgcctaaatacacttacaaccataatcaaattcagacctagtagacgaatcacctgattgggaaggggaataccatgagacatgagaaacgaccaaatcatacaatttccttatggaaattaaaaaaaaaaaaaaaacgcttccattgtgccccttttcacctttcacatacagttgatatatgaagcttctgtaaaccccaccncnnnnanaaanaaaaaaaaagggggggttggcccagaaacacgttcagcatatagttggacagtacattcaacaacacaagtctaccgattacaaatatctgtcagagcccactaacatttttattcatctttcatanccagaagatggcgtncgtttctgcgcaccctcaacaagcagatatancnnggcttcacatacctgcgatgtgtctgcctgatccctaggttcctcattgagtgaggaataaaccatccatgcatggtccaacttccgctctggccggaccactactgatccaggaacttcagcatccttccttgtcacaagaccatcactcttctcaccataccttgccaccagaagttgtgagcatgctgccattgcagctgaaagtggcattacaactgggatcctagtaggattcccatcagctgcagctgggagctccaagtgtgcaacatgagagagggctgtaagcacactgggagtgatgctagcctctgtgtggaacgagacaatgggaacctcaggaggcaatgggttctgccgcaggaattctttcctcctctcatatgtcaggtcttccagagcctgaagatcaccctgaaggaaaaaaagaaaacaataaacatcagtgtcgtccattgtgcaggccgacaaggtaacgatcaagctcatcaagacaaataccttaaggacttttgataccaaaatctccatgagtttacgtaacctgacatagtcaccaagctggccttctcgcaagatatctgaagcaaccgggcttcctccatatgggctttgagctaaagccaaacctgcgaccttgtctttcagttgtggccagtaaagggagagggctgctgctgcatctacaccacccttgctatggccgagaagtagcacccgcttcttcgatccccagtatatttcttctatatattccttt

SEQ ID NO: 24994 - DNA, 721 bp, Oryza sativa
catcataagcaacagaacaccaaatctagacttgacctacctcccacaatcttctttttctttttctttttctaatagaaatagaaaacctcccacagtgttctcactgatttgacatttccccaggcctgactcaggaaagaacccaaatctcctcggacaaggttgaatctttaccaaaatgttgattgagtccagtgtagggctcaacatccacacaagaaaaccttcatgagtcatgacacagatacgcattgatccagcagttatagtatctcaggctcatggatgggacaatcgaacatcaactgatataaacgcactaatgtagtaatgctataacaagacaacgcgtgcacggaccaaatcaatcatttcggcgggacgaaattaacaatccccatcccaaaaatagaatcattatctaggtaggatcaaaagcgcgtagacgaggaaaaaaatgattggtacggacctaaatcatggtggtattcgtagggattgcgcatcattctcttcatggcggtgttgtagtcctccatcctagtgctccccgtcgtggaggagcggcacaggaaaaccccagaggaactccgccgccgttggctcctgcttcctccggcggccatcctgctcctagcagcgacggcgccgcgcgctgggagtcccggggtggccggaaaacacggggcggtggccatggcggccatgtttgcaggat

SEQ ID NO: 24995 - DNA, 881 bp, Oryza sativa
gtgctgtctttggaggttatcaggtgttaggagcaagttgctcttgccagcccgccaccatggattcctcgtgaggtccaacggcaaggaagcaaggagagcatatgattttagaagcaaatgttctttgttttttgcggggacggggatggtaaaagttgtgtccccgttgtgattgacggggaccgtgacggtgaaatttgaaccccacgggggccgggacgcgagggcaatcaccgacggggaattctccgttgccatctctaggcgctaggggcgattgatcgccccttagtaatctcgtgtattaagaccactcaattatgagtacattaaaaactatgtgtcagggttacggataaggaataccctctacccttggatatacgacgagtacggatatggtatacccgtacatatacggatagctccggtatacgttaaggaaatccatcacgtaagaaaaacagagtcagaagtcctactcggataggattgggtctttaccatatcgtgaggggtccgatatctccgagttctacttggagatcacctgatccgcgatataaaagggaccccctgggcagaacctaaggcatcgaatctgaccgccaacatatccaccacagcctacgaagtcgaagcctacaggagcaagacgccgggtgatctagtcgaatcaactcgactacggtctcgtcggtatcatcgagttctgttatttcctttgtaatctgtgatttccatcatataatcccataccaactggagtagggctattaccttccaaggggcctgaactagtataatccttgtcttttgtctgctgatgtcgtactacgtagatcctcatatcaacggaccccaataccctctatatc

SEQ ID NO: 24996 - DNA, 569 bp, Oryza sativa
taaaggtaggacccagtgagcaagaagggagggtatttgtatagatgggccaggtaggagattgcagaaagtctttattgttgtcttctgtcatgatttatttgtattttctcaagctcacaactctactaagttattcccatgaatacaataggaaattagactcgtactgccaggctttagataatttggatgttctttagttcttaggaatcaggctgactaaaattagcatagtgttataatctctttcctggatcactgtgcattttttacacatattaatatgttttcagcaagagactgggctgtgcaagaatcttcttcaggagtatgcacagaagatgaattatgccattccatcttatatttgcaccaaatcagcctaggcttagctcctttcatatgcactgtagagattggtggaatacaatatattggtgctgcagccaggccaaagaaagatgcagagataaaagctgcccgaactgctcttctggcaatccaaggtattgttctgttcttctctaagggtctttttattttttttatattatccaggctattca

SEQ ID NO: 24997 - DNA, 736 bp, Oryza sativa
tcctgtagaatctccagtgctttgtcactgtggcgatcttttcctcagctatcctcttgtactgccatgcttccatcctctgctcctccttctccttctgaagctttcgaatcattgacaaggctgcacttgcagaagttgctgaagcttctctctcctcttccaactccatgaataacttcttcatcataatgtactgtgcgaatattgctttttgtaactgagtatcttcagtttctgccatctttctcaaaggctctgattagtatatggtttactatttgccttagaatctattaaattcatctattgaacctgcaatatttaaaaaaacttcactttattctctgaagacatgcgaggattggatgaagctgaaaaaggaaaaaaaattggagttgattttgaagtgtaaaatcaactcagcctagaataatactgtcacaattcttccgcaccataaaaataatattaccgtacatatgattcctttctagtagtttggtgattatgtaattgtatatgtgatatcataaataacacaaatgagtttcagtttttgcacctactaaaacttaatccaggatgtgttaatatttctatcatagggtaaaacttccatccacattgtacgcactacggaagtcatatcatgtatcctataatgcttaaatttatgcccctagcctaaaatgtgtgatcctgccatgaagaataagagaaagagatgatatta

SEQ ID NO: 24998 - DNA, 1087 bp, Oryza sativa
  unsure (1)..(1087): unsure at all n locations
cttattctattccagccgccactagctatagctcggttacaacttataaaatactatagaaatatcccttggatgttttcgaatctgatgccgtgtttttttttcctttttcaatcatgttatgcgtgcacgcatgcagcgtcgtgggcaatccaatgatatgcgggagcatcagcggcagccatgcggggaacgcgaacgcagcggagtgcgccaccgtggtcgccccggtcaccgtgccattcccgctggactccactccgagcagcagcagcagtgagtccaacctcctctcgtcttgtctttgcattcttgggatcgatcggtttgggggatcggagggagtttaatcgtgttcgtttgggcgtatgtgcatgcatgcgcggtgtacgtgtgcactgcaggggcggcagcggcagcggtggggaggtcaaagggtggaggaggcgccgcgcggttgccgatcggagtagggacaagccttggcgcctccgcgcttgtgctcctcgccgtctcctgctttctctggaggcgcaggcgccggcaccgctgcctcctctcgggcccctcctccgtcctcggcatcctcggtacgccacgtccccatcaacaccagtactaaaatgcacgatcgatcagttagttaatatgtgagtgtaattggtgatttcagagaaggggagagacgtggaggatgggggaggaggggaggtgatggcgaggctggggaacgtgaggcagttcgggctgagggagctgcacgcggcgacggacgggttcagcgcgaggaacatactggggaaaggagggttcggggacgtgtaccgggggaggctctccgacggcacggtcgtggcggtgaagcggctcaaggacccgaccgcgtccggggaggcgcagttccggacggaggtggagatgatcagcctcgccgtgcaccgncaccttctccgcctcgttggcttctgcgccgcgggcttccgcgagcgcctcctntctacccctacatgcccaacggcagcgtagccttccgccttcgaggtacgttacgtacgcttaacgtgacacacacaacacagtggtagtg

SEQ ID NO: 24999 - DNA, 682 bp, Oryza sativa
gggacgtacgggttctgtataccctacgtaccttgctggttcaaacatagcaactgtatgcagcatttatactcacaagcaattggcgttttgttgtcttgtgctgcgcattgagaactgaaattgtttggagcaaattttgttgaaacatttgttacgcaaaaaatttatgaagggaagccgccgctggactggcagacgaggaagcggatcgcggtggggacggcgaggggattgctgtacctgcacgagcagtgcgacccaaagatcatccaccgcgacgtgaaggccgcgaacgtgctgctggacgagtgccacgaggccgtcgtcggcgacttcgggctcgccaagctgctcgaccacggcgactcccacgtcaccacggcggtgcgcggcacggtggggcacatcgcgccggagtacctctccacggggcagtcgtcggagaagaccgacgtgttcggcttcggcatcctgctgctcgagctcgtcaccggccagcgcgcgctcgaggtcggcaagggctccggcgtcatccagcaccagaagggcgtcatgctcgattgggtaagcatgcacttccacatttcttctccaattttcagctttttttagctgctgtttgagccgtgatcgaaaagatgttgcactagttcttgtttgacgaattaaaagcctcggt

SEQ ID NO: 25000 - DNA, 1164 bp, Oryza sativa
agttaattggatccatgccactgcaaatataacattagatccatgccactgccatccagttttctgtcaatctccgtcagctctctccctcttcctctccttgcttctcctccaccttggcgaccggcacgacgcacacgatggcgcgcgaggtgcgacatccaggggcggacgccgaggcggagctcaccgtcgaggaagcggcggcccatgcctactccaagagcccacggcgagcctcccacctacctccccaccacgtggcctacctacctccccacctcgtacgttggtgatggcaaccggcctcgcggctcacttccagtccgtccccattggcgatgccggcgccgacgcccacgctactgctggcgcacttcaccctcccaccgctcgccggcgaggacctcacctcctcttcgtaaccgccctccatggccacctctccaccatgctgtcgcccgcctcccgcctccctctcccgcttcctcccccagctcaccccactccgcctctcccgcctcatcctccacctcacgccctcgccccgccacgacgatggccacctccttgactccctcctgcaccacgccttccagacctcctccagcacgtcctcctcaccgcccgccttgccgttgttcgctccaatggcgccagtggtggcgtgcagcagcggtagaagttcttcgtctggtgcaggggaagaagctctccttggccatgctcgccttctgcgtcatgcacacccacggcctgctcccttgcgtcgagtcctgcaacgtcttcatcttcaccgcgctcggcctcaggctccccaagatcgccgagcctcgcaccaacgcacagcacccatccaaccatcgcctcccaggcagacaccccaccgtagcttcatcgccactgctgccaacgcccatctcgtctccccgccgagagagagaggaagagagatggaaggagaaggggggcaaagtgacatttcacaggtgagattagacagagattgacaaaaaaaaaactagacgggagtggcatggttccaatttccccaaatttcagtggcacgtagccgatatagcaaatagtagtgatatttttctaatatgccatatttgcagcggcaaggagcttatgcaaacatatgaatgatcgctccagaaa

SEQ ID NO: 25001 - DNA, 964 bp, Oryza sativa
tttttaaccgactagctatttgcccatgttgcttaggtaaaaattaacttggacaaccaaaaccactaaaagtttgaggacagaagatagaagttgaaatgtacagattatctcatttaagatgtcagcgctttttaacagactagctatttgcccatgtgttgcaacggatggaaaataaatatagtataagatctaagttaaaacacaaaaataatctaaaaaatgtatattatcatcgcataaattttttttagcactacattcgtacatgcatagatcctacacacaaatccaaggagacccatgtctatcgctggtccttgcgcagttgcgccagaaaaccattgattcagtttgacatgtggcaacacggttcagtgattataccaactttggttgtctacctgtatgattgtctctgcaagtggaatagttgaactcaagtgtaatgatgctatattttgatgagctaccacagaccagatgcaatacatgtccaagaaaacgattttctttcatttttttcctattttaggagcagttctacatcaatattaataaaccagataagtccaacataattttcaactaccgtacagaagacatgttataataagcttttaacatacctgcataaaattgtaacgctctcttccaattgattcattctcagcaatggaaaaatatgccagcattggatagtgcccaatataggatgcatagctatccctttggatgtttactgcccattcactgcaataaaagaaatcctcaatactaagttactacattcccaacaacacatttttgtttattttggaaaaagatatacttacaatcgattcaagtcagcatgccctgtgcccacatatttcgcttgaagatgctcaagttgagaatttatgttgaacctgtcgctagcctttaaagaagatgatttatcatatcaacatcatggtca

SEQ ID NO: 25002 - DNA, 997 bp, Oryza sativa
gggcatggtccccaaacatcagaatgtattaatatgaaaggctcacagttacgaagaccaatcccaacatatgtagaccgagtatgttttccaagctcacaagcatcacacaccaatctatgcttatccactttactaaagagatctagatacaacttactcaaaatctcaaaagatggatgtcctaactgacaatgaagcaaactgatctccttctcaacatttccaaccaccgcagctagccccagttcctcatgattgatgtaccacaacccatcacacctgactctagtcccaatcctcctcccagtccccttctcctggaacagatgagagttctcatcaaatacaacaatgcacttgagttggtcaatagctgagctaactgagagaaggtttactggaaaggaaggaacatgcaagtcagaggataagtttattgatgatgtgcactctactgaccctataccatgaataggtttggatgtaccatcagcgatttggatagtttcaaagtggacataaggggtgtatgatgtgaaggtattatgcaatcctgtgaaatgctttgatgctcctgagtctatgatccaatctataggatgtctgtatgtaaatgcaagtgcctgtgcctgaataccttcgcccacttgagcgtagttggcgaagtaccaaaagtgagtggtggtgttggagctctcattgatcttgttcttctgccattcctcccactgtgtcacctgttcacctgttaaggtaatagctttaccctcctctatggctacatggcatgaggagcacttcgcccctaccacgaccttcaccaccacgatctccacaacgacctcttctaccactgtggttccccccaaagtaaccagggtctcatccaaatccaccacgggttccaccaaatccaccataccttcctcgaatcaaccccctaccgccaatgttccgagaagtgggacaattgagctcacatgacccacttgtc

SEQ ID NO: 25003 - DNA, 2216 bp, Oryza sativa
ggtgtcacctatctaacaacgacacccaatggctacctttttgataacgcaagctgactcagataagaagaatctattccattgtaaaatttatactatttcaaagctttttacccgcaagatagatgactgattaccagtttaagaacattttaatgcatacatatataacaaagtcacaaactacttaccataagtacctaggtagaggtatttgttgccgaacacacgcccaatccgagcctcccatttgccgttgtgatgatgcctgaataaaacagctgttaattaactgattctactagcaatgttcagtagaaaactggaaccttcagtgtagattagtactgattaactaccttgcaactcctctgtacttggacacccctcttgagaagccactgctcttcctgcagggtgaaaaaggtttatgatcttaatcaagaagaactacttcaaaacacagcttctcagacatgaatattcactatgtctgatcagagaagcatatttcaatgggttttgatttggatttttctgaaagtttgtaatgatctgaattaacttctctttgttgaaagtcagtggtaacatggggttaactgaatatttacctcggagcgatccgatgtactcttccctggactgcccctccatttccttcaattcctcgtcatatgttgacagctgcagagagttccaacatgagaaaaacagcaacaatcttcctcagaaaaccaaacagaatcaaacaagctgcactgtgcgtgcatttcttgaagggttccgaagaacgcttgtgcagaggattcagttcagagaaagatgccatggatttttggagaggcgtatgccacgtacagggaagttgaggacggtgtcgtggccccagtacttcaatgcggcgaggtcgtaggcgcgcgccgccgcttcctcgccgtcgtaagcccctgcaacgccggcgcacagacagtgaggtggtcagcaaacaatccttctgcgtggccatggattttggtttcagaatgttcagattgggagctcaccgaggtaaactgttcgtccggccacgccaatccgatcgcaaaatcagagcaacaagagagaacgcagcgaaatcagaatgagcaaattgtctgacgagcagctcgagggatgcaactataaggtggattaatggagtgattggtgatgataccttgtctgcccttcttgctctgcgactcgttccaggtgttcttgtcccagagatgcgcctcgaaccgcccgtccaccggtgcctgcgcgccaaaaaaaaaaaaatccaaaccacaaacgctgtcagcccagtgcggcgaacgtacgccggtgagaaaatccggccagccaacgcacgcaccgtgtgacgccgcggaacgcggagctgcgctgggaggggcaatcccgcggggcgctcctccgcggccgcttctgccgccgcctcggctcaacctcaccgccgccgccgccgccgcagacgccggcgctacagtcgtcgctgctcgcggcggcggtctcgccgttgctgcgtcgcttggccattggcgaagagcgagcgcgggaggaggagggagatggtatatatggaatggtggtgccaaccagaagaagatggcagcaggagaagagagcttttaaaagagccggagctaaataaatggcggcaaagttgcagccgccggcacagctttaatatgctcgctcgcgtcgccaaaatggaggagacgaggcgagctgagctgaccggcgggaggaagaagaagaagaggaaacagagagagggagtgaggcggctagccttgggttgcagtggtttctctctcctcagctgtgtcctgtctctctctctctctggatttaccggtggcagtgttgcggtgaattattgacttctttgtcccaactccccccaatgttgctgaaaaaccagccacaaactatccgtcctataaaaaaccaacttactaaatgtgacacatcataatattatgaatctgaacatatctctatttaaatttattgtactacagtatgtcacattcagtactagatttattttttttagacgaagggagtagttgctaaactctctgaacagttaaacctgattaagttacagattttattttgatttttattaatgtattttttaaaactgtaaaatggtgtattttataaatatctcataaatcgatttt

SEQ ID NO: 25004 - DNA, 763 bp, Oryza sativa
actgtgatgcttcattgtgacaataaatcagccatcaacattggaaacaaccttgttcaacatgatcgcactaagcatgtggagattgataggttctttattaaggagaagattgatagtggggtacttatgctagagtatatcaagtcatgtgaacaactagctgattgtctaactaaggggttaggtcctagtgaaattcaatcaatatgtaacaagatgggtatgattgatatcttttacccatcttgagggggagtgttggtgtaaataagtgatgttcctaggacccatttgtaaatgttaagagaatataaaggaggagacgtgggaacaggggagtaaccctgaaaaaccccccaaaattagacaatatcccctctgccaactatatcttcaggtctgcaaccgcatctcagttgtatgcagtaatgcttatgcacggagcattaccacgtttgaactccttcctacgttctgttggtgccttctaccccggaagtgattctccaagtcagatgcagatgtgcaattagccttgcaagtgctgcaactccatcttggcacaaacttttggttcttttcaacaaactgcgccacttcctttgcatacacctttgcttccatttccttgtcttctctcttcagggcttctaagttttcttggtgcctcctacctcttaggtgagtttttaagtccagttcacttgaacaattggctttgcaaataccataattccatgttggtggataatgccgtgtg

SEQ ID NO: 25005 - DNA, 2379 bp, Oryza sativa
ttttcaaaaacaaagaactcgcaatgccacacttgctgacgaagatcatgatgaatcaacaaatggataggatgcggggcaaaagatttagcgagattagtgctgtagccttcccgtgatccttgtagctctgctttcctctctgctccctcttgtctatgcgtctcctctgttttttcttttggtcctttgtttctcaccgttatcggtagtgttgctgtacagtttcctccccttttaatataaaaccagcaaagctggctcaggtttcataaaaagaattaccatgttcatatttatattcggttcattcaatttaatctaaagcctacaaagcaaaaaaaaaccggtttccgatgttggactggactgtcagtgactatgctggtctggcgaatgtggccggggcacagagccacagattgtggtaaactacggcctgttgaattaagcccatatcgaactgggcctggatgtcacggccggcccacttttttccagtccgaatctctgtcgcggagtcatcacttctgtggtaacactggtactccgaggagaggatatcgcggcgcctcggcggtgcgaactccgaatcagaacgggagtcgaattgattcgtgaggatataaggcgcgctcggggacgtagcagccaatcaattcgacgtgtgattccactccacagcgcgctctctcgtctccggttcgcttcgccgcacgtacaactgtctctctcctttgtgacatctcgccaagctagctagctagccatggcggcagcggttctcccttcgctgctcccgacgccgcccgcgagcaagttgccggcgctgctcccgaccccgctgaggagccagatgctgccgctgctcccgacgccgtgcctcatcatcctcccgcctccttccgcgcgccgccggtctccgatcccaagcccggccgcgccgacgccgtcgagaggtgggacgcacgcaagaaagccggcggttcggcagcgtcgtcgtcgtcgtctagctccagcagcgggatcccctgccgcgccgacgcttgcgaacgctgggacgcgaacaagaacaagaaagccggcggctcggcagcctcgtcgtcgacgtcgaaggccagcggcgggatcagcccggccgcgccgactcctgcgaacgctgggacgcgcacaagacaccgggcagccctgcgtcgtcgaccggcagcagcgggagcccctgccgcgcggactccgtcgagcgatgggacagcaacaagcggccgctgagccgcgcgtcgtcggccgagcgctgggacatcaacaagaagcctcgcccaagaaagacgctgtcggcagcggcaagaacaactccacaagccagacgacgacgatggtgaagcctccgcagccgttctctcaattttctggtccggccttcttcgcttcgccggatccgggcatgcttcccattccaccttcttgttggctcactagtcactagtgtggttcctgtcgctgagaatgcttgcttctagttcaacatgggtgtcgtgtgtaagtgtgttcaggttgtagagattggaatggtcgtcgttgcatgcatggtgccccggccgcatgctttgtgctcaatcagcactggaaatttcacacggttgtgttagcctaattgcagttgtaatgttagctagataaatcgaattaatggttttgaggatgaggctgtccttgtatgatttgttatattttctgttggaattaatagatgggctaaggcccatttgaagattaattctttagaaaatcacaaaagcccacctcataagatggcatgcatgtggagtttagtaccaccttgcttattctaggagagggggacctcctaaaaagggaggatgccctcctagctacttgaagcatgtgtggtggagagaagaggggaaacatgcgcttgctcgccatgtctggtaggcggaaaattggttcctcacccttgcgcagatgcagcctccttttgcagttttgttttgctgcgggaaattcggatttgttttgttttgccttttgcagttttgttttgctacgggaaattcggatttgttttattttggaaacattccgaaaaatccggtgcgtgaaaacgtccttttgcagttttgttttgctgcgggaaattcggatttgttttgttttgccttttgcagttttgttttgctacgggaaattcggatttgttttattttggaaacattccgaaaaatccggtgcgtgaaaacggcatggagtccggataggttacgcgcgacttatccggttcggtttacgcgggcgccctgatcaggcgatctatctctatataaaccgagccgccgccttcacgcaacacacgcgaaatca

SEQ ID NO: 25006 - DNA, 1082 bp, Oryza sativa
atgttgattactaataaataacctctcaccacatgaaggtggcgtcgggcatgaccatcccaacggacccttcaggtacttaccactgcaggccgattccagcaggatactccaaggtcgaagttgagttggtcgaaggcgcgtacgaggacctcgaactggattaccctggaggagacggtgagacgcatctacgagacacaagccatgcaattattctatggcgcaggctgtacatcatcctccctgggcgacaagcggcgtctcgtgcaccatcttctctggctccgccatctcctccggctccgccatctcctcctcaggatcctgcaccgtctcctcctcaggatcctgcaccgtctcctcctcatgctccagcaccgtctccacctcaggctcctgcaccgactcctcttcaggctcctgcaccgactcctcctcggtctcctacaccgactcctccgcaagctcctcttccggcaccttcaaagtcaagggccccccaggctccaccgcctgcccacagaagggcaacgaagaaggcaaaaattgacgccgccaagaacaaggacccggggtacgattgcacacaagaggagcttgacgcttacatggcatcagaagtcaagagacaattcaagcctcaaagtccagaaaagaagattcctatagacccgagtgtcatgaacttcttcaggggtatgtctgcacctgccaaggaggccattaagctatcggactatgagcgaacgctgaagaaagcatcttctggaaagtccaaactagtccctcagcttggagagcaaccaaaccaggagatcgagccgttggtgaccggtaaagaaatgacgatagaagaatttattactgacaccggtctaactacggatcaattgctaggagtcacaccaatcgaaaaggcggaagtgaaatacatgtacgaactcggtaaaccgcttgtcaagcctgagctgctgcagtccctacccacacaaatgtacaagttccatccgctgtacatggagatgagcgccaccggtagagagatgatcggagcgaggatcagggacacggacttcttg

SEQ ID NO: 25007 - DNA, 4884 bp, Oryza sativa
aggtccttgtatataagtagactatagaaaataatatactgccttttatcgttgtagaatggagattcaaagggcccgacggcggggggttttcgatactggattcatcgaccctcggaaagtaaacgtcgcaatgctcgaccaatatccacaagccacagaggacaatctcgtccatctcctgaaggcgcagcattacaagacgttcatactgttgccgtacaacatagagttagtttaatttacctgttttcctataccaaatttcattccggtacgaacttgttaagtgtttcatatgtaatgcatcccacgtacattgcagattccactgggtgcttttactcttcgacctgtcggcctgcaccgtcaacgtatatgactcaatggataaaaaagagtctacgtttgacaaggttttcgaacttatagacaggtaccgtcataagttcctctgttaattaagaaaatcttgttatgttaattgctactatgaatcatagctttaaactccatgtagggcttggtatcggttccgtcatttggtccgggtaaatggagagaaagacttaggcggaagttcaaatttcctgtgagtacacatgctctacatttatatttctccgattcaaatacatacaagtgtatattaattagatctctcattgtttgtcatttattgtagtgcgcaaagcaaaagaagggaactaacttgtgcggctattacgtgtgcgagtattgccactgccttgcagaccaaatcatcaccataagaaagctcaatgtacgtacaaataaattcaaaatttcattacgtatcgatttcttgtttaattactaatcaatttcatacattcatatagtttattcgcatgagggataacctgaccacgcacaaggaatttatcgcggcggttcaagaacaactcatgggattcatcaacgaacaaatccttgatcccaagggtgaattctactacgacggaaacacaattcataggtccttagcttctgagctagcgactactactacgtcgaaatcgtagctagctagaacatataatggattgtaattaatacatgactacatatgtttctatatgcatgtgtacacattttctataatgtaaatatattttggtcatatatatatacatatgcatttgcataacatatatatgtatatatacatatatattatgcacatgtacatatgtattatatatatatatatatatatatatatatatatatatatatatatatatatatatatatatatatatatgtatgtactgaaacatggtttatatatatatatatatatatatatataaaccatgcagcaacagggccatgcaaaaaaaaaggtcagctcgatctttagtcccggttggtaacaccaaccgagacggatgagccatctttagtctcggttggtaacccaaaccaggactaaagatcgatctttactcctggttaggtagatgcccggtttgggttaccaaccgggactaaaaatcgatctttagtcccgattatttcacccgggactaaagatagcgatctttagtcccggattggtaatcccggtttggaaaccgggattaaaaggggttataaaccaggactataaagggtttctccaccagtgtatcgcccagtcctaagctaagtacgtctccgttttatctgccgtgcgtagtgtatttttttcttttagcgtcggtgttccaccgtgttagcttgaagccacgcgaggcgtgagtgacacgagacccagagcagctgaccggctgcctcgtctaccacattaatctggacaactggattataagtaagatattgagtcgatactgaattactggtggtcaactgtttaattgcacacatacatgatcaattgaatataactatcatctatctattatattattaaaagaataaaaaaatgagcctccacgttcgctctcatggcctagaaattctcacgttaatcggagaaaaagaaaaagcagagtctatatagaaatacaatttagaaatagctgaaattcggaattaaaaaataaggaatattagaagaggagactagagtccatatagaaatacaatttagaaatagtttaaattcggaattaaaaaataaggaatattagaagaggagactagagtccatatagaaatacaattaggaaataactgaaattcagaattaaaaataaggaatattagaagtagagtatagagtccatgcagaaatacaattaggaaataactgaaattcggaattaaaaataaggaatattagaagtagagtatagagtccatatagaaatacaattaggaaataactgaaattcggaattaaaaataaggaatagaagtagagtatagagtccatatagaaatacaattaagaaaaaaaatagatattcggaattaaaaaataaggaatattagaggttgagtatatagtctatataggaatttaaaactaactaaaatttggaatgaatataataaaattaaaagtagagtttagagtccttataaaaatacaatttacaaataactaaaattcgaaattaagaaaaacatgggaagaagagtttaaagtcaatataggaatacaatttagaagtaactggaattcgaaattaaaaattaaagaatattgaaagatgagtttagagtccacatagaaataaaattagaaataataaaaattcagaaataaaaataaataatattagaagaagagcatagagtctatatagaaatacaatttacagaaaattcggaattaaaaaaaagaaatacgagtctagagtacatataagaatatatataatttacaaataactaaaatttgatattaaaaataattaataattaacacgtatataaaatataatatgaatattacacattagtagttttgtaaagttattgcaaaatttaaaattatgttgtcattttaatatatttgaataatataatgataaaacatatatgctattatatgagagaaaatataatgatgctagccgcgcaatctacgtagctcacgatgctagttaatataatctactaattaaaatagtcgattgaataaaaataaatttaaagccctaatttacgtttcgttctggggcccactgatctcacctcggtggaatcgggctcggcggcgagagcgaactcggtcggcgccccctcccattccacctgcgcacggcccaagcgcggggcgtggccggcgagctcccgtccattccctcgtctctctggataggggatctggaaaatttgctgctctcttgatcgaacggtgaaactttctcaccattcatccatccggcgaaacttccactgatgaatcggacttcccaaacctttccacgctctcgctccaaatgaccaaaagccagaggaggagggtttcgcagcaacaacgtgggcgcccacggcccgcgcccggtcagcgaggaaacagatcgaaaaaaaacaaaagccgctgacgtcacgatctcgaggctcgcgattcccaacaatctctttaaaaagcttcctctcgccgaatccccctccacctccaccacccgccgccgccgccgccgccgccgccatggcctccgacctgcgcccgccggagcaccaggtggcggggcaccgcgcgtccgccgacaagctgggcccgctcgtcgacggcgaggggctcttctacaagcccctccaggccggggagcgcggggagcacgaggccgccttttacgccgcgttcaccgcgcacccggccgtcccgccccgggtccggggcgccttcttcccgcgcttccacggcacccgcttcctcccggccccagccagccccggcggcgcgccctacccgcacatcgtcctcgacgacctcctcgcgggcctcccgtccccctgcgtcgccgacgtcaagatcggcgcctgcacgtggccgccgcgatcccggacccctacgtcgccaagtgcctcgccaaggaccgcgagaccaccagcgcgctcctcggcttccgcgtctccggcgtccgggtggtcgatgcccggggcggcgccgtgtggcgcccggaccggtcggagctgaaggggatcgacgccgccggggtccgccgcgtgctccgccgctacgtgtccacgggcggcggcgacggcctggactgcgcgctcgccgccgcggtgtacggaggggagggcggcgtcctggctcagctgcgggagctcaaggcgtggttcgaggagcaaaccctgtaccacttctactcggcgtcgattctgttcggctacgacgccaatgcggcggcggcggctgctcccggaggtggaagcggcggtgtaagggtgaagctggtggacttcgcgcatgtcgacgatggggacggggtgattgaccacaacttcttgggcgggctctgctcgctcatcaagttcatcggcgacattgtcgccgaggttaccgagaaggcgtcttcagatcattcttgaaaattttgtcagcttggagatcagatgattaaacggtaaagcaatgcccctctatgttttgttctttttgttttgttagatttggatgacaatgttagacattgagtcagtaaacaaaaggaggatgtaaagcaaaacggcaaatctcttgtgtcttggattatgttctatactgatggaagaagattaaagtataaccagaaaaagtgtcactgtggtctgggggatgcatgaacttgaaaaggagtagaattaaatatttatttaatttattgcaagaaagagtagtagtagaatattgccactttaatgaaagttatgatgctacgaaacaaagaattggttgctatgcatctagagaacctg

SEQ ID NO: 25008 - DNA, 2329 bp, Oryza sativa
agttcacgctaaaattaaaagtttgattgaaattggaatgatgtgaccgaaaaattggaagtctgtgtgtggaaaagtttgatgaaaaagttaaaaatttaaagaaaaagttgaaaactaaaccaggccgtagtactacatgtataattttaggacgggatggagtgctgcaagtctctctctagatctgaatctccgacaacggttagaagttgtgttcttctgtgaacatcacgtcacatgtactctccgtgacattgtttcaatcaagattagttcaagctagagttcaagtatagcatatccattatatattaatactgagatttactctgtactagtatatctaaacaatcaagattcaagagctagtactgtagtagtaggtgttgtttacggaagactggcattgcatgcggttgtacgtgatgcacagacatttaatgcgcccgatgcggttgtacgttttggagttcggtgtactgtttaagcggcggccgatgggcctgaactctatgtgggccaaacgtgaggcttggctgggttgtgtcaccgggccgagtatactaattgggccggcctaaatgcctaattatcaaaggaataagttcatccgaggtcccttaacttgtcaacgaatccgattttcgtccttgaaccccaaaaccagatacaacggatccctcaactatcaaaaccggtgcagataagttcctctggcggtttagagggcggttttggctggcgtggcgcttcatggcaattcgatccagaaaaataataaaattagtggggcctacatgtcagtttcacaaaaaaaaaaatggtgggacccacgtgggccccacgtgtcatcctcactgctccgttcttcggggaatcctctctctctctcttctttcctatgatgtggactagggcggcgggcgaagtggggcgacggtggccggagcgcgggcgcacgaagccagcgggacaaccgctcaccggtggccacttcgatgatctccagcccctgtacctgcttcggcggctgacctcgtcgagtgcttgccgggcctgggcgtcgccgatatccggtcggacgacaggcgcgtcacgaaccttcaatggtgtcgtgtgccgggctgcggctgcgactgcgtgggcctcgcccgcgactggagcaccagagccccatcagcatggaaaacgaggcgcgtggggtgacttcatcgactgcttcgggctgaggccacccagctggacctaccacaccgtcgagggaggctttcgacccactggctgggaatggacggccacctcatcaggtacggcgaggacggtagcagcctcgtcagggtgatgaatctgcactacgacgccgcagtagccgccgccgaaatccggtggttcgtaagtgtgtagatcgaacatttgtttgtcatgctgcaacagtgtgatgtgagtaaacattttggcactgaattttgttcaaatttcaacgggatttactgagggaaataatggattgtatcgtgagtagaattgtagaaatagaatcgaacagcaactgcagcaagcagtttccaatccctgtgaaatcgtggagaggggagaaggagaaaatggcgacgtgctcaccattcgcttccggaagctggtggccgaccagataaatggcgcccgacgccgatgatgccctcctccatggcgccgcttgcgtcccgacgccctgctcctgcgccactaccgccagtcactgtcactaccgcttgcgccctggccctccttgacgccgccgccgcttgcaccctgtggccccgcgcgccgccactgcactgctcccgcgccgccgacgcccaatcgccgcatcggtggcccggtgccctcctcaaacccgtcgccatcagtgtcgtcgtcttcgatagcggcggcggggaagtaggtggagagaagcgggagctcgcccgccaccgcccatagcgaggacgccgtcgaggtcggtgagcggcgcggaggacggtggaaacggtggcgggggccgcgatggtgaggtgtgcgtccttctcctagcggaggacgccgctcctttctcaccggtcgccggccgcctcctgcgcatgcgcgcgctcctttcctccctccggccggcgcccgtgcgccgcttcttatctgtgccagcgagaggagggaggagaggggagagagatgaagacgacgagagatggggagagatcaggagaaagaagatgaggggtgagaatgactcgtggggcccacgtgggtcccaccatttttattaatttgtatatgaaactgatatgtgggtctcaagggtttttttttt

SEQ ID NO: 25009 - DNA, 1936 bp, Oryza sativa
tataattttgcgatcaaaaagccgctcaacaagctgctgaaagtcatgaaacttttaaagacatcagatttatgcttaaggagatatatccaagaaaacttgctatagctatcaatgaagctaaaataaaatttttttcctcgaaaagaggtggaggcggtcccccatacatctgaataaataagttctagggttttattggacacactcaaagaatgggaatacggtaattgattgctcttggccttttgacaagcatcacacactgactctttattagattctctaagacacggtaacttatttgaactaatgaccttcataacaatgggatatggaaggatgcccgaaccgactgtgccaccgctcaagcgatggagcaactgcaaaggcctgcttggtggatgatgtggacggaagcggatagagaccatggcggcgtggccccttaagaccgcgctccttgtggttcgatccttaataaaaaatacttagactgaatctccacaaaaacagagttatcagaggcaagtttagttgctgatataagatttttagcggcctgtggcacatgaagaacataattaagatgtaaaggacaagttggggtatgaactatagcatgaccaatgtgcttgattttcatacctgcaccgctagcggtgtgaatctgatcatgtcccttgtacacctcccgtatgttgagtttctccagttgactagtgatgtgatcggtagcacccgtatcaacataccagttcgagttagcgccatggctgtatgtagctgcggcgacgagtttgtcatctgggacgtagtcttcgtcaaagcgatgccagcaatctgcagcaacgtggccacgtttgtagcacacctggcataaggggcggccgtcgttgccgcgctgttgacttgagccacgcccacggccggagccgcggccgcggttgctgttggcgttccggcctcttcctgcgccaccacgtgaggagaagcccccacggtttctgctggctgcattcgcggagccttgcgtgacgaagcgccaatctgctctcgaagctcaggagctgcgagacagcctctgctactgtgaccgattcagttttggccaccagcgcagagacgactggatcaaagtcttcatccagtccattcaggatatatgcgatcagttcatcgctatccatggacttgcctgctgttgctatctcatctgcaaacgatttcattttaccaacataatcagaaactgaaagattacccttcttcatggtgatgagggccagccgcacgttcatggtttgagcatgcgtttttgctgtgaacatttgctggatcctctttccaggcttcgcccgtcgttgcggcagtaccaacttgccccagcgtttccttcgtcatggaggaaaacaggaacccgaggatctgctgatccgctgcaatccattcgtcatgccctggattggaaaattgaacctcttttctttccaccgtttggttgattgtgccggattgtcctgccgttcccccgtgatgggaccctccaagcctgcgccacgaatcactatgagaacctgtgctctccagagcgcatgattctgcttgctcaatttctcggagacttgaaccccgaacagcggattggaaactgcggtagaggaagagctggccatctagattgaattggttttctctcgctctgataccatgtaaaacagcgaaagtgagatgggttgaacgtcgccctttgtttcggtgcgacggctgcgtgttatattggcgcaccaatcggcgctgagattataggattatatagcctctaatctagccgagatttgatctaaaggatatacatcttatctaaactaacaatctaaatctcagctagatcagttaggcaagatatacattaatacatgcatgttgtttaaca

SEQ ID NO: 25010 - DNA, 1076 bp, Oryza sativa
tatatgttcgttttatatcaaaaatatttgactaggaaaaagagtcgaaacgacttagagtatgagtatttttcttaatcctcctgcacaaatctaaaataatacatggttcatattttgaaaaagaataaaaaaaacagagagacagtagtccgtccatgaagcgacgagatcaggagcaagcgatcgcgaagctgacgagcatcggcggtggcggggcggcggcgggagagacgacctcctgatcatcttcatgtggaccaagaaggccatgctcgccgccgtcgtggtggtcgtggccaagtgcagggagctctgggaaggggtgctcacggcgggctccggctgcggctgcgtgtcgcgttccgccgccgccgccgacgacgacgacggctactacttcggccggagctacgagttctcgtgctccgccaccccggtcgccttcgctccggcgaaagggcggcggcgccggcggcgctgcctgctgctgccaccctgcgtgggagccaagcaggcgagggagatgctgcgggaggcggcgatgatgtccccggcgccgcctgtcggtgccggcggcggtcgacgctcgccgccggagcggtcgccgcagtggtggagggagcaggagatcgacggcctcgcggaggagttcatcagccggttctacgagcagctgaggtcgcaggtggcggatgaggagcggcggcgggcgccggagtgcaagagcagggcgtcgtcgtcgccgccgtccccgtctccgccataggcgatggcttaattacgtgcgtgcaggttgtgtgcattaaatacgtacgctggtgtttgcgattaatgtcatgtggatgtgtgtgtgttttcgatgatgagagggagttcgttcgttagtgcagttttgaactttttgatatctttccttacggctttcacgcggtttggaattgcttgtctaattatctttgtcccgtgcagttttgcgcgaagctaaataatttacgtaaagttagattaaatatgtaataactctgaaattttaatttttttatgaactattatatggctcttaccttttatat

SEQ ID NO: 25011 - DNA, 1060 bp, Oryza sativa
tcctgtgaagggggaaatagttcttgctcagtttagtgctgacaactcctggaatagagcaatggtacgtttcacttctatcctgatcttgaaagttgcctgtatgtctcacttctatgttgcaagtcaaaactaattatgtgttggggtcatggtttaggtttatgctaacctaagcagcttactagaacttcacaaaatttcttttggtatttacatttttccttgcaaagggggtttaatggcattaattgtgttgtgactttagaatgataatatgctatctttgcaaatcaattgttcccttggttagctgttctgtatagtcaagtaaaaatttctacaagtggtgggtcataccaattgagtaattgcttattttcataaatgtttgggccacttgagttaatttggacccaggaaatgggtgatattgttagaatccattgtaattcatttgacttgctcaaacttgtgttcctgctaaaatgaaggattggataaaagggacttagatgatatattctttagttgaatatttaagggacttggggcattagtgttttatgccaatgttgtttttacctcatagcttcgctaatgttctgctgttgattgcctaaacagctagtgatttcatcctgttgttttaattacatgatccatcatccatgggatcatctctaggaaattgcacaaactcatgttttattcttatgaaccattttagtcctggacttgttaagttgaacattcccgttttagtttctggttttcaaaaataattaggaagtatatccattttaactgatctgcagattgtgaatggacctcgaggagctgtatcatctcaagacgacaagtttgaagtattctacattgactatggcaaccaagaagtcgttccttacagtcgcatacggcctgctgacccatcaatttcctcttcgcctgctcttgctcagttgtgcagccttgccttcataaaagtgcccaacctagaagatgattttggccatgaagcagcagtctatctgaatgattgcttgctcaacagcca

SEQ ID NO: 25012 - DNA, 1582 bp, Oryza sativa
tctgaacctgcgggaagggtgaatgtctcgagcattggggcccacagcatctctttctccgaatctgggacaaagctctcatgatctccgcgtgcccttgttctgcgccagtacaccgtactgacaggcacgttatcccgcacaacccaaccgctatgacgtacatagttcttggcggcttctgccggggcactaggtcggccatcttcgtccacttccgttatgatgtgccgaccctcaagcttcttcgtggcacctcgttgcccgcgtgccctcttctgtccagcggagggttaacttgcactatcctcctccttctggttcccctccacatccctttcaacgtgcccctcctggttcccctccgcatccctctacatgttcccttccttgttcaaatactggtttggatcctctttcccatctttttcattccagtactggctgcttccctccgcgattgtatcgtacaatatctgttcctcatcgcgatcagccatctgttcatacatgaaacagctgctaagtcatgagacatttatgttttaacaatcttatatgctaacaatcatgtgctaagtctaggtgacgtatattacaggaccctagctagtcaataaattatatagtaagtctaattacaaatctaataatcttatattaaaacttaaataatcttatactaaaactcaaatagtgataaatgctaagtttaggtattgtatataccagacccctagctatcaataaattatatagtaagtctaattacaaatctaataatcttatattaaaacttaaataatcttatactaaaactcaaatagtgatatatgctaagtctaggtgacgtatattataggaccctagctagtcaataaattatatactaaagtctaattacaaactataataatcttatattaaaactaagtctaagtgtcgtatattaaatctaatagtcttaattgcattacaaatataacaatcatatatatataattacgtcacttgcctgcgcgaattccttcgagggatagctaccactccggcttgagggacgactccgacaacgtcttttctgcaagatacaaaaagatgtattaggataaacgcgaagtaacatatattgcatttgatgttcacgtttcgttcacgatcgttcacgttcgcgttcttgttaaggtcacgtttcattcacgtacgttcgttcgttcacattcattcacctgcctatattgcatttcacgttcacgttcacattcgttaacgttcgttcacgttcgttgacgttcgttcacgctcgttcgttcacgttcgttcgctcattcacgttctcgttcacgttcgttcgctcgttctcgttcacgttcgttcgctcgttcacgttagttcacgttaattcgttcgatgtcgtggcggcagcggagcggcggtgtggcggcagctggacggcggtgtggcggcagcggacggcgccgggacggcccggtgcccgcgtggcggcgtggcgcgtggcccggtggcgacgttgcgcggcggcggcgaagcgcgcggcacggcgccggcgttgcgcaacggc

SEQ ID NO: 25013 - DNA, 6975 bp, Oryza sativa
gtttggggataaattgggggctaaatgtgtagttttatgatacaactccttaaatctgtagttttgtgataatttcgtcaaaatacctgtagttttgtgaaatttactcataatttaataatataattaatgctaaaattagatggatcaaaatagaaatttctattacaggtgtacaaacagagtcacaaaatatgctaattttcgcatttgcatgtgcgccggccaacgatgcgggattcgactgagacgtgccgatcgatgcatgcatgatcgccactactccacgttgaaactaaacccaagtcaaagtaaacacgtatatttgaagtgcacatagtttcattattagaaaccctcgatttagtcgaattagcgcttagattgaaatgaaaattacgacatacacccattattttggactctttaaatcatccattttggcatgggtgcagtgagcactaattaccgtgcacgcacgggatctaaaaacagtgcgcaggccgtccccgtcacgtctcactgctacatcctggtctatggctgatggccaattcaaccacatgagcgtactttcccggtctcataaaaaataaacatagtcccgttctaactttataaaggcacatatttttcttttttttcgttagcacgtttttcaaactattttataaaaaagatttctatatagaagttgttttaaaatatcagataaatttattttttaagtttgtaataattaaaacttaattaatcatgcgttaatagctttctcgttttaatcttaaaagacgcgaatattagggaatgtcataatatcaaataattagaaggggtgaggtttcgaacccaggtcgtctagtctaccaccttgtgtagctagtcggaagacccttggacatttctccacgcttttaatcttcatccttaaaagattcaagcgggcgcctgatacaaaatacgacaaatcctaagatatattacatcctatactaggtcttctctttatatgatagagcgagtaggcctgtatataagtgtgatcacgcccactcactgacagactcatagacaagaattccactacaacactctaccgatagtaaaaaaaataatctaaatcatcgtttttatttgatcgaatggttcagatctatttatactatcaccctaattagtgataatagaaacgtgaaaaggtattattgtaaaaaaggtgcgaagggacataattgtcatttagcatttagcagtgattaaatatttttttctcctttttttagctttttgataaaatatgagcgatgcgagcgcaatgaatgagcatggatcgatgtagccataaaaaaccctaatcactgcattagtaaattaatatataatttgcccttaataatgaattatttaaattatttttactggtaatataatactatctatcagtagatagcactagctagcgcattactccacacacaatcatctcaggcccagccaggcaaggcagcagcggccatgcatgatccatcgatcgggttcgcaagctatagcaagcagcagctttcatttcctttcctttccccttttccttatcacgcctttctcgctctttggcttttgagaagggagggagtcccggtagacggtagacgcaggcagctcgataatcgacaacaagccagcagcaatagcagtgtgcagtattactcccttcgtcccaaaataattgtaattttatactattcacatttaacgtttgactgttcatcttatttaaaaaaaatttacgattagtatttttattgctattagatgataaaacatggatagtactttatgtttgactaaatatttttaatatttttattttttttaaataagacggacggtcaaacgttgagcacgaataacaactatatttattttaggacggatgtagtacgtacgaggactcatttattaccgtgttttactgatggatgggataacagtactgatggatgggataacagtgacaccccccccccccccccctctctggtgccagctacctgggcagctgcccggtccatggctatggctcacgcctggactgctctgtattccgatgctgcagtgcacaactgcacatcatcgatcggaataagaggtactcctcctcttactgccactctgccagcttgctgtgcaaagcgaaagcgaaaagaaaagatgttctactagtactgcatcgatctgcagtgcgtattcgtttctccgataagagttgatgaaatctcacgtactcgtggcacgcttttcaaactgttaaatggtacgtttcatgtaaaaataaaagttactctaaaatatcatattaatccattttttaagttcataataattaaaactcaattaatcacatgttattactacattattttacatgaaacacttaacctgtatcttaatcttcatcttcacgagattcaaacaccaccccgtacatcggtacatcagtagtactcctacatggaatcattcctaaacgcgctcgctgtagccctagagatagagagaagagagagagagtactcctactttactgtcgtacttatgtgatacagtagccgttaattgaggtgatagttaggctatggcgagcgctccatgctagagcgtggtctcacccctcccgagcgaatattcgcgccacgcgggtatttgtcataacgacggctctaacaggcaaggaagcgtgttggggagaggcctctccctgtgccgtcaccccgcaccattgaaatcaactcactcccgcgcattgctgccatgaacgaggtcgagaagggcctacccggcggtgcatcggaggattacggcaaggtgctccgccgcgaccgttgttggctatttcgccgccccaaccaccgtttcgggcacctccttcgccgaagtcaccgcacaatcgctcgtatcctcaccgcgccacctcgatctctgcctggatccccaccgttgtccccaccactcagatccttactgcgtcggctctatctctgcctccactgctcgcccccccctcccccgctacggcgatcgagtcaggcaacactgaggggagaggcggcgccacagagggagagaggggagaggcggagaggggtgtggcttttggtggcgaggcgtgcgggcacgtggaggaagaagagcgacctgtgtggcactgtgcgtgaggtaaggaagggattggatgggctgggagagtatgacagtgggccatggactaatacgtaattttttctctacccaaaggactaacatagaaaaatgtttatgggacccacttcaagaatgattgctcaagtcgggtcttagactgcttttgctcacgtgaatggtgggggtggtgcctgcgttgaaattggccttatagggcaggagcaatgcaaagcttcgattccaaaaaaaaaagtgtatatcacatatgatgaaccaatagaaggatactattatcgtaatgcaggcaaccttcaagttgggaatgcaattgcccaacgcaagtgcgtgccgtgcctctgtgccttttgtcctcgctcacaggctaggaacccgtgtacttagcaccgagcggccttgcaggcgatgacagagaaccacgtggatgaaatctttgacgtggcatatgcatctcgaatcgacgagggcatactacaatcatctcttggcgaaaacgtacaagaaaaacgaagcagatcagcgcccagaagagactcccaaaaacgaaagtgacgtgtgctagctactgatggacatgatgatcaaacgagtgagaccgatgccgataataatcttgcggacaaaattttgacccacgccgcgcgcaccggccgccgtcacatacccgtgctatctacaggaccgatgtgctaatcctatctatcatagtgttctagctagttctaccgtctctgccccaccaagaaaatgtatgagtggcgcaggtaggggggtgccaaagtgccaacacccctgtccaaacactaccaccactacacccccatacttttactctatattaagttagctaagatagttatttatctagtttattttgggtagcttgaaagtattatcagtttagttagttagcaagtctaaaaatattagcaagaaacatgattaaaaaattagtttgtgatttctcatctttttcaatgtaaaatagatgatacttatttatgagattatttaatactccctccgttttcaaaatgtttgacactgttgactttttagtatgtgtttgaccattcgtattattcaaaaaattaaagtaattatttattcttttcatatcatttaatttattgttaaatatactttcatatacatatatagttttacatacttcacaaattttttaaataagacgaatggtcaaacatttgctaaaaagtcaacggtgtcaaacattttaaaacggatggagtagtttacattaaaagaacttagcaataaatattagttttaaacttccaatgatattattaaagagctaaaattcaagtttttcttaaaggactagtttacgcattgcttgttattagcggtgactatttgacctactttactattaatattagttattcagtcttatgatttatcttcacccctacatcccgtaatctcaaatcctggattcacccctgctgatgtttgcttgctcagctgcacgcctgcaccacaggacaaaggctgatccatgttgtcctttgacataaatatgcttgcatgcgtacgattcacttcgatcaccattcgtgcctgcaaatctgccatggcaaacagaactaaaaagaaagaaaacgtactccctccgtcctaaaatatactccctccgtctcataatataaggaattttgagtttttcttataacgtttgaccactcgaattattcaaaaatttttgaaattattatttattttatttgtgacttactttattgtctacagtactttaagcacaacttttcgttttttatatttgcaaaaaaaataaataagacgagtggtcaaacgttacaatcaaaaactcaaaatcccttatattgtgggacggagggagtaagtatttttggacttcgatacggtcttcgagatgctactttgatcaacgatatctatataaaaataagatgttttaaataaaaaaaagttgcatattgtgatagtttgtttaatgataaatctagtaacatcaattttacataattgatctttttatatttttgctattaatagccaaagttataaatatttgacttggcactagggttgtcaaaaaagctcgaggctcacgagctacttgagctcgactcgtcctaggcttaattcgagctcggctcgagctccaaacgagccgagcccgagcctgtcccaaagctcgtgagctttgtcgagccgagctcgagcttctaacgagcctagtaatatatgattttttattgctatttaataaattggtagatcaaatatgttatttatatgccttgtattggcataatatatttgttttattttttttcctcttctactaatatgataaaccataaattaattatttttaaaaatttatcatttgaaatatacattgttctaattaaaaatcgagcacggtagtcgagctcgagcttgatcgagctcgaaccgagcctgtatgaaagcttaaatattttataagctcggctcgagcttatatcgagctcgagcctaggcaggtgagctcgctcgagctcggcttgttgacaaccctacttggcactatgctaaaaatgcttatgttttgggacagaggaagtagctagtagatcgatgccgccgttgctcatctgggaatgctacttcctccattctaaaaaaactcatctttatagtgacctagcactacaaatctagacatatctatgtccagatttatactactagattatgtcctagcactataaatctaaacaaatctctgtccagatttatagtactactagaatatgtcaacatctagtaatatattaagtttttgggacaaagggaataatagcttgcggtggccaccaaatcaagatccccacggccatgcacaatactctcttcatctcaaaataaatttatgttcaattaattattagtatatcatgatttataaaaatagaagacaaaatgtatttaacgcagataaagagataaataacgtatattatgattagataagctgaggtattataatctctttgattttatattgctatgtgtgggatatatgaaaatatcatagtactccctccgtattttaatgtatgacgccattaattttttaacaaacgtttgacctttcgtcttattaaaaaattatgtaattataatttattttattgtgaccttgatttatcatcaaatgttctttaagcatgacataagtatttttatatttgcataaaaaatttaaataagacgagtgatcaaacgttggttaaaaaatcaacggcgtcatacattaaaagcgtcatatattaaaataaaatccggaggaagtattataaaattagagggagtatataacaccagatgcgtacattaattcacatctggactacgcagtggccagtggcgagtggcgacgtcgtttgccccggccggctcggggccctagccaagaaaatcaacgcgagacggccgtggcccgtgggagtcgtgatttgatcgacgcgtttatcacaagccttttatcgctttgcgcacccacaggagcagcacacaactgtagaaaatatattgtgcaccggccgtttaatttctttctgcgaagtaatccgaagaaagtggaccagtcaccggacgcgtacatagatgaactagtgcaaaactatatgttatggaaaacggctgtaccgaccgactaatcgccgtatatacgatcacggtagtaaaaccgttccg

SEQ ID NO: 25014 - DNA, 1067 bp, Oryza sativa
ggtggaaggcacagatagtttcagcaatataattggctcagtgtattactctgatggggatacattgaaggatctggcccttgagcttgttgaaaatgtacgatcaattatttatccactacctttcatttgactcacatgattctttttaagatttattttaataatgagatctgcttgcattgaaattcttttgtatgattaattatgcagggtcttgccaagtatgttgagtggagtgccaacatgatggacgttgatgcaaaaataaagctgaagaatgctgagcttcaggctaagaaggaccagttgagaatttggacaggatttaagccaccagtgacaaactcgaagccaatccacgaccagaaattcactggaaaagtgggttccctgttctcacaagtagtgtattcaacatgatcatgcgattgaagctaatttgctttgtgttgatcctttcataggttgtagaggttgtgagtggggattgcatcattgttgctgatgacgcagctccttacggaagtccttctgcagaacgccgggttaatctttcaagcattagagctcctataatgggcaaccctcgtagagatgagaagcctgataattttgctcgtgaagccaagaattcttgcgcacaaggttgatggcaagcaagtatgtacataggttttgagatattccatcaagagttccataactagattgttacctctgttgaaaatgtactgattttttctccttccaattttcagcgatctgttcagatgttatactctagaaggatcagcactgtggatggacagcccacaacaaacacagctgaagacagggttttggattatgggtcggtttttcttggttcaccttcgcaggctgatggtgatgatgtttcttccattccaagctcaggcaaccaacctggtatcaatattgctgagactctgctctcaaggggctttgctagaacatctaaacatcgggactacgaagaaaggtcacactattttgacctgctgttggcggctgaatcacgagctgagaaagcaaagaaaggagtt

SEQ ID NO: 25015 - DNA, 1703 bp, Oryza sativa
ggaagttgggatgtgcgagcgattcttctctgcaggaggagataacgatttttttttggtgggacctgcttgaaaaaaaaattgatggtagacctcatctaaagctacgcgcgctgggagatggagcctcatttacttttttcctacatgatgcttgtgcttcttggtgagccgggacacatttgctattgcctgtagagtggtacgcctagtacgtacgaggcaggagacagattagcagctgcgtgctttcctctccatctgatggtgacggggatggccacgattaagttggaggaattaattcaatcgattggggtgaactgatcaagtgaaagcatgaacgagtcggtacgaattaatgagaggaggagatctgcgacgtgggtaaagattagaggagggacatgtgggcgtggggctcattgatggatgttcgcttcaaaatataataagctttgactatgaatttatttagatgtatgtattcagttttgtaactaaaatttattatattttgaaattagaaatcatggagatatagagttgtagttgtatttttctacggtactaccagtattggtaggggcgatgaatgtccgtgtcttaggcctcggctagcagaagtgaccaaatatagttcagagtttagatctccttcgaaatagataaatttactaggaattttataaaaattgaactaattaatatgatatttctgtgttccaacaaagacgtccacgacgtagcgtcaaaatcaatacttctaaagctggcattggaacttacaaatcgattggttcaaggaacttacaaatcgattggttcaagtgatagagctaaacttttgagataaatctagaaattatataagaggaaaaaatcaagaaaaagaaagcatcgtctcgatctagcacatgctagatgttttccaactaggtagaatagtatgtatctgataccttgaaattatagaaatttgtcctcattcaatcgatgataattggaatgattagggagaaaattagagattaaaaaatgatatttaaaattttaaaataaattagataatctctattaaagtcctctaaacttaatgtgttgtaaattaactctaaatatacatgggctatataatactcgtaccaacaaaaaaacataaaaaagggtgtgactatgatcacatactctttatttaattaattatgttcaaaatgataaaggatttattaaggataagtcttgcattttctccccctttgactcaaaaccggtcacgcattaggataataaatccatcgattatttagttggttatatagatggccaaaaggcccgaggcccgacggcccggccgatggcacggcgtttaggcccggcccaagcatggcacggcccgtcaagggtcgggcccgtgctggcccaacccggccaacgggccgtgcctgggcctcttcgccagcacgttgggccggcacggcacgatgggccgcatgccaggcccgacacataaacaatagggagtaaaaatagacatattatatgccacggtcgaaagaatagggatgcaaaatagacttattttacctatatatatgtcagcccaaagaggagggacggaaaatagacttatttttactatatatatatatatatatatatatatatatatatatatgtcacagcccaaagaggagggatgg

SEQ ID NO: 25016 - DNA, 747 bp, Oryza sativa
ttttagaataccatgtatccctattcaaccttgtttcctcgtctgaaatttttagcccttatattaattctctgcgttgccctcttgtaaatagcattcagacagagaaggagaacaaccgaactctcccagtcaaaattccagatctagcatgtcaaaatcttttcctcaggtgtttcacaaggtttgattctttttaacctagataatgttgaaaatggaagtgtatcaattatcaaatgtcaggatatgatagatcacatgaactgtgtatattcacaagttcatgaagaactagctgttcagcacaatatctttttcgtatgaatactaaatcataagttaaatctggattgaagtgttgttttgcaagcaattggaggagtggattgtgatgtcttttgaataggcctactattcttgctgaatttaggaaatattgtgcatctgttctgtcttttacgactgaagaacaaacaatcactaaaaataaaacgataattttaattatttgtttcaagcatttttcagagaatgtaaaaaccagaaaactggagcataaaacataactacattctagtttagttatgctgttttctggttcagatcattgatatttgaattcccttatgtgtaattgtgtggtgaggtgcagaaacttcctatgggagacgccgtgtattattatttcaaggacatctatgatgctcttcggatagcacaagttggtgtacgtttgatatttct

SEQ ID NO: 25017 - DNA, 676 bp, Oryza sativa
ttgggcgacaagtttaagccagaatctttaacaccacgccaacaccgcctcgtgcctcgctcctctccgactccagatcaaacgcctcctgataaaagcttcatctacaaatttacaggacgaattctaacacgacacgagtattcgaaggccaagttacaacataaactcctctacggttaagcaagattcttgattagaaaaaacagcacctatttaattcacaatgcaagttcacaactcagaatgcatgattaagccagataggccagctgacaacacaaacactgcggataagtaagattctttagtaggaaaacagtacgaggttatctttgcatttgcaacgcttcaaaactcccagaaggtacaataacaagcccaggaggtaaaactggacaattcatgagggatggacagaaaacaactccacacacatgtataagaatagacaagaaatgagaactgcaataatgtggattcatttgatcacagctaccagcatatcaaaatcgcgagccaaagccatgtcaaagatcgattgagttgttctccaggaaggatcaatagagcacaattcaggaaggatcttcctcaaaaaatcaggaaggatcaatgttaatgttccttctcctcacagggaaacagaagatctcctattcttcatcgatcctag

SEQ ID NO: 25018 - DNA, 2903 bp, Oryza sativa
caccagctctaagtcgcctttgctgcttgcgtggatcctgtcgtctctccgcctccctctcgcgtggatgcgtcgtcgatggcgatgggaggggaggatctggcgacctctcggcaatggcccaccggtagctacgatggccgagacgcgcgggcggtggatctggtgttagtggaggctcgagggcagtggcgaggctagcgggcgacggatccactggcaggggaggctcgaggacgcggaggcagttgagttctggtggcctcatcctgaagttactgcagccgcctgcttcctcgacatcgccacccatgggagtcgccgccgtagtgaatcgcctcccggtttcttcattgatgctccctcaatacctcaacacccaagaaccttgccgataagggccgccgccatgttagatccgtggaatcttgttgtaattatggggttgattccatcccttttgtgttgaacttgtatccctcttccctcgttttatttgattttgtttaagtggggaaggacgacgtacggactctcggacttacggccgaaaatacggaaaaaaagagaggtgatgatcagaaagttttgaattttttaaatagttaaggttaagatttttttttttgaaaaaccgacatctgttgtatatttataggtcccgtttttaatctatacaaatcttgtagcgtatgttccttaaaaaaaaaccgactcctattaaaaaaccggagccaaccttatccccacatgccatagctcacagacgccatccatccatccttatccacagaccacagccgccacactcccacccaccgtcagcgccaccgcacaccatctccttgccaccaccatccctacctctgtcgcatccacctactgccactggcccccgtcacgtggccacgcctcctcagcctcatcgccgccttcctcctccctctccctcttggtccagaggcagcagcggcgcaggggcgggttagcggctcccggcccagcggctgcattgcggctcctcgacgcagcggctgcccagcggcgcggcggctcaggacctccacgacggcgaggagcggcagcggcctccctctcacccctccctctccctcttggtccagaggcagcagtggcgcaggggctggtcagcgtctcccggcccaacggctgagctgcggcttctcgacgcaaaggcgccgcacggctcaggatctccatggcggcgacgagcggcggcggcctccctctcacccttctctctcctctcatatcctatgtgatgtgatttattttgtgatttccacctcttctctcatcttatgtgtgatctattttgtgatgtgattattggattgtctcctgtgcttgatttattttgggatgattttgtaatgattccgattggattgggatttagttcttgggttaaatttgtgatgatttgggattggttgtgggatgttcagagcggacgctcgttgacagatgaagcggaagaaggtgcttctgctttagtttttagggatttgggatttgtttgtgtatttctttgtagtgtcgatcttgtaacagcgaatgggaaactgattttctgggattatcggtcggttttgatgttgtgatttgtcctccaattataattttgtatcctctcagaattttttttctttggccgctgtacacgattgcgttcacacggagagagagggcaccgctcagtcagacatttacggatgaaaaatttgtgacgaaaggaaaaatactaatcttttagttagttaagatgtgacacatgctataggctatattcgttgaactaggatgtatcatatctcactaaaatctcttatatttagggacggagggagtataacttgatgaaggaattatcaacattattgctttgaaactgttgaatacaaaatgaaatcctagaatttgcgtatgtctgattagaaaatgtgacaatgccaatgtagcaggtaatttcttttagaaggtaatttcttttagagtaaatttcacaaaaccacatctctacccatactaatactacattcagtggttcaacaacagtggccgcattaaggtaacacaattggtgagattaaatttggcaattggttattactgtgattttgttgattgcgatgtcgtacctatgcatgctggctccttgctccttgctgttgggtagactttcacaatatgataaaaacacgttgcatcatggtagaacaaaatcaatactcctttgtgcataatagaaaaaaaattgtgttgcatcctatgactcttgaagctgtttttgagaatgatgttgctagagctaagaaagagaaaaatgttgagcatgctaaaagtgaaaatcagattgtagcaaaagaacttgtacaacataacaagaaagattctaaatctgaacatggtaaggacaatgtgattaaatcgaaaggtccttgtttgcttgccactaaatctgatattgtcaatttggatacgagtgacactatttgctatgctctcatttgtaaagaggccttgtttccttttgagaatatgcctatctcttttcttcttggggtcactaattttttgcagaagtattaggatgtgtttcccaaggacgtacccccagggctgccaccggtgcgtgaaattgagcatcagatcaacttgttggtaacaaagatagaaagggattgaattttgaacctggaaatttggtttggttgcgtttgcgaaaagaatggtttcctaatttgagaaaatctcaatggatgcctagagctgatggaccttttaaagtattagcaaagattaatgagaatgcatataagcttgatttgcctgtagattttggggttagtcccacatttcacattgcaaatttgaaaccg

SEQ ID NO: 25019 - DNA, 3202 bp, Oryza sativa
  unsure (1)..(3202): unsure at all n locations
acgtcctgttgaccctcttcagcgtgccatcgcatcatcctagcattccccttgttcctgaacaaacgccttatccggggtattataggaaaataccacatcaccttagcaggaattctcttctttgttagctgcccgtcaacttctcctggatcgtctcgtctaatcttgtatcgtagtgccttgcaaacagggcatgcttctaggttctcatactcctcaccgcgatataggatacaatcatttggacatgcgtgaatcttctgaacttccagtcctagcgggcagactatcttcttagcctcgtatgttgtctcgggcaatttatttccctccggaagaatgttcttgacgagtttcaataaatcgccaaatgccttgtcactaaccccattttttgccttccattgcaagaactccagagtggcatccaactttttgtgcccctgctcgcaacctgggtacaacgaagttctgtggtcctctaacatcttgtccaatttatgggctcccttttcactttcgcagtcctccttggtgtcctgcaacatctgaccaagatcatccgcaacgtcgttaccatcagcatccctttcctcctcgcccgtttgatttccttcaaatccaacgtactgagcaaagtccggaatattgtcgtttccacttcatcttcttccatttcaacaccttgctctccgtgggatgtccaaaaattatagcttggcatgaaccccgactcaaacaagtggaaatgaatagtccttgatgcagaatactccttctgattcttacacttattgcatggacaacaaataaaacccctttgcctgttagcttcggccactctcaaaaaatagtgcacgccgtcaataaactctttggaccaccggtcagcgtacatccattgccgatccatctacatgagtcgagaaaaaatcgtacaaaaataattattcttacaataatgacagtcatacaataattataagataattacaaactgtttcaacagtcatataataatgacatatctttattcatacaaaaatcataaaatattacaccaaataattcttatttactatttctaaagttttaaactaattttaatgtgttttacttcttttaattttcattttagtttgttttctagtattcaagattaactctcactatagttttccttctcaactattttataaaaccttctttagcaaatcaactaaatttctatatattctttcttccccacacaaattttctccctcatcaacttacaactaaattttggagacaaaaaagtatgccaaacatagctgcaaatgtaatatgacaaaaaaaaacattggaggatgaagatgcaaaccttttaggcacctccgatttgtatgtaatcaccaaaataaattcactagaaattttggcatgacctcccctcttttttgaagaaattttgaagcttgctcgggcagctggaggaggaagaagacatatatataggggtgggactttagtcccggttggtaagttacgatctttagtcccggttggtgggggtcctgacaggccctgtcagcatttgaaccgggactaaagatgaccttaccaaccgggactaaagatcaaatatgcccgttaccctttttaaccgggactaaagatcatctttagccccggtttttattgcatccgggactattgtggaattcggccgaccgacgaaagatggtttctccaccagtgataggccggagtacacgactcgctgcctctcattatatcgcatgcacatgaacacacacagaacgtcaatgctatagctacgactggctggttgtgctatggcctctctgatttggggggcctcaattttttttgtggggccctgtacgggcgctccgtttgcacgccctcatcgacgggcctaggtgagatgggagaaacttcgtcgccgatgcttccgaggagagggagcgactgccgctacagaggggattggaagtggtgagtatttggggccacggtagaggaggggtaaaggtgaaaaaagttaagggttaaggggcaccttntacaaagngtggnngngtacggtcgnnngtagattagaggtggtcagaattgtattagctagtatcctcaaagcaacctcatcctacatgacgtgttggaacccttacactgtttatggtcttacaatgtgcaggtttgtataatgcgaatggaattaaaatgttcaataatgcaacatgcaacataaattagcgcatgctgatcaatggaggacaaatatatgcaacaaatttagtgaatgttaataaacctgatcggtgtggcataattaaaatggtcacaaattgagcgtgaagatattatcctaccacccttgcagcataggcgtagggataagggactagtaagggtcatgagccatggctctctcatattttatatacctcactattttctctgacttagcttgcatcaaaattagttataaaaaaatttagcactgtaattagtcaaaatatatcgcctggcatataatttagtgctatgattcctagcacacatccactatctaggttcatattacaactggctacgtagtaacttgcagcatccatcaaggtgccctgaccaaatgagagagagagagagagagcgcaatcgctgttgtgtctaatatttttcaagtggtgcatgtgctttaaggactatttcaacattgtaaaaatacatggcttttccaataaatcaagggcggaatttttttttagctaaatactgagagaatcaacactcaccgataaaaaaaaactagttcaaataaatgaggctaactaaaattctatcattacattggtttgaatcatactagttatgcaatgtaaaaacacattattttgttgagaccaagttggtccaacgaagttttgttgttatagccttattttctgatctccttcctcgtagagcgttttgtagaaaggaattgaagcatagaatcaaagcaagaaaatgttgttaggcatgtgcgtgcacatgcatatggtagtaccaaaaataacttcctctaggatagaactgtgatggatcagatgaagataattattatggtgagtacgttggattgaccacttgagtctccgatactttgacttcttcaattttgtatgtagggccacataattttcctttt

SEQ ID NO: 25020 - DNA, 1127 bp, Oryza sativa
agtttccttttagagaaacatgctcgtttctagccataccagtgtaggataagagcgtgatacgtgctgaccacttacgttcctcctgaatgaatatctgattgatgatagttagctgcttcttgtttagggtggggggtatctatcgtaattcattttcagataggagaaaatttgtgggttggtacgataggttagcccaggcatactaaatttggctttggctaagctggttctatcctttcgtttgatcgcagggtgtagcttactatcatggcgtcagccactggagcgtctggatggctgaggggtaaggtgaagggtgtgacttctggggactgtcttctcatcatggggagcaccaaggcggatgtcccgccgcctgagaagtcgattactctgtcatacctcatggccccaaggctggtaagatttatatggacttgatgtagtcagacaatataacacattttctaggttcatttgtctcatgaatttgtggaagtgtttggtctgttccaaagtggacgacttttgtgtaacccctaaaactaatggaaatactccatccttccttttttatatgaccaatgtcaaacaaataaaaccagaggcagtataatagtgacaatcggactctttccaccaccgcatgcattaatattcctacgctatggttttatattttctcgtgtagttcaaaacttatgaatttattcttattctccagtctttccctccctttttgctttatgtattgaaactaaaactttgtgctgctcaaggctcgccgtggtggagtggatgaaccatttgcttgggaaagcagggagtttctaaggaaactctgcataggaaaggtactccatgtgaattttagatcttctttgaatttacttaaatgcatagatatcgattgtgtttgtagaaaacatgccagtttccctgttaccaatgaaaaattcaaacatggtacaggaggtcacattcagagtggactacacagctccaaatgttggacgagaatttggtactgtttacctcggtgacaagaatgttgcctactcgataattgctgcaccatgggcaagggtaaaggagcaagggcccaaaggcggcgaaccgag

SEQ ID NO: 25021 - DNA, 3321 bp, Oryza sativa
taaggcatactatttactcccttgtaagctgaaatgtgtacaacaagtattatgcaattagaacagacaattccacaaatatcaacagagttatgtcttgtatggacaagctagagacaggagtcctttaacaaaaaaaaaaaagggaataaaatgaagttaaaataaaatgttcacgcttagaaaaactaaaatctgcgagtgaaggatttgattttcaaaaacatgcgacaagggtatacagcatatgaaatattagtccatgagatatacctggaagggcctaacaacagattgaagtactctgagtgcgttgatagtattccattcaggatgctggcctggacttattatattgctgctgtggatcacttgcttcaactgggggacaagttcaggccacaaattttccttgacaaaatctttttctatgacttggcggaactgtttgatgcaaaccataaggatgtaagataacacccaaaaaaggcttggtagtgaggaatttagttgcagagaaattaagtagaaatgagacatacaacttcaatcaatactcgaagaaggaaaggttccacttgaagcaacgcctgggcgagccgatcacggaactctttataaagctcaggtgatgacaacccccagtcaatatttcggcgtgtgtaattcttcaagtatgttgctgcagcaacttttgttccttggtccccatcagctataagcacaattcaattataagggtcaggtgggctgcctgcctgagcattgattgctcaaaaagaacacatatactttcattcacaactaaatactggtatgacatttccatttttctgtacaatatctcaaaacaaaacaagaacatcaatatattcatctccatggacagagcaccaaccatttcccaaattatgtttctacatgcacataaatagtctccggcacttgctaactgcagtttagcaaaatcatgaattggattctgggtgctgcgtgtggcaatttaaaatagccagacaaacatcaaacatacataagcaatttgtccaaaaagcgttcatatttgcacggagttccactcttaagggacagtgttaggctgttagcacgccacaaattagtaaattactacaatccagactaccactgctcaaattccccagcagaagcaaaaaaatccacaagcttccgcagaaatcgaacaaggtaagcacttggcatggaaactccaccagcacagctacaaagataaaggggcgggtacctgcggcgacggcgaggagggagatggggaagcgggggtcggaggcggcggcgatcctggagagcccttccgtggcggcgtccaccgccgccttgtcggggctcagggtggcggagaggagcgaccggagctcgtcgccggccgccgccgcggcggccgaggtctgggcttcgacctccatggagcgtaaaccctagttcttttttcttttccttttttgaggatattttttgaccagcaagactccagagagaatggggttgagttggagggaatggaaaggaaaggaatttggcgggaaacattggcgccagatcagatgccatggaagaaggatccagccaagagtggtggagcaatcaatccccactatgcactcaattattagtacaatatttacatgctggattacacactaataatcatacaaaactacaattattttcttttcagaattatcactatagctttaactggtatttccccaaagctgcagcattaccaaagattttattaggaaactataattttatcttcctataagttttatgacgtgtatatgatatgtaagtgcaaatttatcattcaagtagagttgtattttttgtttatgaaatcatacgatatttttgtagttctctggaaaatgttgagctaacgttgtaacaaaatgatagtttttttttgacaaaaaatagttgtagctatatgaaatatactataaaaatccagtttaaaatatagaatgtgtttgcagattctgctcgtatataaatcaggcccaaatactaaccgggagcagcccaaatatttaagcccatacctactgtctgaacaatcacaggcccagagtgccacatttttttgggcccatatcatcgcgatttcgccggtttttggtaggaataatttcatctgaggtcccttaacttgtcaacgaatccgattttcatccctcgaatggaaaaccagatacaacgggtcccttaactatcaaaaccggctcagattaggtccctcggcggttttgagggtggttttggctgacgtggcgcctacgtggctaatttgactaggtctttgtctaacgtggcattgacgtggcgcttacgtggcaatttgatccaaaaaataataaaacccgtgggacccacatgtcagtttcatacacaaattaataaaaaaaatggtggggcccacgtgggccccacatgtcattctcaccccttttcttcctcctctctccccatctcccctctctctcccttctcccatccccgaggcagcgggcggtgtccgggtgagggatggcagctcgcggcggccgggagaggagggaggcggcgcacggcggcccggcgaggagggaggcacgctcgccgtcccggcgaggataggcggtgcgcgtcgcccgggcgaggagaggcgccacgcggcggccgggcgaggagggaggcggcgctcatcggccctccgaggagggaggtggcgctcggcggccgggcgaggagaggcggcgcgcggcgtccgggctgagggagacgacgcgcggcggcccagcgaggagggaggaggtgctcggtggcccgacgaggagggaggcggcgcacggcggccgggcgaggagaggcgacgcgcggcggccgggcgaggagggaggcggcgctcggcccggttaggagggaggcggtgctcggcagcccagcgaggagaggtggcgcgcggcggccgggcgaggagaagcggcgctcggcgaccgggcgacgaagggcagctccaacccggatgtgaccattgaggacgtcggcggaggtggccgggcgaggagggaggcggtgcgtgcgactaccgagcgaggaggggtcgtgccgtccggctgggcatcacgggcggagcggccgggcagcctccttgctccgatccggccgccccgctccaccggccgccgccgctccacccgcgtccgccctgctccggtccggccaccccgctccaccgacctctggtcgccgccgccccactccaccggtcagtgaggagaaagaggggagatgggg

SEQ ID NO: 25022 - DNA, 8616 bp, Oryza sativa
ggttttgataggtgaggaacccgttgtgtctagttttccattcgagggacgaaaattggattcgttgactagttaagggacctcagatgaacttattcctttttggtaggatgtgtggccagaaaaaggaataagttcatataaggtcccttaacttgtcaacgaatccgattttcgtccacctaaaaccagatataacgggtcccccaactatcaaaaccggtacacataaggtcctttggcggtttagatggtgtttttggctgacgtggcgcctacgtggcaaatttgactcggtcttcatctgacgtggcattgacgtggtgcttacgtggcaattcgaaaaaaaaaacccttagggcccacatatcagtttcatatacaaattaataaaaatagtgggatccacgtgggccccacgagtcattctcacccctcatcttctttctcctgatctctccccatctctcgtcgtcttcatctctctcccctctcctccctcctctcgctggcagagataagaagcggcgcacgagcgccggccggagggaggaaaggagcgcgcgcatgcgcaggaggcgaccggcgagaaaggaacggcgtcctccgctaggagaaggacgcacacctcaccatcgcggcccccgccaccgtttccaccgtcctccgcgctgctcaccgacctcgacagcgtcctcactatgggcggtggcgggcgagctcccgcttctctccacctgcttccccgccgccgctgtcgaagacgacgacaccgatggcgacgggtttgaggagggcaccgggccaccgatgcggcgattgggcgtcggcggcgcgggagcagtgcggtggcggcgcgcagggccacagggtgcaagcggcggcggcgtcaaggagggcatcggcggcgcgtggggccctagggcgcaagcggtagtgactagtgactggcggcagtggcgcaggagcagggcgtcgggacgcaagcggcgccgtggaggagggcgtcatcggcgtcgagcgccctttatctggtcggccgccagcttccggaagcgaacggtgagcacgtcgccattttctccttctcccctctccacgacttcacagggattggaaactgcttgctgcagttgctgttcgattctatttctacaattctactcacgatacaatccattatttccctcagtaaatcccgttgaaatttgaacaaaattcagtgccaaaatgttcgctcacatcacactgttgcagcatgacaaacaaatgttcgatctacacacttacgaaccaccggatttcggcggcggctactgcggcgtcggagtgcagattcatcaccctgacgaggctgctaccgtcctcgccgtacctgatgaggtggccgtacatccgcagccagtggtcggaggcctcgtcgacggtgcggtaggtccagatgtgtggtctgagccagaggcagtcgacgaggtcaccccacgcgcctcgttttccatgctcagcacacgacaccattgaaggtccgtgacgcgcctgtcgtcggaccggataccggcgacgccaaggccgggcaagtactcgacgaggtcagccgccgaagcaggtagaggggctggagatcatcgaagtggccaccggtgagcggttgtcccgctggcttcgtgcgccgccgctccagccaccgtcgccccactccgcccgccgccctagtccacatcgtaggaaagaagagagagaggatagcaggaagaagggagcagtgaggatgacatgtggggcccacgtgggtcccacttttttttaactgacatgtggggcccactaatttaattatttttctggatcgaattgccatgtaagcgccacaccagccaaaaccgccctctaaaccgccggaggaccttatctgtaccggttttgatagttgagggacccgttatatctggttttagggttcaaggacgaaaatcggattcgttgacaagttaagggacctcggatgaacttattccccagaaaaacaaaactgaacactgcagtagagcagaggaccaacagcaacacaagagaaaagaagtcatcacatctacctgctacctaactggagcacaacaaggctaccagcaagcaggcagattgtgcaactgccatctactcaccgaacaccaaactctccctctcgcttctcttgcaaaacaacctttccagaaccaaaccaaacaaacaaacaccggttcaacagtctaatcactagtcactagtctgtctggtgtgttgttctccttaataacgtaattaatccatccactgtcaaaccaagaaacaccaaaagatggaaaaggaaaccgaaggcagaaaccattaattctcgcacagcacaatgtatctggtccgattggtgtagttagctccagaccagctggtcataaacatggtctcatcctcatacagggtgtgcaaatcacaatatcttcagtagacaattaattcaggaggatgcatatcacaattagcagtagtttagtcaattaattaatgcttcttttctacactgatgctgcaggttgcttacttagtagatccaatctagaacacagcgagtcatcttctttatattcattccattcctcccaaagacgcaacgtgcacacaccaccaccaccttcatctcggtggcttcgttcactccgcctacctacctacctttgcagttggtttgctgaaccctcctcaagaacccacgcgcctctcgcggcagcagctaaccaagccatggcgcgcaagaagatccgggagtacgactccaagcgcctcctcaaggagcacctcaagcgcctcgccggtatcgacctccagatcctctccgcccaggttcgattctttcttcttcttcttcttgatctcaaagttttagcttttgtttccggtgatccctggctggtttggcgttttttcatttttggcctgatttgggcccgcgtgatttggcctggttgcgtgtaaagatctggtttttctttttttttgttcgctattcattactcaatgaggcattggcatctgtgaattcatgacaaaatagttctctgtttagggtaaaatgcgatgctttaagatgatagtatgaaatggggatctggctacaagtcgtatgaagatgcaatttttctgctgttgggcattgtggatgggctcacttacaggattttaattttagaatggaaatgttcttggttctgtatgcgagttatggcttgaactagtacgacttatggttgcttgcagtttggtacttgcagtagtattaggtgatactccatatagtgcaaaagcatcaattcctttgttagatctggagctttgtcttgcagcattgtttttgtttttttctatgtgtaaattgttagttaactctcgttactggtgtccgtatggtggtgaactggttatgatgttgacacttgaatgttgtcctgatgcaaagtgatttcctctgaaataaataacagtacatggactacgtacaagcagatatttccttttgttacattcacacatttggggtcactagggagccttcatacattttaaactgactgattttgaattatacaaactgtactatgtgtgaaattaatcgtaattacggttctcgtttgacatagcatatttttgtttgaagttaaaaatatcggtttggctgattctgggatttgtaaaaaggttacacaatcgacggacttcacagagctggtaaaccagcagccatggctgtcaaccatgaagttggtcgtgaagcccgacatgctgttcgggaagcgtggcaagagcggacttgtggccctcaacctagatattgctcaagtcaaggagtttgtgaaggagaggctgggagttgaggtagttcaattttgctatcgcctttaaaatctgacttattctctgttcgcttgataaattaagttgttctgtcctattgtggctattcaggtcgagatgggtggctgcaaggctccaatcaccaccttcattgtggagccatttgtaccccatgatcaagaatactacctttctattgtctcggagaggctgggcagcaccattagcttctcggaatgtggaggaatagaaattgaggagaactgggacaaggttaagacaatttttcttcccactgagaagccaatgacacctgatgcatgtgctcccttgattgctacccttccattggaggtatttgtactgttaaaattatttgccattgtaccttgttcagttgatttcatttgaggagtacttccatttgtcacatgcttataataattgaactgtacatttcgacatcaggcacgtggaaaaattggtgatttcattaaaggagtctttgctgttttccaaggtattaaagatgcatatagaattcacttttcatttgttgtaatgttttagttgtaaatgtaataaacgtattggtctatcatgtatccataacaatatgctcccattacagacttagatttctcatttctcgagatgaacccatttaccatcgtgaatggagagccgtatcctctggacatgagaggagaattagatgacacagcagctttcaaaaacttcaagaagtaagtcccattgcttctctagcatacatgcctctgtgcgaatattttattaagcatttcttgtcactgttcaggtggggaaatatcgaattcccactaccattcggtagagttctcagttctacagaaggctttatccatgacttggatgagaaggtatccacatctcaaattacacgtttcacatttcaagcctcctccccaatcttatttaagtatgagttgcctgtataatatcatcagtaggtttgcacatgaattcagataggagtgctggcagtctggctcagtactatatgtttttttgaattattttctaaatgtgatatgatgtccttattctttcagacaagtgcatctctgaagttcaccgttttgaacccaaaggggcgcatctggacaatggttgctggaggtggtgccagtgtcatatatgctgatacagtaagctttgagttcctcccttgttttaacttagctgttcagggatttcatgctactgtcatgaaattaacttttttttttcttatttaccaggtcggagatttgggatatgcttcagaattaggaaactatgcagagtatagcggtgctcccaatgaggaggaggttctgcagtatgctagagtagtacttgatgtaagcactcaagatataaccataaccacatttctctccactcccttgttatgtcaatttgttaatgataacattcaatgcagtgtgcgactgctgatcctgatggccgcaagagagctcttctcattggagggggtatagctaacttcaccgacgtcggggccacatttagcggcatcattcgggccttaagagagaaggtagctatgctgacccctaaatctagaattgtggccaatgttctctaaaacttatcaccagttccacatgttcatctgattgattgactgtcaactgaatctgaaacttgctttcaggaatccaagttgaaggctgcaaggatgcacatctatgtccgacgtggtggtccaaattaccaaactgggctggctaaaatgcgcaagcttggcgcagaactcggcgtcccgattgaggtacggatctactgtctcctactgcacctctctctttgctatgcaagacctgttatatctgaagttcataaatgcaaatgggcaaacctatcagtttgttgttggtggttctgaatcactatcctgaccatcccctcacacaacacggatgagctgatttctgtttgaacaacccatcactgcaggtgtatgggccagaagcgacgatgactggaatctgcaagcaagcaattgaatgcgttatggccgcagcataaatgaagatgcaagttctgggatctgcaggcaagatgctgaatgcgtgatgggtgcgacatggatgagagtgtggtgtagttgcagtagttctctgcagatggctgatttgtttcttgatacatgttatacttggacgagatctggataggttattgatgtactgaaactactactgcgatgcaataaaagtgagagtagcgtttcctgatttgttctcttcttgattgtgatattgttgcaatgcaatcgcgctgtatttcatctcacattgagatgtgttcctgattaagtttagcccctggttttggttcaagtttaagccatggtactgcacatgcattttacaggatctgaatcttgtcatcatgctcagcaacaagtagacgatggtcacgacagaagagttcaaacaacagcatttttgtgctgaaaaacttggtagtatctttttgttgtttctggcaataaactattgcaaatggtagattgtttgctaaaataggttttaatttttcgatttcgaagtaaaaaccgctcctcacaagtttaccaaaatccaatcgaaaaccggtaaaaaccggcgactttcagtgaataccatacgaaaattttcacaaccaagatcggttaatatcgaccggttttcacaaaccgagatttcatcggttttgtgaaccgtctaaaatcaagatcatgtttacaaatatagttcaaaaatattattttgtataaaaatatatgtaattaactgtggagtaaactaaatatatataattgttttgcaataatctcttaatcattatcgggaaaacagttatttaactggggagtaaattaacatcatgtccggctaatatcgaccggttttcacaaaccgagattccatcggttttgtgaaccgtctaaaatcaagatcgtgtttacaaatatagttcaagaaatattattttttataaaaatatatgtaattaactgtggagtaaactaaatatatataattgttttgcagtaatctcttaatcattatcggcaaaacagttatttagctggggagtaaattaacatcatgtccttacagtaaacattgtttggcagtgctgtttctaccattctagttttacagtaattataaagtaagaaaatccaatatatccaaccgctatccttttaaacataaaattatcgtatgattacccattaagcgaatatagattattctctaaatcaatcaatcaactatatttatgtctaagaaaatcaaatatatccaaccgctatccttttaaacataaaattatcgtatgattaccaattaagcgaatatagattattctctaaatcaatcaatcaactatatttatgtctaagaaaatcaaccagattatgggcatgtgtgttttagtactgccatataactctccctgcagttttgttccaatagcacatagtcatagtcataggtaacaacttatatctaaaatgggcaataatctttatatttatatatatatatatatatatatatatatatatatatatatatagaggtgtgcaagcaagtacggttcatacatacatataacgattgtcataagaaactttagtcgctcttccagaatccggaaactgaactactataccctactatactcacttccatttccaactttgagcatgcattttccattaccgaccttgagcatgcatgtattcatagctaccaatgtaatccaacagtttcattgtgtatgattttagtttcaataatttaatagcttatatataaaaagtgtaaacatgcatgttactatcgtccaataggcatgaacagcgtaaaaaacaaagcgcagcatcgttcgattctcaatgatgtgaagttattttcttaataaaaaaggcaaaatcctttcatgtcattttcattagatagagaaaaggcttttctttttccaaccgagttatggaaggtaagcaagaggagacatcgagatgtttacaattaaattccggcatgccttgtgtgtttgcgcttgtctgaaataaccgccaaaaatcatgataggcctccacctctggctgccaccgccacgcctccccacagggccgcatctcctcctccggcggccatcgctgcacgccgtcccttctccttgcctgccactgcccttctcccgagcaccactgccggatctcgatcgtcggcgctgctccggggggacctgccgccacccgggtcgatctgttcccaccgccgtcgccgacccccttttattgccccagcttcctcctccagctcgctgctctcgccggtgggcaccagtctcgccgccccctccagctcgctgctctcgccggcgggcgtcctcaccatcggaagaggagaggagaggggagagagatgaagagaggggagatggggagagagagtaaggaggagaggagagtgtgaaggacaggtggggctgggccccacctttcttaattttttttgtgtaactgagatgtgggcccacgggttttatatttttctgagatagaattgtcacgtaagcgccacgtcgatgccacgtgggacgaagatctagtcaaactagccacgtaggagtcacgctagccaaaactgccttctaacccgccgagggacctcttttgcaccg

SEQ ID NO: 25023 - DNA, 7777 bp, Oryza sativa
tagatttttatgtctgttcttatccattcttataccatctctcctataggtacgtccattttgcatgaaaaaaatcattctattcgttcaccaaaacagtagctatatcgatcagcaagcgtcctcttcttctccttcccatctacacctcctcctcatacccttcgccatagccacctcctccctcttctataagaaaatcagccctatgggcacatgtttcagtacggccatataactctacatttagttttgctccaatagctcatagtcagaggtattaactaatatctaaaatgggcaaaaacctttctatatgggtaagctatcaaattatggaatctaataaaatcatacacaatgaagctgttggattatattggtagctataatacatgcatgctcaaggttatggaagtgagtagctagtacagttcccggattccggaagagcgactaaagtttcttatgacaatcgttatatatatatatatatatatatgtatgaacagaactttctgccacaccaatgttatgtatcatataaaaagtataaacatgcatgttactatcatccaataggcatgaacagcataaaaaacaaagcacaacatcgttcgattctcaatgatacgaagttattttcttaataaaaaacgtaaaagcctttcatgtcatttccattagatagagaaaatgtttttctttttccaaccaagttccagaaggtaagcaagagtagacacatagacgtctacaattgaattccggcacgccttgtgcatttgcgcttgtctgaaataactgccaaaaatcattataggaccaaattgcccttaggtaatgtacaagattgggctttacgacatatgaaaggttgggctcctacaatctgatgattagttaagaaaaagtcaattttgtctccctcaacttcaaacactagtttcattcgtaccccctccctttgttgtcgtataaaagcaggtgtagaggctctcttaactgttaaaaccgagtcaatttacctccttcgatggttttatgctttatggcatgttgatatggtctttattttaggtggtactaccgtaagatctatttaggtggtactaccgtaatatatagtaatttattaaagtaatagaaaaagaaacctccacgttcgttctcacggcctagaaattctcatattaatcggagaaaaagaaaaacagagtccatatagaaatacagtttaaaaatatctgaaattaggaattaataaataaggaatattggaagaggagactaaaagttcatatacatgtatacaatttaggattaatggaaattcgtaattaaaagtagatgttatagtccatatctctactattataaaaattgaagatgtttttgccagtgttttggtacgtcatccgtatttgagtcggtttctaatttcgttcattttttgaattacagatccgtgtttgagttggattttaagtttgtttccttttggaagtataaaaggagcgtacaagaaatgttttgaaaaatctctcatgctaacttgagatgaaatatggactactaattgcagcttatgattttctaaaaaaatatccaatcgagttttcactgtgaattttaccctaactaaacggtataacaataataaaattaaaatagcatttacccattgcaacgcacgggcatttttctagtataaatataatttagaaataactaaaattcaaaattaaaaaaggaatattgaaagaagagtatagagtgcatatagaaatataatttataaatatctaaaattcggaattaagaaaataaggaatattagaagaagagcatagagtccatataggactaaaattcgaaattcaataaaatgttgaaagaaaatactagagtccatataggtatacaatttagaagtaactgaaattataaattaaaaaataaataatgttgaaagatgagtttagagtccgcataaaaatacaattagaaataataaaaattcaatttttttttcaaaaaaagaatatggaaagaagagcctagagtctatatagaaatataattcacaagtaacgaaaatctgaaattaaaaaataagaaatattagaagaggagtctagaggccatataggagtataattgagaaataagtcaaataactgaaattctaaatttaaaataagaaatataggaataaaatttataaataatagaaatttagaattaaaaaaaataaaaatattggaagataagtctaaagtccatatagaaatacaatttataaataactaaacttcgatattaaaaataactgataactatacgtatatacaaatacaatatgaatattacacatcagtagtttttgtaaatttagtgtaaattttaaaattatattgttattttaatagtaaataagaaaatatctattatgtaagagaagatgcaatctgtgcggattactatactaattaaaaaaataataaaactagtgagacctccatgtcacagcaaatttctttatcctctaccttttcttttccccttcctctctcttcaaggtgcagcggcgtcgaactcaagatgcaacacgcaaccacctcctttctcaaaaaaaaaaaaccttctccacagtctccaagctatgcggcacgctggcgcgtaggtaggtactacactacacacgactacagtccaatctggcccgagagaagtaaaagcccacagcggcctaaccgatatgttatcctttcacgttacatcgataaacaaccatattttttctgttgtttagattgttgtgtttgtttcacggtatgtttatcctatctaatctattctcataccatctcttctatatatacgtacgtccattttgcatgaaaaaaaaatcattctctcaatccaccgaaacaccacgtacgtagagtagatcagcgagaatggcctcctcttcttctccatcccatctgcacctcctcatactcttcttcttcgccatagccgcctcctctctattgtccaccgcgacctccacgcgcgcctcgccggccgacactgccgtcggcggcatcgccgccaaggtgtacaccaaggtgtgcgacgcgacgaggttcgccggcctgggcctgaacatgacggagttccgctactgcgacgcgtcgctgccgtacgccgaccgtgtccgcgacctcatcggccggatgaccgtggaggagaaggtcggcgccctcggcgactggaccgacggcgctgcccgcatcggcctgccggcgtacaggtggtggtcggaggcgctgcatggcctctccagcaccggccccaccaccaagttcgacgacctcgccacgccgcacctccactccggcgtctccgccgtctacaacgccaccgtcttcgccaacgtcatcaacagcgccgcctccttcaacgagaccctctggaaatccatcggccaggttggttacaatttacaattcatcgatcatctcttcatttcaatctatagatcatacaaatctatatgaattttgttcaaatttgtaggctgtgtcgacggaggcgagggcgatgtacaacatggggaagggagggctgacgtactggagccccaacatcaacgtggtgcgcgacccgaggtgggggagagctctggagacgcccggcgaggacccgtacgtcgtcggccgctacgccgtcaacttcgtccgcggcatgcaggacatccccgggcacgaggcggtcgccgccggcggcgaccctaacacgcggccgctcaagacgtcggcgtgctgcaagcactacgccgcctacgacctcgacgactggcacaaccacacgcggttcgagttcgacgcgcgcgtcgatgagcgcgacatggtggagacgttccagcggccattcgagatgtgcgtccgcgacggcgacgtgagcagcgtcatgtgctcgtacaaccgcgtcaacggcatcccggcgtgcgccgacgcgcgcctcctgtcgcagaccatccgccgcgactggggcctccacggctacatcgtctccgactgcgacgccgtccgcgtcatgaccgacaacgccacctggctcggctacaccggcgccgaggccagcgccgccgcgctcaaggctggcctcgacctcgactgcggcgagagctggaagaacgacaccgacggccacccgctcatggacttcctcaccacctacggcatggaggccgtcaacaagggcaagatgagggagtccgacattgacaacgccctcaccaaccagtacatgacgctcatgaggctcggctacttcgacgacatcgcccagtactcctccctcggcaggcaggacatctgcaccgaccaacacaagaccctcgcccttgacggcgcacgccagggcatcgtcctcctcaagaacgacaacaagctgctgccgctcgacgccaacaaggttggcttcgtcaatgtccgtggccctcatgtccaggcccctgagaagatcatggatggagactacacaggtacgtaggtcgtcaaatgcaaaaattctcacttatgttactgttcatggtccgacaatggcatcatgttactgaacattattgattgatactttttttttcattgttgaaatgcttgacaaaccttgatgttactactgttcatgatccgacaatggctcaatcaattacagaaaaatgttactgaatactactttgaaatgcaggtcctccgtgccgatacgtgacgccgcgccaaggtgtaagcaagtatgtgaggttttcgcatcgcgccaacactaccatctacttcggaggcctaaacctcaacattgagagggagggcaacgacagggaggacattctcctgcccaagaaccagacagaggagatcatccgtgtcgccaaggcgtcgccgaacccgatcatccttgtcatcttgtcaggaggtggcatcgacgtctccttcgcgcagaacaaccccaagatcggcgccatcctctgggctgggtaccctggtggtgaaggaggcaatgccattgcagatgtcatctttggaaaacacaatccaagtaattcagaatgcaaatcacatcattattttattcttttgacacatcaaatctcaaaatcaaatgttctttgattgaacaggtgggaggctgccattgacatggttcaagaacaagtacatctaccagctgcccatgacatccatggatctccggccggtggcgaagcacggctaccctggaaggacatacaagttctacgacggcccggacgtgctctacccgttcggctacggcctcagctacaccaagttcctctacgagatgggcaccaacggcaccgccctcatcgtccccgtcgccggcggccactgcaagaagctcagctacaagtccggcgtgtcaaccgcaccggcatgcccggcgatcaacgtgaacggccacgtgtgcaccgagaccgtcagcttcaacgtgagcgtcaccaacggcggcgacacgggcggcagccacccggtgatcgtgttcagcaagccgccggcggaggtggacgacgcgccgatgaagcaggtggtggcgttcaagagcgtgttcgtcccggcgtggagcacggtaagcgtgagcttcgagctcaacgtgtgcaaggcgttcggcatcgtcgagaagacggcctacaccgtcgtgccgtccggcgtcagcaccatcctcgtcgagaacgtcgactcgtcggtgtctttcccagtcaagatcgacttcgctatttagacaatcttaattaaatatatattcaggtgtctgtttagattcttttaggcaatgaggtatttgtttttaagttcttttttcctctaaactgccatatactgtcatacgtttagaatcgtactccaaaattggagtgttaagtgtcaatatgtttaggcttccatgttacaattggaacatatatggtcatagaagttgaaaagtttagcagtttcatatcttctgttcttgacacgtatgtgatttaccaactataattaagctctcctgcgtatcatgtcaccgtacgtcgtgccgtccggcgtcagcaccgtccgcatcgagaacggcgacccatcggtgtctttccccgtcagcatgctgaatgtaactgtcttttctaggctccaatattattcagtatgctgaatgtacctatcttttctatgactttgatgttaccaatctctcatcttttcgcttatgtttatacttatcagtcaaaatttgaattttcaaccttaaattttaagccgattttaagattgttttatcgaagtttatttttcagcccttcgttttttcatcaaagcagtgccatacctgcttacatctttcttgaaccatgcatgttcagtcgttcagtcccttcgtgaaaatttcctgaaagttatattttctcatgctcagtccctttatgaaaattttctgaaagtatatttttttatgaaagctttgcatggatctttctggaactagttcttcagttctgaaactaaggctgcgttcgttcattcaggtgagattgggtgagaaagcgcatcgttttccgcgcacacgctgcccaaactactaaacggtacattttttgcaaaaaaattttataggaaagttgctttaaaaaatcatattaatctatttttgaaatctaaaatagttaatactcatattaatttcgttttacgtatcttcccaatcttttcaacccccttcttctcgagctcagttttctgctctgaaactaaaacctcgtggagttttttcagtattgtggcacataaatgtaacttgccaactttgaaaagagatttgtttgaattttttttaacttatatcgagctttcacaaatagttgaaacttgaaaaacttgttctttgcaaaattgaatgaaatttgtcaactgtgaaagagtagcaacaaagttattcattgcaagcctgggaagttttgttttgctcggtcgaactaggtgatcagggcatcctccatcatcatactattcatgtacttatattactatattagtactatattggccggagagagtctggtatgtcatataaggcccctctcccactagacgatatagaccagcagaagggagacattatttacctgcattaccgtaccagtcccagcaaccttgcccctctcctgttagccgatatagacaaacattattgagacgttgtcgattctggaaatcagcaatagtaaaaggggatagtgtacgagatctcaaaatggatggatgcggaacataaagatttagacaggttcagtctctctcaatgagagacaatactctactcctgtttggagattgtatccgccgggtgtatattgatctaacgatctgattgtggttatacccttgaagggctccctgcccaccttatataggatggggggggcaaggttacaaagagagaaacttacccaaatacgacatcagttttcttaatctattttacaatattaccgaaccaagactttaggtcgttccataatatataaagaaacgtaatacctaagtcatgatccgttacatattccataaacataatctactccctataatcagtcggatagacctgccattactatgtggttagttgaacaaactaagcatatggttaaggagtaaataaattaaccaaccgagtggctttttagtcaaccaaatgacttaatattaatttatagcatatagggctgcaggaattc

SEQ ID NO: 25024 - DNA, 13649 bp, Oryza sativa
atttttttaaggtattgggttcacacaccgtgcgcatatcgcaaaaatgagtatgcttaagtccctataagacacatagcttcatcacacctgaaaaatatatggcatacgtggtgtaaaatcccaagtactaatgctcaaatgatttaccactgcctataaatgaccaaaaaaatatattataattagcctaaagccataatattggtcttttagaaaaagtaggaagaaagcatgtgcagatgcacgggaaatttatttgttgtttgtaaaaaaatactaaaaaaaggtcatatgtcaccatattttataagaaaatagattgtaattgtaaaagaaagaaatatttatatcatgaatccctgaatagcatgatccgagtgatataccgactgtttttaaatgatataatgcacatagcctaaagccaactacgtctataaaaatcacatagcaaacgactttaataaaaagcctttatttttagataatggaatataacatcctggcctttgctcaaaagagttacagctaattattacaatctagtactctagaaaagagtgtagtccaaataaaatagaacacatcaaccaaaatagataaaaaaacaaaaccaagacaaggagaacacattaattcaagtctatttatgaatctacatcaatagttggcaaaaagttgcataaccgttatctctagcttataacatgcaactttcagaaattctccatcttcatcacacatttgtaattgtaaccaaaaccggagccaatgtgttgctctgaaaattacctgcatatataaaatagatggtaatttatcaaaaaccatatcattcctgctcaaccacagagcccaacatatggcagaggctactacaagaatcagtttactctttttcttgtctaccccaaaagccaaccataaaaaatatgagatatgctagcagaaagaccaaaagtgaactgaattactctccatatgaactttgcataatgacaatccatgaagaggtgttgaatagtctcatttttcatatagaaacaacattttaaattaccattccaattccgtctcgccaaattgtccttggttaacacaacccctttaagcaagtaccacataaagatcttcatcttaagcggcatcttaagcttccaaatactcttatcctctcaatataaccattattaattagagctagatacattaacctaatcgagaacatgacattctgatgataattccatctaaagcaatcagaagaaagattcaactggatatgtacaatagaagcacataattcatgccaataaacacgattctgaccaactaaggcttcctaaaagaaatattaagcggaacaaatcccatgatattagcaatagaagaaattttgattcggacaatagtatataaagatggatatttatctttgaaggccaagtttcctaaccatttatcttcccaaaacctttttgttccccattatgcagttaataaagaaattttctaaggtattgggttcacaccacgcgcatatcgccaagacaaattaaatatgcttaagttcctacaagacacatggcttttccacactcgaaaatatatggcatatgtggtataaaatcgagtaaataatacccataaacagatttaccaactgcctaaagttgaccaaaatcatacaatcagtctaaagctatagtattggtgttcgaataagaatgcacacatatgtggcctaaagcaatgatattatatataatcaattgctttatataaaccaaacagtgccttaacttgtataaaagttaatagaccagctatatatataaagctttactgttttccatcttttaaattgcattgtaccaactcataaaaagttgtgtaacagctgaataaaatgattttcaagatattaagcacttgaacacgcgtacattgccaagaacaaatatgcctaagtccctaaagacacgtgacatgccacacttgagaaatatgggctgcatactcttaaagggcttcggcccaaaaagaaaattcaccgatacccttaaaaaaaatcaccgtgattactgtgcatcatcttctccgccgcttcatttccaaaaatcccccttcgcgctccttttcacaaccaccaccgccggagctaggactagggttccccactcatccaatcaccaaaaagaaaacccaaattagccctcgagcagatctgcacctccgcaccaacaacctcctcaaatttcttccacaagaaactctaatccgaagcttctcatatccacccatggcggaagagcgagaaatctcgttcgaacaatgggcgacgtttgatgtgaaggaatccacattgaaggagacggtgaagaagggcgtgctgccggcaaaaaaatcatcgggtggcaatcggcctacagtgaggaattctcgacaccgaacattggagaaattgtggtatttactaccttcttctatagtggtttcaatctcccaacttccactttcttctgtggtcttttggatttttatggaattaggatttatcacctaaaccctaacaccattctatacgtcaccgtatttgtccacctgtgtgaagcctttttgggcattcggccccattttaatttgttccgctgcatattttacctcaaagcacaccccaccaaagaaaacccctacgtagttggtggctctagctttcagccatgcggaaatatccacaagcactacttcaattttcctttgagaacctccaacaagggctagcatttgaattggttttacatctcgaacccagttccatgcctccctgcttttgtcggcctccctccagtccatggtccccattggaattctcagccggagggaactgatcttgctgaggctaactccttactaaagaaaatagttggaatcaagggagccggcttacgcgggaagtaggtcactctggcacttcatcaaatgccaactagcccccatcaaggagagagatcaaagccatccttccagcacgaaggccaaactggccccaatcgggaagatccagactcgatcgagttccagaccatgtattctcagatgtacaaagtcttctcgactgggattgtcatcgattatgggcacaatcttccagtcatcccatacagcctaatgaatcctacgcctccagtaagtctctataactcttctttcgtctctggcagtgaatgaatcattggatatataattgccttgtcttgacttttataggaaaatgaatctataatctcaaacccccttgctatggctcggcaatctcctcgaaggagcccaagaaataagcaaccaactgggggcccatcaatcaaaacccctcaaaagggtaaaaggtcagtcaaagagcaagcaccagcaagggctgagaagtgaacgaggaaattccatatcgtcgacactgatgaagacgacaacttagctccaggcgccaacccaactcagacgccgggtgctgacactacccaggtgcccaatgtaactcaagcagtgcccaagcctaagagagcggtttccaagtttaggacatcttcaaggtaaacacaactatgctctgccttttaatattccagaacattagaatccttgttgataaatgattgctaagaatctgtttgctcataatgagatcctgttaacgccaaattttggtaagattctttagtgaattcagttaaggaaaaagcacaaccagtcgacggaaacttatccaaaagagacatagtttaagaaggaaccttgaaaactttggcatgacggtttaaattctatctattaattagacaagatttagtaatttccttttatctttaggaaatgtttatttagtgtccgatcatgacttgtatctttccttttatctttaggaaatatgtgtcatgtccgatatggactagtatctacccatggtataaatatgtacaccgatggtctttgtaatctatctcttgatcaatacaactactctcgacgtatcgccaccctcttttccgaggtttttacttatcaaccggcagaacttggcacgtgacgcgtgttgcatcggctttcgatctctggcgagggggtaagtcctacgttccgccggccctggcaattgtatcggctacattggtgttgttcaaggctgtattgtttcgacctcttagattgctctagtttggttgatatatttgcctaccggtttatcatatatcttagttaatctaatttgattattcaatttacttgtatcgatctgatcttttctagggttttactggtatcggctaaattgtttgtcggtctagattagctaaggtatccactaccctgaaaatcagtcaatggcttgattgtttagattttatgattctttttatattttgcgttgcatcagccctagtcatgcttagaatcataaaaactaatatgcatgcctttcattgctaataagagtttcatcgaggttttagccgatgggttatctggacgtttcatcggcttataaggattatatacaagttagttttagctgattgcagtaaatgtttcattgattatctaattgtttgaatttagtgacatcgaaacaccagcccttaattcattaattcatttgtttatattatgcccttaaatatctgtcaccaaaataaaataatccattagtttttgcaaccttaaacggggccttagttgaaccctttttttttcctactcatctaatctaatctaaatctaaatctaaagtattaaaacctacccccggctgctcgctcctcagcgttttgcgctggcgtggacgcgggaaggaggagggatttcgcgagcgctcctgcctccgcgtcgtcgctggccattttgcaaaaaagcccttgatttacttgataatttgttgtaggtccctatcccttagttttaacgttatgcgttcttacttagaggacctctgtaaacaaaaatattctatacgaagaagagaaaaattggaaaatcgtaccgcgctctgaaaagtataagatgaggggtgtttttgtaaaatagaaaaaaaaaccctaacccccttccccaaaccctagccgccaccattcctcttcctcctctcgctccgctctctctcctgcccaagcaatggccgcccccctcattctcttcttcccgcaggtgacggcctcccccgcgcactctctgctgtcatgcccgccaccgcagagaggattttattgccatgtttaggattctattgccttcttagtccaactcggtaattttcattgggaatcatatggctttctacaacttacaccaaggtaattaaactggattgtcattgcacttgtgaagttcgtttcattgctttcttggttttattttctaccatcacattttatacatttacagttaggaaagaagtgatgactatcacttttttgtttgtttctatatttatgcaaccgtggctatcaactaaccaagttgtgatatttgatattacttttagagctgatgacctacaactgataagtacttaaagaattatgaatttatgactcaattatattgatgtccctaacttttttttaatgttcttgaattgcttctctaggaatttcatgaactcagtaactaagagctaattcacagcagttatttaaaggctctcaaattttatcatttggctgtagaatatgaatttgttccacaggaggaaatgcatggtataatctaggatgttctgcactaactaccgtggcagtgtcacgtaattatctgtcgtctattttatattgtgagcagttaaaagaaatgatcaagctagcatttgatatgattttttttcaattcaaaatttcaatacttgagcaatctaacgtgcaaaggcacactcacaaattccaaatatgagaatggaatatctgtggctttcggttcttctattttttaaggttagaatccacatataacgtaccttcaggttcttttatcgtaacaactgtctctcactctgatgctcatgcatgtatgagcatgtgagattatcaagtttttgcttttgtgaggtgtgacagaaacattcaaaggttgtgttcaagagacatatttgctgttgtgttagtttttaattgttatgggcatgcacttgtaaaggaggagagtgcagtcttgaactattgatggtcaacctctttgttttctatatatatgcccattcttgcatagaggttgaccatatatacaagtgcaaagaaaacaaattcagatacattggtacaaaagtgcaaagaaaacaaagaggttgaccatatatagaagaacatggaggaatgtgtgagaaaggtcagctatctaccaattcttgcattgattgctctaatagcaatattatatcaaatgaacaaattgcattggtttccactaaatctagggagaaaacaaattatgaagaggcatgtttattgttgacaacaagggaccaattgaaagggtcaatgcttagaataccaaaatacaagtaaaacttagcatattttgctattacaaactaatatggaatgactaactacgtttttttgtttgttccttaaatgttgcttgtgataggaaaaaagggggattttcatttttgctctgctatattagctcacttttaccagcatgcttgcttcttaaaatttggtgtacatcttcgtttatctaggtatataaatttgatcatttcatgtctacctgtgtttgctcttaagtcatgatgcaccaatagggctcaacaattcatcagtgctaattaccagagaggataatgaaataaaggtgaatgttccatcttctttgatgtttcagtactatgttcccctggatttgctcatgatttcagatttttactattgaaatttggttacgttgatcaatgatcaatataatgtgttgttgatattctgctagaggttcaatttgatttgtttgtgcatcatagatagggcaaggtacctgccaatgatttaatgtacagatttagttggaagctctataatgcatgtcaggtaacattttaaattacagtaggattgatctctgttgatgaatgttctttatttttctgtgacagatccacaatcacttatttggatgcatcacgctagcagcaaaatactatgctcaaatcagtgtcttaattataggctggctgattgggcccaggaacttggactcttcatagagctcattcaattccattacgtacattagccctcatagcatggaaaatagtcattcaatttcacacattgtaccattatacatgacaacagagcacttctttcctccctatactataaacaaaaacaaccagaaaagcaaattcttctagctgtgcattcacttttccatttctgatgccatgggtcttattccatataaagaagcatcagtacagcttgaagaccatctatccattgttgtcgcattgtatcatcaacgctaatatcatcaccgtctctgtcacaccttccaaactatacatacagaacgacagtaatacattcccttccatccaatattgcaggacaattcacctctagtatactaaaattcttaaaccgaatggattcgccgcgacctccgccagccacgtcaacctgacttttgtgaaaaagcccctcgcttttgattagttacgtgccggtccccactacatccatcgtccgatctcgcggtatggtcgatctggccgtccgattctccggacaaaccctagccggccgtcctcgctccccaccacccactcgacgccgccttgcctcaccactgctgccgggggccgcctcgtcctccgcctctccccgccgcctccacctcctccgccgccactgtgtcgtccccgtccccggctgcctccgcctccgccttcccctcgcgcagggtgcagccgtctccgcctcctccaccgccgtcgccgtcaacgtcgctgagcaccgtctccgccgcccgcgttccgccaccgtccctccgtgccgtactaagagtaggtgtatatgcctcttcctccccctcgcgctgccgcctcggcctccccgttgcgccgtcgctgtcgccgagcaggggcttcaaggcggacgcggagaaagcgaggaggtgagtgctcctctcctcttcccttctcggttctcttatgtctgcgaggaacggtgcctcgtcgccgttgtcgccgtcgtcccgctggctggcaccgccctttcccctctccccgtcgagtcatcctctccgacgcggccccttcctcctcttcatcggatggggtgaggagctcggcagcggcaacgagttcgacctcggcagaccgggcaacgacgtatttgctattattgtgcagaagaaaggggaccgatatgtatgcaaatgcagacttgcagagagagaaagagagagagccatggcgcatcgttccccctttcatttcactttacctcttgcatttttgctgcatgtctggccctcaaggcggctgctgctgcttggccggtgcgcctctttaattcgatatatcgatcgtttctttttcaatgatgccttagttttaatattttacattgtgtgtctgttaattcatcggcgatatgatctcatggccggctgcacattggctctgccagaatcgattcattcgagtattgcataagctatatatgctatggcacttcagtaagctttctgctcttgttgattactagcacacatgaaagagtcatgaactagtgttctttacttctgattaaattgatgtgatatttgtgtaggtgatgacaaaagctacaattattcagtgttgtcgttctctcctgcaggtgacgtattatgcaatttactgtttgctgtagttttacagcgccactgctcacactctgcttttgaaagcaatatgtctaatggattacataaggaaaggtctattgcatccgtcagctaacatttcttacggtgttagggcccttttagttcatatataggagtggcaaagaattttataggactcaaattccaacagatttttcttgctatgtttccctttgacttataagactatgttcctatgctttattttcataggaaaaataccaagaggtataacctctttgtaaatctatccgcggtccattcttcatggtgccaatcctcccttctcagagggtaattcttttctgattcatatggtgcgatgacttaccgtggcacgccgtgaaaagctgagattggcagatggctcattgggtgtgatgccggcatgtcggttctcaatattactggagtaagcacatatctttgtcattggccaattcgcattgcttgaactttccttggattaatttggctgttcttctggaacggtttataggtgcaaaggggtgcgagcaaggctacattggacaaggcggtgcaactatgagccgggagaatgaagatgctttcatggatatgctggtcagtcctactttgtcagctcaattaatgtgtcattcttgttcatacttgattaatgaaattgtaatttcacatggaatttcaattacatggaacatcaacctggagtttaacaaggttaggttttaatcacactccattttaatgaggttggctttttgttaggtaattgccttgcctttctacttgtgtgtactaccatcagaacgaacctgttcggcatagtattttttagcaccgcccaaaaaaactttaagattgtttcaataatttatctacataatatcaagataaatgggcatagtttatgaacctttgaattttgctcctgttccatactaagaagcaaagaaaaatgaaatcatcaaattcaatagatacccagtggagtatgggtatctatttctgaggtttaatgtttttgtttttatttttcccctcaccatcaaaccattttcttatgtttgtgtttatatttaaagcttctagatcccattgaaaatcgttataaaaatgaggaggtcagagctcaagccacgagggatctttctaagtgcattgttgaccacaggatggctgccaaatcattacccacgcctgagcaatatgctgtaagttctgtaaccatcacccttcttttttgtgcactctaattaagtacatctatatgtgctccataaatttcagcacacaaataatgcatcataaacatgtctgatattgttgtatgaccttttgcatcataaacatgtttgataggactttttgcatcataaacatgtttgatattgttatatgtggatatggtgagatgtagaactgtggattttagagcagaaacagttcatggttttaaaatgcactttaatagatgcatattcaaagtattaaatgtgtaccaacttttactttttgtatttgtcttgtgtaaagcatcatacattcatattacaacaatgctgtggctgacttgttattctgacaatcggtttctgttcaggttgaaagggagtgcactaaagccgaacaatggctatgggagaggtcacaactccaggagtccctgcccaagaatgttgatcctgccctttggtcccatgaaatcaacaaaaaaaaaacacgagttggacatgtaattagttctttcctccctgggaccatttttcaactgacttgtgcaaaatcagttacagtttacatcccatattatcttagtacatttgcttgattccacttgcaggttttgtagaaacattgcaaggcacaagggttctccagcaagagcggattctagcggggtttcagatcacatgcataaaacagatagaggctagacatttctaggatttcgtaactgaacagcgttgtcaagcctgacattttgtagcaatatacagatgagcgagtttctgctgacagtcttatacgatccgactctgtaccacagtcagcccgccatcgggtgcctgcatcttgataatcccagaggtgcggttttcacttgaaaaccctactactaatcatgattgttgatgcttgtgtattcttttactgtaatcgactcaagggctcaaggctgttgtctgcattttttcttgtgatgaacaaagaatggaagacgccattgataacttccaatggtcacaagagttgaagctttggggtttcattttgcgctgatcccagaaagctgccctggatagtctgtatgatataccggagatttgtatctactatgtgccattgaccatatattgcacgcacgcagcgtagcgcgtgtatctttctagtgtatcttttcttaaggtgccccacttcaccacatgtacgatgacacattcgtttgaagcaactttagacttgtttttttaataaaagagaaacattatactatgttttagaaaaaacgaaacactatactaattttaacaaatggttgtatttggcaccactaattcaatataagtaattaggtaaaacgaaaatgcttacagaaatgaaaataaccgatagtagttgttaatgtaacagtaataatgtagggcctgttcactttgctgtcattttcaaccttactaaattttggtaaagttaccaaaaaagtggctacatttagtttgctaccaaattttggtaactatataagaaatcatgtcaaaattttgacaagtttgccaaaattttgacaactatactaaaatttggcaatgccaaaatttggtaaagttttttttggcatcaaagtgaacaggcccgtagtgtaaccgtgggccaaaatcatgaccctagaaatatggtacttgcagttttcctcccaaaacctaatttaattaaaaccctaaacatagaaattggggaaaagatcaatgatcaaaaattgattccctaagacgcaatttaatcatgtgatcacgtagattgaaagaaatctagaataatcaaagcaaattagaaggaagcactaacttgccggtctcgatgactggagaggcggtcgcgagcgcggcggcagcctcggccatggcgaggcttcctgcagacttcgaggaagtagagccaaggcaggtcggtcagttttgcatcgttattttgttcatgggccacatttgttctgggcctgaccatgttgggccaaagggggtgcacccattgtaaaaacatgatggcttagcattggaattctttaggacccgggtgcctgtccacctccctgggcctactggccttcgccctttatcacgatgcgaacagcctgttgctgaattactttttttagtcttaaatgaaaaagcacaattgcttttgtttttcttttgatcggaaaggctgttgctctagtgttttttttcattttttttggtaaaaaaggttctagcagtctagcgctagccggaaacagcacataggatgggcggtactctattctagcactaggagttaggtccttttttaagctagtttactcaattattgacgtgcattacttgctccatgcttttaaaaatatatatatttttactatattgcttagactacttattctaaactatttttgaagtttatttcttaaaatatgaatttattatgttaataagataatatgtgtcaataattcagagaattatctgtttcagggtcttgaaatttgttctccttaggaagagaaaatttgaaatacacagcagatatgatgggctcagacagatgacaagctaattaatttgaccaatttatatctcggtacctgtaacatcctgaaaattcgaccgacaaaaatctaaactctgaaaatgtgggccttcaaaaactttttaaataaatcgcatcatgccgattttattcgcttatttcattagattttaatttcggtgttcaccggacgcgaataaggaattattatttaggataaatcctaaaattaaatggcaacacagataaattagaatataatttaaaataaagatttgttgataatagaaataaataaaatattatcgcaaccatatttgtatcaattaaatttaaatacgatggaataagaattaaccctaattaaaaattcaaataaattatataaaaataaaaaaaatgggtaatattaattttgagtgaatccattagttggaataacacaaatgttgagtaaaattcatggatgcaaagattaggaattatagaatcaaatttatacgggaaataaactaaaatcggaataaataagaaaatgcactgttcatcatggcgaaggtgttcgatcgcgtccctagccctaacacctcccttgccgcccgcgcgccgctcgcccgccgcgccgccgtcatcatcgtcgccgtcgcgtcgccgtcggcctcgcgccccgtgccgccgcctcgagccccgtgccgccgcctcgcgccccgtgccgccgcctcgagccccgtgccgccgcctcgcgccccgcgccgccgctgccacgctgtcgccgcgccgcgcgcccgcctgccgccgcgctcccgtcccgtcgccgcgccatcgtcctgtcgccatcgccgcctcgcgccccgcgctcgcgcgtcgcgtcgccgcgtcgagccccgcgccacctgtcgcattgccgctccgagccccacgccgccatcgcgtcgccgcccgcgcgt

SEQ ID NO: 25025 - DNA, 18584 bp, Oryza sativa
accccccctctctccattctcccccaccccatctcacccttcctcccctctcccctctccaatgcgccgccgttcccgtgccgccgcgtcgccgttcccgcgccgccgtgccgccgttcccgtgccgccgcttctgtgccgccgtgcgccaccgtcgccaccgccgtcgtcgccgctaccgctgccggtgtgccgccctccttcccccttgcgtccaccgccgacgccgctcgggtaggagggagagccgagagagagagggagaagaaaagagaagaggaagagagagaaagagagaaaagaaagaaaaagagaaagagagaaaagaaagaaaaagaaaagaaaagaaaagagaaaagggagaaaaaggaaaaagaaaaataaatagaaaatttggaagaaattagggaggttaatagtttagaaaatttaaaataattagaatttaattatagattaattatggtcgtagaattgcaaaatttaattattcttggtaatttctaaaagaaatcaattcgcggtagtaatttagatgtaattaacaactagatgaatctttatggactattatagattatttttggataatctctataagtaatcgattgaaggtagaaatttggatttaatcgctaggaattttagacgtatattatatttaatcatttagtcatagactaaattaaatcgtataatattataagataattttaggattccgtccgatatttagctcgcgatagaaatttctaacctattatatggatataatgttcgggtagattaaattaaaaaaaaacttatgataacaaaatatttatactcgcaaaatagtttaggatatttaaaatcgaaattggtttgccctagtttgtgaatagtaaagttaatataaaagaatcaactttcgcattcgacttccatttggatttatttggatttttatttgaattctaactgaattcaaatcgtttcttcgcacgtaattttagagcccgagggagttgcggatccaagcgaggaccaagacccgcaagactttgagcaaggcaagtcatcactattctttgaacatgttgaacccaattgcgaaattgttttgcttacaaataaaattgcatgcaatgatgaacatcctacttgtgattatgtcatgccttgattattgtttacccttattccttcgtaaccatgtttacgtatgagtccctagtcgattataacaattgcttagaaatgctactctagatttatgcatactcatatttatcaaatgctatatacttgggcaattacctttgggaaggtaattgagatgcggcatgtggagacatgagcgccacattgccatgatattggtgacatgatttgtgaaaggagaaataaactaaacaactgttttcgactggggcggacggaggatttggatggtatctggaaaaggctagtaccgtccccggtcaattaaggaccgagccatgaagctaagtatgaaacgacccccgtacaaccgcgcttctcgtatgggtatagacctagcggagtaaatagccgagcggagacagtatccctgcatagatggttcacccctgagtgaggcaggtgcgctacggtgggacattcgttgaggtagggccgagaggtgtgccctacatcggtgtcgccattggtaggactgccatgagtgtgtgtgagagagaacttaacttgaactataatttaatatgtgtgtgagacttctccttcctaggagcgccagaactcctctcactgctagaaacatggacacctagagtgcatgaggatttaagttcatggagcggatactgccaatgcgaggttatcaaaaagctttgccgtgacgcgtctcatgtgttgggacgaggcacatgtgttgggcagttgcggagtgcgggtaaagtgtacatccactgcagtgtgagtaaaccaaatctattcgaatagccgtgctcgcggttattgagcaccgggacatgtattacacttggctagattctagattcttaacttgtgtgggatgggatattgcatgatgatttttatgctgttggagccacttcctgagaggcgggaaggtggatgccctcagaaaaccatgacaactcaatggcgggaagctatccttgggatcacaatggatggtggacagaaccgtcattgtttaatatgaacactggtactaaattttgatcagtctatgctaggtcttaggcttgcgaaaagaattacaaaacttgctttgcgcaaaagaaccatagccattccttgaaatactcctatcatgtgcattgttgctgtggtggcttgctgagtacggttggtactcacccttgcaactataaacttaatcagaggccggggatgaagcttcggaggacccctatgcctactaccaggagggtgatgaagacgacggcgctcaataggtcttagtacggtcgttgcctgtggaaatggcgtgccgctgccttaactccgctgccttaccttcttctgtttttgggatgtattccagaccactcggtccgatgatttaagactatgcctgcgggcttatgatgtaataattcgtactcgtgtatgtgcacttggtacttcagctatggattcgtgtgtaccagactacttgatccagggaaatggtacggtttacacgattgattcctgttataaaaacgggggtccacagtaccagctagctatataaaaagaaaacgataaaatgtagactttggctgattaaaagttgactcatatactccctccattctagaatataaggcataaccactcttaacccaaagatcaagaaatatttattattaccttctcatttgaatcactctaataaatacaatgtatgcatctaacagaattagaaatattgagagttgaggatttaaataataatttagtggaaaggaggtgctagttaattgtttgcttgcatgcatgtcttatattatgaaacatcgaaaaaatagttgtgcattatattttgtaacgatggagtatatagctagtttaataacagagctaactttaaaattacttcctatgttttaaattataagcacttcttgcgtttaaaatttgttcacaagtaaggatctttagagcactatatttcccccaccaaccattatcgcatttaattttcacccaattttacctccatccattcacaaaagcttgacgctttcgcctttgttctacgtacaaatgcatgtgttaaatactgtaggaatggtcactttgccctaattaatctttatttattctagtcccaaccacccatctcggtagtacatggagaatatttttagcttagctcgtggcaaccagctgggtccttaatcgagcagcttttttccggaggacttttaaagtaaattctacttgaagtatattcttgcagtatatgaaagggtagatttggtatttgttaaaaaatcttaaaatggttatttagtcatttttaattgagatttttttccatggagattttttttctatcggtggtatttttccgatctcgtcgttcgttcatgataccaatccagtctactttgtacgcaagtctactttgtacgcagtacgccgggtcaccggcagccgccttcacgttgtctcgcatgtggctcccacaagcgccgcccagccgctgccgtacgcaacgacgctgtcgccgccgccggagctggaagcgacacagcctccgccgggagcgaagccacagtactgccattgtcgtgcgcagcactatcgccgccgtcgggctcggcagcagctgtctgcttccaggaacttgcttccgtcaatctctagcgataactattaatttgtgatttgtgcattacttatagtctatcgccgcagacgggcttccctgccctgctgctgccgcatgccgccctgctgcttccacctgccgtcgcccggctgcccttgccgctgcgagctgccgcaactgcgcgcctatcaaccggatcttactaagtgcaaaatttgaatttacaaaattaccccccacgcaaatacatgaaaaagacaaatatgccctatttaatttatagggcagaataatttagaggaagatcagattaatttgcaccgttagattaaatatactggtagtatatatttacagtaaaaatgtaccgtaaaaattctctttttctatatctctaatgcataacagagctgcgtccgcttgtagcaattaacactttttgtgactaggtgccatgtgagacagcccgctgcttccacgagtagacagcaagttgggatgcgccggaaccaggctcaattcttttgttttttctttgaccgcaaaggcttttgctctagtgctttttgggggccgggttttgaagagaaatagcgttttattgaaagtacaaacactagccgtcatctttcacaagtatgactcagcaggctgtagagaaatccatatcaatgtttctgcttttcaagggccacgtgactcggtggaacatgtatagcatcctaaaacggtttgggtgtcaatctgctgtcaggttcaccaaactgttttgaatggtgttatcgttcttttatgctaaggcagtggctcttcggtggcttggccgatatccactgttggatgtcggagctgcttttcgctctggcgattttcgttgcttcagtgtcgctgcggttgtgaaatcggcgctgctgggtcgcttggacggctagctcggcaacgataacacctcttctgcgatgttgaagctgttgtgtcgcttttgtgtttagcttggcagcgatgtcctgcgtttgggctccgtcgttgttgttagttgtgtagctagctcccttgctttttactgtgtggtgggtttcagccggtttcccgtaattaaccatgcaattgtatggttttcaggtccgattttccttataaactgagctaattctcttcttctaaatataaaagtgaaacaaagttccaccttaggtttttttaaaaaaaacagacctttccaaaattgagaacaactctctttgttgaattggaaaacacctccctcctgtaggtatttccttctcagaagttccacacataaactctcatctgaagatctaatttcatcagccattttgcaagaagggcagaattcagcatccttgtttctgttaaaccaacaccaccaaacactttaggacatggcaaatctggccatttcaccatgtgatactttatttccatcacacggcgtgtttaaaaacgagaggattcgagctacggttgtctagcctaccaaccataatgtcaggtaagaaattcatcacgtatacttttttcctaacagttattactactatgaacttatatgctttagtcttttagggttttaagggttataaataagaaccaagtgttcattagtattaggggttgctttagaagttgtgtaacttaatcaagtggcgggacatcatggggccaaaggccttctcatttcaaggatgtcttaaagtagcactacgaaaaaaaatcgagttatcttaaaaacacaaaaatactgattgaatatcattgttccatgataaagattgttaaaaaatgtcatccttttcttatcacctggttcagcaaatttagtaaaaaagttgcctatattacatgtgagaccctttgtagtttgcagatacttagtttagtgcctaacactgaagacgcgtcaacattaaattgcaaaaaagaactaaacccatgttatatggttccatcactgaaaatggaatacctaagatagcaagggtgcatgtgttaaaaaagagggacaccatactaatccactgcaagaaaaaaaggtttattatattcatagattgaataacaaaaatatcgaacttatatgatatgacgaaacgattaatgaaaacaattacaagacatatataacagaatagcttcacctttttcagccaaacaaggaaaaagggagatcattttagccaatgcctaagcaatgaaaaaaaagaaccacgctaaaccaataagcaaaataaacaaatttccgcttgcatgttgcattgtgttgcaatcaacacttaggcatggacacttgtgttgcacaatatatgctatcattttccatgaactatggtcattagcacttgggcatgtttggaggacgaggcagcatctgagcctgtggcgtcttgccatccttcacgatgaacacagtattcattccccacaccatgtgtcgatcaaaatggcaatgcatgaaccacacacctgaacaatcaaaataaacatgaaaaaaaattttaatttaaaaaaagaaaactggacatgaactctttgatacaagcataataatagcataattcacagaaaccaaaagaggaatcatcagaaaaaaagttacctggattgtctgcgcggaagcggattgcggcccagccggccttgggcacggagactgtgctctggtacggcgggtcgagcaggttgtaggtggccgggtccctgcggtcgtcgaacttaccggaccctagtcccacgacgtagaaggcgaagccgtggaggtgcattgggtggctctcgaaggacgtgtcctggaacaccacctccaccacggtgccgtactccagcaccttcaccttggcgccgtgcttcgtcaccccgggcctgtcgttgtcgccggtgaggttgacgaagacgggcgccgggttgttagggaagtcgtcctcgtacacgccgcggccgctgccgtagtagtacgcgtgaaggacgtcgatggccgggctgacgaagctgacgttgttgaggctcgccgcgaaacgcgtagtgttgcccttgggtcccttgcacgccgtgtcggttgcgttggtggcgttgcaggggagaaagttgatggcgaggtcgatgagcatgtgctcgtcgacgtgcgtcggtacgtggaccgggtggtccttgctgccaagggacctgagctgcctgaggaatgccatcgccgcgtccacgtcgtcgagagacggcaggacggcggggaagtccggtggcccggcaccgctgtcgccggtgtagtactccacgacggccgtggcggtgctgttgttgaaggggatggggacgggtaacgtgataaacgtcctcgcggccatgtagtacctgctgttggacttggaccccaagctgcggttggcctccaggagaaggtccatggtctggcccggcgcgatcatgatgtattcgacggtgagcggcttggtgtagcgggcgtcgatgccgacaacggtgaggcggtgcccggagacggcgaagaacatgtcgttggtgagccccgcgttgatgacctggagcaggtacgtgttgccgtgctccacggcaaccttgaaggtgtcgtccctggagcaggggaacatgtccccgggctggccgttgattgtgttcgcgtcagacggcttgacgtcttccccaatgcgcttcatctcctcgagcaggtggttcacatcgtttttccaccactcacctgcaaaacccatagaaataattagttcagatcaaacggttatacgatcgatatatacatgcatcaaacaagctaattaagattccgttaattaatggtcgtcgcgaatgcgtacgtaccgaggatgatgggtatctctttgtctggcctcttgaaggggaaggtgtcgccgtgcttggggtggacgacgatggcgccgaggacggtggcgcggtcgaagtcgctgtgcgcgtgccaccacagcgtgccctcctcctcggacatgatcacctggtaggtgaacttgccgtccggccggatcgggcattgcgtgatgaactccggcccgtccgaccatgggttccgcggctggtccacgccgtgcctgcgctacgtacggttaattgttagtcatcgatcgcgaacattgcattgtaagtttcgacatatggatcgatcatggcgtttcgctgtagcaactggcaagtggcaacaacgaagaacatgatttaccagtggatggtgatgtttttgttgccgtggttgtagacgttgacgatgacgagatcgcccttgcgcgcgtagatggtcggcccggggaactgcccgttcacggtgaggacgctcttctcgtggcagagcctcctgtagttggtctccgtaatctgcagagcatcatacatggttaaaggtcatttcgtgcattattcatgccctatccgatccatcagaccatcacactactgtcactgtggatcagtgaagtagtacatcacttacaaagaaatcgtagtggcggcgagtcctgccgccgtgagccgggctaattgcaactgcaaatgttaacaccgcacatgctaataaccagagcactgcaggtattttggcaatacccatcgccggacgcacgatattcgaaccaattttagtgtaagaaaacagggctaactgagaaaattgtacgtgagtatgtatggttttctgtgtaagcacatcgtctgtaattactcaacagtggctagctaagcagctgctttgcctgagaggatgagatggccatctgatcaaacagaatgaatgtatttataggaaatggcagcgcgtgcctgtaatcaacgtcagactatttcattcaaatgattagccagcttggaaaataaaaaaattcttccacgtttcacgcatgtattcttctacagcagtggcacgactactaacgaaaagttttttctcaaactggcgttagttggttgtctgcgcgctcgtgtcgtatatatgcatgcgtatatgctactgtcacgccgcggccactgacgacatcttcagaagtttcctgccactagtgcttttacggtacccactactgttagtggtagcagtgtagtacaactttaatccaaccgttgaatctattaacttaactagcatggtggtccatacaaattacgcgactagcattattatattttctctcatataatagcatatatgttttcttaatgtattattcaaatatattaaaatgacaacataattttaaatttcatactaattttacgaaactactaatgtgtaatatttatattgtattttatatacgtgttagttattaattatttttaatatcaaatttaagttatttgtaaattatattcttatatggactatagactcgtctttgaatatttctttttttaatttcgtattttcgttatctgggtatttctatataaactctaggctcttcttccaatattatttatttttaattctgaatttttattatttctattttctatgtggactctaacactagtacataaagtataaagtgttatataaagtgttataggtgccggttcggaaagcctaataggtgccggtttcggtgctggcaccaattagtcggcactaatgattttacattggtgctggttcccaaaccggcacctgtttggcacctatgtgttttataggtgccggtttcgatgaaaaaccgatacctataatggtccaagggctgcgctcgcacgcctataggtgacgattctatgtttatagccggcacctattataccacataggtgcctgttaatggcaataaccggcacccataatcatgtaacccaaaaaaaaatatagccggttctcagtatgtccattcacatcaatccaccgtacacacaaaaacccacttcaattcacagaatatatgtaatccatctccaaacatcaattcacagattcacatcaccccaaatccaaaaatttccaaacatacacacataaatgcaatccatctccacacattcaagttatcatacatcaattccatctccaaatgtttacatcaattccatactttcaaacaaaggcaatacaaagttaacttgagagaaattaagttgaaataataaagcaaggcatcaccttgttaatcttgtttccatgtccaacactgggtgcacaagttttctcccttccagaatcatgattcttggaatttatatgactgaatgagagagagagagtgagagaaatataaatttgctaaaaacagaattgatgataagtcatgctaaaataactgacataaattgcatctggtattgaagggaaacttcaaatggtataaatttgctgatgaaccttaccatttaaaaatgttccttttgttatctaattggaataatgacccctataaggttttaagggtgattttcagtttaaagcagttttgagcaaaggttcagcacttgagtttgacaagtacaaaatgagtttgacaagtatattgtgcatagggcctatgggcataacgaaatttcagatttcagattgcatcaacagataaaaatcagattgcatcaaaacttataggcctcatttctgcatgtaaatttctgcacaatgaactcacagcactagcggaggcaaactagcggaggcagtgaagtgttcttgttttacccagttcataatagctctagtttcaggttgtctgtagttaattccatcattgatggggaaaaactgccagcattaacaatttaattgaatggctcaagtaggtaaagaacaaaaggaaatattccataagaagaaaataatgcatcactgacttggtcaggaaaatctccgttgaggtcaacattgtttgcattaccacgtcttctaagagcaaatccatcagggttcatcgttggaagtatatgaagatgcatgttttccataataagagttgcctacagatattagttgaactggtaagtttttgagcttatcatatatttctatcgatttcagtaaaaccaatggaaatatatatcataaaaccatagttgagccagacaaacataaaatttaagagcagataacaatggcctaataatttttatacacaaaagcctaataattgtgttgtataacaccgagtggttgtacggtatatacacatcacatattcacacaaaattgagcttaagttcatagcttcatagaattgataacacaaaaaagccttcaaatcaatggcatcccccttttcttcttcattttcagaactgaaaatttaatagccgactgtactactattttcagaaatcaagtcattgcactggtgcacaagctcctaaaatcctggtacatacacactaagcgtctaaaccattgcacaagcactgaagcacaacttcctactttcctaaatggttaaatcctaagtgtgaaactatgaataactcaataatgctagaataaaaaatttaagtaaaattcacttacttttgcttgagatgtttgagaagccagagcaggcaaccagcagcaacggagctcgctcaatcccagtcatcctcgctggccgtccccctaccctgtcgccgccaactaaactgtatactagataaatcagtgagtttcagttcccaaatcccaatcagtgaattttagtactcaaatcttcaatactcaaactcaatactcaggctactcacctgtgtggctgtgacgatgtgttcaggggcgatgtgcggctccggccgtgccgctgtggccctggtcggcggctcggcgctcgctaccctgcgcccctgcccgcgccggtgcgccctcgcccctgggccctagcggctggcgccaagccgtggcacgccacccgccacccgctgcctgcccacctcgctggcgccaagccgtggcacaccgggcggccggatctggcagaggggaggtcgcggccgccgccgcctccgcctccgccgtggccaaccccgtggccgccgctgcgaggcctccgccggccagccatgggagcccgtggtcggcggctgccgccgtggtcgctgctgccgcctccgccgcgggatcccgccgcctcccctcccgccggatctggcggaggggagggcgcggtcgccgctgccgcctccgccgcgggagcccaccgcctcccctcccgccggatctggcggaggggagggcgcggccgctgctgccgcctccgctggccagccgccgaccgcgagacggcgggagaggggagggagagagaggacagcgagagagagagagagagcagagttagagagacgcgagagatcgagaaggggagggatagataaggacgcgatgggtgccgtgcgtgggctcggctcgaatcggctcggccaaacgctataggtgccggtttttaaaaacaaccggcccctataaaaattattaggtgccggttcttttaaaaaaccagcatctatattataggtgccggttcaaatgttcttaaaggtgccggttctacattttttcaccgcaaggaggtaggaaaagctctataggtgccggttttaaatgaaccggcacctatgaaccggtctctatgagagttttttagtagtgtaaactcatctttcaatattttttaatttttaattttgaatttcagttacttctaaattgtattcctatattgactttagactcttcttcccatttttttaattttgaattttagttatttgtaaattgtatttttatacgaactctgaactctagttttaattttattatgtttatttcgaattttacttagttttaaattcctatatggactctatactctacttctaacattccttatttttaattctgaatttctactatttcttaattgtatttctatatggactctatactctacttctaatattccttatttttaatttcgaatttctattatttcttaattgtatttctatttggactctagtctcctctttcaatatttcttatttttaattccgaatttcagctatttttaaattgaatttctatatggatctgtttttctttttcttcaattaatatgagaatttctagtaacataatataaatccttctttgattcaaatatttatgccttatagacaatcctccgaagaaacagtaccaaaagtgatggaagtagataagagtacacaaggaacaagggaggaacaaagaaatgcggcatcgtaacccaggaagtcaggtaatggcaacatcaaactttcctacaactttcctacgtaaattttatcttaatatactctgctattggcaattatatatatatccttaaaaaattttcataaattgcaggaatttgtgtttacatcaatagttacgattgatcgagtacaagaaaatattcaatggtggtacatgtcgtgcaatctttgtaataaaatagttattcagaaaaacgacaaataccattgcaggaactgcaataaatatccagaaaatacaacgcctaggtaagaatacttcatcttttgtaaataacaatacttatgtaataattttttttgcattaaccataatttcatattaggtaccgactacgactccaaataagtgatcatacgacatctacaagctgcactatatttgatgatgtggcacaaagcatgctagagacacctgtctcatcattactcaatttactagatggcaaaaacgacgaaattcctaacattattcaacaactctgtggaaaacaactcatcttcaagttcaagctcagtgaacaaaatctgactgaaggcacaccaaactatgttgtcaaaaagacatttgtgcctgattatatgcttgagaagcaatacctcattaataaggctgaagaggtaaagcaggctactactgattttttacaacacaaaatcttgaaaattttatttctgaaatgtttccgcattatgattttacaggagttaatggacgacgatgtggataacatactaaaacaagatagagagacaaatcaacaggtatttgaacatataatacaaattttcatttatttataatatatagcacatatgacaaatacttcattgcctttgcaggaacaaaccagcagcggccctcttattaaaaacagatccatctcactgctacccgtgaagcaagagctagaggatagtgaccaggaaatcacgagtgaagatgaactcacttcgtctgacaaacctcccagttgcaaacaaataagacggaggtcatacataatagaagacgattcagaagaggagagcaatgaaacaagtatgataaaatgcgtagatgcaaaagttcgaggcaaaaatgcaaaaggcgctcatgcaaaatccacaaaggcggaaatcagaaatgacacctacagccatgaaataaacaaatcagttgttgaagaatccatcaaggcaggaaaaagataggctaaaaccatcaatggcataggcaaggaaagctctgttgaaaaacgtcagaaaacatgtgttcaatcagacaataaagcatgcaacacaaggcctcagagaacaaggaaaatgaattctaagtatacaaatagtgcttagagctcatgataatagttcataattagcagtagctcgatagaatatcctacagttaatgatactagctagaaagaatagttcatagtcaatacagatcattacatgtactgtattataatagtcgaatgttgtatatgcataaactgagatatattactatgcaatctgttattttatttatgattttttatcacatctctgtatatacagacctaattttgcaaccgattgcacatgaagcatccaaacatataattcatgcaaaggaattgaaaagaaaaacagcgtcaaccaacctttgcctgcccgccgattcccccaggctcgccaccctggccgatccgtgacccaaccactgcaccgcctccaccttacattttgctggatgccgaaatgagacccaaaatagcagattttgttatgaccaaaatttttggtgaaaaccagcaaaaggcgaatactaaaaaatccgaggacatgcagtacaagagaagaataatcttaaactttccaacgctgcggttaacagattcacagaagaaagcatatgccttgatcgaaatagagaaactaatgagacaagcaggaaaatcgctaagggactacccagacatagagctaccaaatgctgccgagatagaggaacttggtaacagacttataaacgaagagcttaactatgacaaagaccaactgaaggatgagcacctcgccatattaaacagccttaacacagatcagaaaaaagccttcgatgcgataatggaatctatcaacggagggcaaggaaagcaaatatttgtggaaggctatggcgggacagggaaaacatacctatggaaagcactcacgacaaaactaagatccgaggggaagatagtccttgcagttgcttcatgtggtattgcagcacttctactccaaggtgggagaacggcacactcaagatttcgcattccaataaagatcacggaagagtcaacatgcgaaataaagcaaggaacccatttggccgaactactaaaaaggacatcactgatactatgggatgaggctccgatggcaaacaagcattgctttgaagcattggacaaaagcctaagagatataatgaggttcactaatgaaaacagcagtgaaaggccatttggcggcatgacagttgtattgggcggggactttagacagatccttccggtgattccaaagggaaggagagagaatatagtgaatgcatcaatcaaacgctcatacctctggaatcactttgaaattatcaaactaacagaaaacatgcgactaagctgcatgtccaatgaaccgctagagaagcaaaaggtcgctgaattcgctaagtggattctacatatcggtgacggagcatcagcatcagatgaaggagaggaatgggtaaaaatcccaagtgatatcctactacaaaaaggacaagacccaaaagaaacaatcgtcaaaagcatttatccaaacttgctggacaactaccgtgaaagagaatttctagaggaaagagctatcctatgcccaagaaacgaaacagtccaggaaattaatgagtacataatgaaccaaatacaacgagaagaaatgacatacctaagctgtgacaccgtttgcaaagcgatgacaaacaacagtagcatggagcacatgtatcctaccgagttcctcaacacgttgaaattccctggaataccaaaccacgaacttaagcttaaagtaggcctgcctgtcatgctacttcgtaacatcaaccaaactgcaggcctatgcaacggcacgagaatgacaatcacacagttaggtaagaaatacatcgaagcacagatcataacaggtacacatgtggacgacaaggtatacatacaatcatcatgtcaccgagcgacaccaactggccatttgtcctgaaaagaagacaacatcctctattagtttgcttcgcaatgaccataaataaaagccaaggccagtccctgaacaaggttggtttatatctacctaaacaagtcttctgccatgggggcctgtttggggagctttagattccgagaagcagctgtttggtagccagcttttgagaatctggaaaagctctgaaacccagcttctggcttcttagttcatttttcagaatctataactgcagattctcagaagctgtggactgtttgaggcagcttctagcagaagcagcttttgggaaaagctgcagctgggagaagctcccccaaacagggcggtagcattctctagagtcacaaaccgaaatggcctgaaggttctgattgatgattcagattgtcccgaagaaaatgtcgctagaaacattgtatacaaggagattttctaattgacttaatatttttaaggtttactgcaagcagaaacggtgagctcgaaagacagtctatgtaaaaagtcctctgacatatacccacagtatttaaaatcctctaattgtaccagtgttattcaagtttatagatgcacaaatgttattcaataagacccatttgataagaaagtcctctcaaacgtatatcgagcttaagatagggtgctggtaggttcacattatctaatatcaatttatttaaggaaatgttctatttgtcttgatactgttctgaaatagtatatttttaatatccatatatatctactaatctaataaaaattcatctcagtcaaccaataaaaatatttgaagcataaaaaatcaattagcaaaaatctcaaatagccatatatcttcaaatgtttcccccagcaaagattgagaagataaacttcttgatgtaaaatatttttgatggagtgcgtcaaagagcagtacacttttccttcaataaaagagacaaatgaatcaatcctaatgatatccccaacggaagactgccagcttcacactgctaatcaaatcaaacagccaacaagcaagaagagaactttatattttgcataagagacaaaaacgaatgatatgcatgaatattcctatttacctgaaaccatgagccactgctccaatcatggacagcaaacgagatgcttcgtcaaaggacccttgctgtgccgaaggtcctccgataccgacgacggttcgtcgcacatcaatatccccagtgccgcacacctccgatccatgagcaaacggatctgaccccagggagcccttcaaggtttccccacaataagctggaagggaagtacaccgaggcgactcaggtgaccggcggcgacgcaggaaggagagagggaaaaggaaaatttcaggaagcaagcaagtggggaaaagatgagataagagagtgaggggaaaaattcaggaagaaggaagtggggaaaagaagatgggagctgctttaaaccattcaattctgcgatgctctactaataataaatacgaatataacaaaaaaatctcaaattagaaaaagcacaccacttcggacaccacacaacacaagtgcacacatgtcagggtactgacatgtgaaattagttgagattaataatttaattctatacagcatttatatatagatggagttaagatatctgtaacactgtttttaacgacattgccttatctcacacgtggataattgataatataaaaaaaatacatgtacaaatatattttttaaaaaaactacatgtgcaattggtttttttaatccacatttaatgctgcatgcatgttgacggagcgtggggctcctcaccgggagaccgcgctggcccccctttgccggttcggccggggaccctgggtgaaactctaagctcccaatctgtatgtggaaggttcgcgagacaggaagcacagaagacaccggcgatgtatacaggttcgggccgctgagaagcgtaataccctactcctgtgttttgggagatctgtgtatgaaagagctacaaagtatgagccagcctctcctttgttctcggttcctaatctggaaaggtccagtctaagaaaaagctccccaaaatctatctccctcctcagtgggcaaggtcctccttttatatcttaaggggataccgcatgcaccattctccccctctccctggggacttactctaccttttcataaatggacggagatttgcatggttgccgtccgagtcaccttctgatgggacggcccacaac

SEQ ID NO: 25026 - DNA, 11790 bp, Oryza sativa
gggggggactaagaggagggcgaacacatcaccctcgggcccgacgtcccccgaaggtgccaggccacgtggacgattgtgtctgcctcaaacctctagtcatgatactcccgatcccatgtcaccgacagtagcccccggcgttatgccagggcgattgccctccttaagggaagcggtcgggcgtgacgccactcctaaggcctggtgacaggtgggaccggtctccacaattgggcagaaacccaacggtcaaaaatcacgcacatcggcaatggtaactcggctgtcaataatgagcggtctcttcaagactgccacattactcgagtagcacacgaatctggacatggcgattcgtttcatctggagatatggtaatgtcgcttcggttggcgagcgtaattaacgcgcgcacgatatgatctacctcgactgccacaaccgcatatccacctcatgcgccgcaagcgggtgaatgggattagtgcaagcgtgggcgcgagaaacgagggggcgaaatagtgggcgcgagaagcgaggagccgggcacagcgttggcaagggtataaaggcactgaggaagggatttgtttccttcccttcgccattattccccttgtcttcgccgcttgtgccctaactccttctttcctgcgccctaccttcgccactcgcgctcgctcttaatcttctcttccttccggcgccatggcacggggctccgctctgctcgatggtagcgtgctgccgccctcccgcatcgtgagcgagaggcaggctgggctgccgcgccgcttcatgccggaatctgccaccggccgggagatagttacgctgggcgagggacgcccggcgccagactacccggggcggtccgtcttctttctcccctttgcaatggcagggctggttctgccattttcttctttcttcatggatgttctggagttctacgatctccagatggcgcacctcacccccaacgcggtgatgacattggccatcttcgcgcatctgtgcgagatgttcattggggtgcgcccatctcttcggctgttccggtggttcttcaccgtgcagtcggtgtcgccgccatcggtagtcggcggctgctacttccagccacgggggccggcgctgaaccgctacatcccctgcgccctccgcaagaagtgggacgactggaagagcgactggttctacactcccctcgccgacgaagcgcgcctccgacttccgagccagcccccggcgcaggcctccagctggcgggcgccggtagatctgggggatggctatgacgccgtcctcgaccgcctggcgggcctgcgatcccaggggctcacagggaccatggtgtatggcgactacctccgccgtcggattgcgccgctccagcggcgcgctcggggcgcctgggagtacaccgggtccgaagacttcatgaggacccaccagggagtgagatgggactgggctcctgaggacttcaagatattggtccaacgggtgctgaatctcaactccgtggaggcggccctcattccccaaggaatcctccccctctgcagcgatccagaccgcgcctccatcttgaccattatgatggcggtcggggcctcagaggagcgagctccaaagggccacgacggcgcaggcgggagccgccggggggaacaatctaccccgagagggggtcgtgcttctgggtcccgtggcaggggcccggggagcagccgccctaccgacgcccgggggaagaggaagcagggaggaacacctcccccatctcctccccgagggggcggggcggcgcgtgccagcagcaagcgcccagagggggccgcgccagcatcgcagcccgagggggagcgcaagaagaagcggccccgcaagatggaggagacagaaccatctcggggaaacctcatttcccctccaaagtggtcgtttaaccgaccccctcgcaggttcgtctctcacccatcgtggctgtattcattctctcaacgcgagttttcactcacccatcttgttcgtcttctggtcttttcttttgtttcagcgagatcccgtcgcgtccctcccgccattccaagtccggccagtctgaggccgaggatccggcggccgcagaggcccgtaggcgggaagctgaccggcgcgaggccgcggatcgcctacgggaagccgaggaggccgcccaagaggccgcccgggctcgccaggccaaggaaatcgctcgggagggagccgcccgggcccgccaggccgaggaaactgctcgggaggaggccgcccgagcccaccaggccgaggaagctgctcgggaggaagccggatttcgccaggacgagacgatggcgacttccgaggcagcccgcgacgaggccgcgggcgcgtcgctcgggcccactccctcgggcgacgctcaggcgacaactcccggggcagctggcgacgaggctgcgggcgcgtcgcttgggcccactccctcgggcgacgctcaggaccaaacgggtccgggagacatccccgagtccggcacttccatcggcgggccgagccgcgtggcatcttctccgaggcggcttttccccacgccttctgctgccctactgagcgcagagccccttctgcaagccttggccgccgcaaacaccacggtgttggacgggttaagtgcccaggtggaggccctgcaggcagagcgggcggagctcgacgccgcgtgggcgcgtgtcgaagaggggcgacgctcggtggaggccatggtggaggtgggccgtaaggctcaccgccggcatgtctcggagcttgaaacccgcaagaaggtgctggcggagatcgccaaggaagtggaggaggagcggggggctgccctcatcgccaccaccgtgatgaatgaggcgcaggacaccctccgccttcaatacgggagctgggaggcggagctaaggaagaagctcgacgccgcccagggggtgcttgacgctgccgctgcccgagaacagcgggcggcggagaccgaagcgacgtcccggcggcgcgaagaggcccttgaggggcgtgccatggcgctggaagagcgcgcctgcgtcgtggagagggatctggcggaccgcgaggccgccgttaccatccgggaagcaacgctggcggcgcacgaggctgcctgcgccgaagaagagctcgcgctccgcctccgcgaggacgcgctcaccgagcgggagcgagctctcgagggagccgaggccgcggcgcaacagctggcggacagcctgtccctccgcgaggcagcgcaggaggagcaggcgcgccgcaatctggaaggtgcccgcgccgagagggccgcactgaaccaacgggccgctgagctcgaggcgcgggcgaaggagctggacgcgagggcgcgcagcggcggggcggccgcgggcgaaagcgacttagccgcccgcctcgcagatgccgaacacaccatcgccgttctgcagggcgcgctggactcgtccgccggggaggtcgaagccctccgcttggcaggcgaggtcgggcccggcatgctttgggacgccgtctcccgcctagatcgcgccggtcggcaagtgggcctctggagagggcggaccgtaaagtacgccgacaaccagggaggcctcgcccagcacctctcgaagatggccggggctctccaacggctccccgaggagctcgagaagacaattaagtcatcctcgagggacctcgcccaaggagcggtggagctcgtcctggcgagttaccaggctagggaccccaacttctctccatggatggcgctggatgagttccctcctgggactgaggaccgcgtgcgcgcgcaagtccgggacgccgccgactatatcgtcgacagcttcgagggctcggcccctcggcttgcgtttgcccccaactccgacgatgagggcaatgccggtggtgtagacgacagtgacgtcgaggccggcgatccgggcgcatcgggatgagcccccagacccccgccattcttcagttttttcttcttttctttctaaggcctttgggcctcttttttgtatagatcaacttaatctgtaatcaaaaatgaagaaatttttgtgttaatttcatcttgctgtgagtatgagatgaggatgatctgtgccgtggtccttttgtgtcttagcttgaataagggctcgtgcccaggttctggtcctcgaaaggcgcaggtcggggctagtgcctggggagatccacatgtcgagactggccaggccgggaacgtggtgaccgagggttaggggtgacccgattgtgggtttttgccgattcccccccggagttcaccacgccccggggcacggctcggttctgggcctcgtttggcgattttagccgacccgagcccccgagggcaggattgagcgcgagtgacctatttcaagtcaagattcttcaaaaggaaaaaacagcacagatacaacctttaggaaattgaaattgcttttattgaaattctgaaataagagaaataagaaagtgcatgtgtggcagcccccggccaaccctgcacgcccgagggggtgcggggttgacccgagcccgaaacctgacacccgacccccccctcaggggtagaagcgacgaaggtgttcgatgttccacgggttaggcagctcagtgccgtcgcccgtggccagctgtatggagcccggccgggggacgccgaccactcgatacggaccctcccacattggtgagagcttgctcaatccagctcgcgtttggacgcggcgtaggacgaggtcgtcgacgcagagtgatcgggcccggacgtgacgctgatggtagcgccgcaggctctgctggtagcgcgcggctcggagggccgcgcgccgccttcgctcttccaagtagtcgaggtcatctctgcgaagctgatcttgatcagcctcgcagtacatggtggcccgaggagacttcagggtgagctcagatgggagaaccgcttccgcgccgtagacgaggaagaaaggtgtttccccggttgctcggcttggtgtagttcggtttgcccagagcaccgctggcaactcctcgatccatgaatcgccgtgcttcttgagtatgttgaaggtcttggttttaaggcctttgaggatttccgcattggcgcgctccacttggccattgctttcggggtgggcaggtgaggcgaagcagagcttgatgcccatgtcttcgcagtagtcgccgaagagttcactagtgaattgggtgccattatccgtaataatacggttaggcactccaaaccgggccgtgatgcccttaatgaatttaagtgcggagtgcttatcgatcttaacgaccggataagcctcgggccacttagtgaacttgtcgatcgcgacatacagatactcaaacccgcccggggcccgcctaaacggtcccaggatatcgagtccccagacagcaaatggccacgaaagtggtatggtctgcagggcctgggccggctgatggatttgcttggcgtggaattgacacgctctacatcggcggaccaggtcgaccgcatcattgagagctgtcggccaatagaaaccttggcgaaaagctttaccaaccaaggtgcgcgaggcggagtgggctccgcattcgccttcatggatatcggcaagaagcacaacgccttgttcccgaggaatgcacttcaggaggattccattagccgcgcgccgatagagggtcccttctaccagcacgtagcgtttggagatgcgacggacgcgttcactcccttcgcggtactcgggtagagtcttatctgtgaggtatgcttggatctcggcgatccaagcaatcaatctaagggagctgggagcactcccctcgggtcccgaggcctggactccgacgggcctcgggggccggtcaggcgcatccgtctcccctaaggggtcgggtcgcgccgacggctgggcaagcctttcttcaaaggcgcccggtggggtctgggctcgcgaggacgcgagccgtgagagctcgtcggccatcatgttatcccgtctgggaacgtgccgaagctcaatcccgtcaaaatggcgctccatacgccgtacttggcgcacgtaggcgtccatctgcgggtcagagcaccggtactccttgcagacttggttaacgaccagctgggagtcgcctaacaccaggaggcggcggatccccagtccagctgccactctgagtccggcaaggagtccctcgtactctgccatattattggtcgctcgaaagtcgaggcggaccaagtatttgaggacgtctccactcggagaggtcaacgtgacccccgcaccggcgccctgaagagacagggagccgtcgaactgcatcacccaatgggcggtgtgaggcagctgcgagggacccgagccggcttcggggaccgagacgagctcgggagccggggtccattctgccacaaagtcggcgagggcctggctcttgatagcgtggcgtggttcaaagtgcaaatcaaactcagaaagttcgattgcccatttcaccacccgtccagtaccctctcgattatgcaagatttgaccgagggggtaagacgtaaccacagtgacccgatgcgcctggaaataatggcgcagtttcctcgaggccatcagaacagcgtaaagcattttctgggcctgagggtatcgggtcttggcatcccggagggcctcactaacaaagtagacgggccgctgcacctttcggtggggccgatcctcttcgctaggggccgcatccctggggcgctcttcacccgagcggcctcgcggggcgcactcgtctcctgtgccgacgacctcggggtcggaggacgacaggggtggccttcccacagtggcctcggggccgtcctgggggtcgggggctcctggcgtcgtcggacaagcgggcaaagggccaactccggtcgtcaggggccttaggccaccgttcggctcgggggcctcttctccctgctctctcccgggtcgaatcggcacagggttagcctcggggtcagagggcgataggtgcaaccttcccgcagtggcctcggggccttcctgggggtcgggggctcctagcaccgtttgacaagcgggcagagggccaactccggtcgtcgggggccttgggccgccgttcggctcgggggcctctcctccctgctctctcccgggccaagtctgcacaaggtgggggtgcgcggaatgaggattgtcctcatcgcgctccacgaccaacgccgcactaaccacttgcggggtcgccgctaagtagagtagcaagggttcatttggctccggggcgaccagaactgggggagagctaagatacgccttcaactgagtgagggcacgttcagcttcctccgtccaagtaaacggcccggagcgtttgaggagcttaaataggggtagcgccttctcccccagcctcgatatgaaccgacttagggcggccatgcaaccggtgacgcattgcacatccctaagcttgctgggggggcgcatccgctctatagctcgtatcttctcggggttggcctcaatgcctcgggcagagaccaagaacccgagaagcttgcccgcaggtacaccaaacacacacttatcggggttcagttttatgcgggcggagcggaggctctcaaaagtttccgctagatctgaaagtaacgtttcctggttgcgcgtctttacaactaagtcatcgacataagcctcaacattacgtcctaattggctacccaaagaaattcgagtagtacgttgaaaagtaggacctgcattctttaacccgaagggcattgtcgtataacaataagttcctatgggggtaatgaacgcagttttttcctcatcctccctagccatgcgaatctgatggtaaccagagtatgcatctagaaaacacaaaaggtcggaccccgctgtggagtcgacaatctgatctatgcgaggcagggggtaaggatccttaggacatgccttgttaaggtcggtgtagtcgatgcacatccgaagcttgccgttcgccttgggaacgaccaccgggttcgccagccactccggatggatgacctcgcggatgaatccggcctccagaagtcgcgccacctcctcgcggatgaaggcttgacgttccggggcctggcgccgcactttctgccggaccggccttgcgcccggccgtacggcaagacggtgctcaatcacctccctggggaccccgggcatatccgccggtctccatgcgaagacgtcagcgtttgcccgcaggaaagagacgagcgcgtcttcctatttgccatccaggagaccaccgatccgtgtggtcttggacgggccgtcgcccagggcaacctccttgaccgggacctcatcgcacgtgactatccgctgcctcggggtggcgggggcggatgtgccaagcctctcgtcgccaccctcgggcttggacacgacggcgaggcggtccgcgcgctgctccatacaagcgagcgcgactttgaggtcgccatggacagagatggggccatcggggcccggcatcttcatctggaggtaggcgtagtggaccgccgccatgaacttcaccaacgcgggcctccccaggaccgcgttgtagggcagactgaggtccgccacatcgaagttcacccgctccgtgcggaagttggcgggtccaccgaaggtgaccggaaggtcgatatgacctagcggccaagtgtgccccggcgtcacaccgatgatcggctgggacggccggagcatcatccccggggccttgatggcatcaaaggctgcgggggaaaggatgttgagggctgctcctccatcaatgaggacacgccccaacttcacgttgcaaacggtgggagaaaccaccatcgcaatctgccctccccgggcaacgcacggtgggtggtcggtctggtcgaaggtgagggcaacctccgaccaccgcgcccggcgcgtcgcctcatgagtaggggccgcggccagaagctctcgcttcatagccttgaggctccggcgagaaacgtgagcacacgctcctccatcgacagtggcaatggtggccccaggctcttggaaacctaggtcatcatcgccgtcatcgatgtcctcggcgggggccttctgcttggcctcacttcgccgattgccggaaggaaccgccggggacttgccctctcggcgctcctgcctcctctcttcctcccacttcctcgtccgctcagccaaacttttgactgcacggcagtccgcgaggtcgtgaagggaagtgttgtggacggtgcaccacttgccggctggacgctccctgctgggagcgccggcctttttctttttgtcgctcgcaggcctccccttttgggtggcccgcgaagcgccctcgacggcgaggacatgaccctcgtcgtcggaatggaccgacctcttcttcctcctcctgtcacgccgccctgtctgagcggcggatccgggggcggctgaagctgccactccggaaccggaggggttccaggtccatgcctcctccttacgagccactcggtccgcgagctaaaaaagctccgcggtagtctggggctctttggaggcgatcttttcgagcatgcggttgtgccgcacaccccccctgaacgcgtaaatcaccgcgtgtgcagggatgcatggtatggtgttgcggacttgacagaaccgctgaatgtacgatcgaagtgactcatcgtcccttcgctgtactgcgtgtaagtccgcttcctcaccggggcgcggatatgtgccttggaagttcatggtgaactgttggcacaaatcctcccaagagtggacagatgcgggtggcaagttcattagccagccccgcgcctgtcctttcagggccatgggaaagaaattcgccatgaccctgtcgtcacccccggcggcctcgatcccggtcgtgtagacctggagaaactcggcggggttgacgctcccgtcatatttttcggcgatggtgggccggaaccttgggggccaacggacattccgaagactcgccacaaaagctctacagccgacaccaccaactaggggcacggagggctggtccccacgtccgtgtcgaggtgacactctggacgaggaagcgccctccgttgcgtgggcagcacgtcggtcattacgccggtgctcgatgctggcgcgggcgtccggccccccatgcagatcttcccgggtcgaaggagtcgacgaaggagtggcggccgaatggcgaacggcagctgccgctcgccgcgcccttcgtcttgacgacgcggagccggtggtagcagcaccagaggccttggtggcggaggaccgcccaccagcatctaggcgctgccgtgcagtcatgatcaatttggccacatcgtccagccaacgttttgctggagactccgggtcatgggcgacgggcggatgacgtaggagcgcgcccgaagcttggagcgcgccctggggcgtgctgccgtcgccgtagatgaggaggcgacgctccccatctcgccgcccttttccacctcctgtggatgtcgaagtcgcggatccttcagccctctcgagcgccttctcccgcctaggactttggcgtggagggggcggtggagtacgagctcgacggcgtgggtttggctccccgtcgtcaccgctcatactcggggagaggccgtgcgcctttgctggctcagccatgaggctgaacaggaaaagcttggtgcacacgaaagagtgcaagagctcagaagatcactcgcagagtcccctacctggcgcgccagatgacggagcgtggggcatctcaccgggagaccgcgctggcccccctttgccggttcggccggggaccctgggtgaaactctaagctcccaatctgtatgtggaaggttcgcgagacaggaagcacagaagacaccggcgatgtatacaggttcgggccgctgagaagcgtaataccctactcctgtgttttgggagatctgtgtatgaaagagctacaaagtatgagccagcctctcccttgttctcggttcctaatctggaaaggtccagtctaagaaaaagctccccaaaatctatctccctcctcagtgggcaaggtcctccttttatatcttaaggggataccgcatgcaccattctccccctctccctggggacttactctaccttttcataaatggatggagatttgcatggttgccgtccgagtcaccttctgatgggacggcccacaaccacctccacttccgcctggagcagacgcgtcgtggaattgtggccgcctgctgacgacatgaccggagtcagaccagtcacgtcggtcattcttgtccaccacgtgtcagcttagcaatctatatgttcgcccttcttcagacaacattttgcttgtaatggttaggatgaagcctggcatatatctggtcaagactaacgtgccatctctgggaggtaacacgctagctccagctagggtcgagtgcctagaagccctcgtccttacgggatggggcgaggtgtgcgtcagaccgcctgccatcacctaacccgcgatctgaccggtctgtgactggtcacagaccggataaaagagtgcactacactgcgttgcatgcgtcgtgacacgctcagccaaaccacaataaatgtggttaggtgagggcgggcgggctgacgcaccccatgcac

SEQ ID NO: 25027 - DNA, 12390 bp, Oryza sativa
ttcctgcagccccactgtgctcacctaacccatacacgcggagcgaaaacccacgaggggtcggggcgccctggccctcggggccgaggggggtgcagcccgaccccctcggggggactaagaggagggcgaacacatcaccctcgggcccgacgtcccccgaaggtgccaggccacgtggacgattgtgtctgcctcaaacctctagtcatgatactcccgatcccatgtcaccgacacatgtgtccaaacatttgatgtgacggaatttttgaaagtttgaagagaactaaacactgtctgaaatagaagtcattaaatgtaaagaaaaccgtgatacatcgaataatcaaataaaggggtggctaaggaataagaggtagcgactgaaatcgcttttaaaatctataaaattgttcgatcttttgaagtcctaaaataatgagacagctatttaacaaaatataaaaaaactcatatgtaaaagaagataattttatatggacggtagccgcgcaattgcgcgggccaccctgctagttaacttaatgagtaatagaaaaataaccttcacgttcgctctcacaacataaaaattaccacgttaatccgagaaaaatcagaaaaatagaaaaaagtcaaaaggaaaaggattgttaaaacgcgtgataaacttactcatgcatgggcataagtcataacatggaaacggacaagagtcctttttgaaaaatgtggtgtccgtatagatatatagatgtggtgtccatatagaacacctgtgcatggaaggaatctttagggaaaaaaataagcaccgttgctatattcatatacaacacaaattactagcgatttagtacctatatatatgtgttggctcattgcctttttgaacagtatattacatctcataagtaggtaggcgcaagcaaatcgtaaatacaaagcacttcaaaggagaaattctcttaataatcggacaaaaagaaaaaattgagtctatttagaatataaatagctgaaattcaaaattaaaaataaggatatttgaaagaagactatagtctatacagatatacaatttaaaactaattaaaattcggaattaataaataaaaaaattaaaactagaggttagagttcatatagcactagaatttagaaattaaaaaattcaaattaaaaatataagtaatattggaagaagagtctagggtccgtatagaatataatttagaaataactaaaatatagaattaaaaataagaaatattgaaagaagggtttagaattcaatagaaatacaatttataaataatggaagtacaaaataataaaaaaagaaatattggaagaaaagtctggagtccatatagaatataatttagaaatcactaaaatatataaaaaagtaaggaatattgaaagaagagtttatagttcaatagaaatataatttatatataatggatatccaaaattgtcggagacactccggacccatcattatatatgcaagatgaagtgaatcacttcaagtcatctaacacacataatgaaacatccgacgtctcgagagaaggatattggcgacatgggtggtcctttagcctgctagtcaacttcagcctgagatgtacccgtcaaaccacacgaaagcggcgaccagatatgttacacattccgacttgacaaaaatggctaaagatatatcacatctcaaatattcttaactcatactcatgtgaatctagttcccaagatgtgcactagattcacacttttatctcaagcatagatatacatagcaaatacatgtaagatgaaagagatcagtttatagttcaatagaaatataatttatatataatggatatccaaaattgtcggagacactccggacccatcattatatatgcaagatgaagtgaatcacttcaagtcatctaacacacataatgaaacatccgacgtctagagagaaggatattggcgacatgggtggtcctttagcctgctagtcaacttcagcctgagatgtacccgtcaaaccacacgaaagcggcgaccagatatgttacacattccgacttgacaaaaatggctaaagatatatcacatctcaaatattcttaactcatactcatgtgaatctagttcccaggatgtgcactagattcacacttttatctcaagcatagatatacatagcaaatacatgtaagatgaaagagatcgaattacaaataataattagatacacggccgaccggccaaataaaaatattgaacagcgaaagcttgactacccaatcctttcgcttgactacccaatccacaggcacaccatttaggggtttaccccattaagttcacgtcctaaaagaagcagtcgatacccgcatcactcaaaattagactaagtctataacctgcaagcaaatgattatttcagtagcaagagtcagtacattatttctaataatgtactggcaagcacaagacaagcctaacaaactacatgcaaggcatataatcaaggaagaccatatgtagttaaattttagcataaagcaagttttagttacataaaacatttccaaacagatttgcttttgaataaaattcagcaagcaagtacttagcatatgggcatcaaagtaggcattaatcaagtataaatatgcacctcagtgccatccatggcagcaaggaactaattctcaaatctctacataatttgaaggtaatttcagcatttagaagaataaatgcaagtctatactcaatagatatttacatgccgctcatgaccgtgagtagaccgtgagtatggctaatcgattagtttttataactctgcaaagtttggacagctttacccacaagatgtgaatcgctctagtttgtctggtacccgtcggtaccaccacactctacacattgagtgcgatctaactctacacattgagtgcgatctagaggtcacaacgaggcttttacattaagtattgtctaaccttgcatgagcacgataagtgtgaatccatcctaggcttaagtcctagaacctttaggtggcgggcacacgccttaaatctaacgctgtggcggcgaacacatccgttcccccacgaggcacgttatcgttgtattggacagacttagacgcccatgctgtgaggtgaaacagtacactcgtcccttcacagaaatacacacagctaataatattggctagctctaaaattcaacacacacatgggtagttcctataggtagcccacggtacactcgtggcccctacctatactacaacggcctcctgaatacaaggttagacaagtgcttaacttaataggccaaggtctccccataaaaacatatatggatgtacggtaaacataatgaactgacatcgagtgaaatccttagatcggtttgggcacactctccccctatcggtacacaactaatcaccatatgtgtaccacttgaggcccaaaccttaaatccatgttttccataattttatttgttaaaaacatcaatgatcaagttctgttcagattatcataaaaccatttttcatgtttgtaatgagctcataatgacaagtatttccaatctaagcatggtaagcaatatagtgtcatggtgacatcaaaactcatatttaaagtggtatggatataatattcctatggttaggagagagggatatggctatatgtggagttatggtgataatgcaagtaataggtgtttgtctaacaagttttacaaattttaatggattagtgtacaatcgacatgcaagatttgcaaacattttcaataacctccaaaatataagttcaacttgttcaaagagagagggaggtgggacttgccttgttaccgggaaatatcagcacctaattcacttcttcaccgtttatgcaatcatctatataaagtacacgttatgcaattaaacaccaaaatatgtgaaaaatccaaaatgctctaaaatgcatggtttgtgcacagtgagtaggtgctggtctaaggtgaatttaggtgaatttcactttatctcactccatttgagagttatgaattttagaagtttgcttcgatatagtgtagtatttacttaggtactgctatgaaatgcttttgtaaggtgatttttttattaagtttgagtttgctgaggtgacgatatgtgtcttctaagattaacacaattggtttcacaatttttagagttaatatgaatttctaatgtattttggaagttataacgtgttgtatgtttatagtccctatatatgcttgatctatatgtttcatatccagaacatgttaatttatgatttggctaagtaaagtgaatgattttattatttaacctacctttaattcacaagatttagggcttacattatatttgtttcatatatgctaactagatgtgacttatgttagtaacttgatatatatatatatatatcaactatggattaactatatgagttaagtgtgttaagttttgatgaaaggaagtggaactttatcttttctggtccatttagctttatttgttttatttgaagtttgtatgcattatacatatagatttgacttaatcattagtatgtgattactatctactttactaattcaaggtttagagaagttttaagtacagagggtgccacattttattttatattagggaagggcacatttgatggttctatagaagtttggttcactccatttggactaaagatgaaatttctacaaattttacaatttgaactgtacactaggttcatatttccttatataaatatttaggggctattcatgtactgtaagtgtgtatttttattttataactttaaagtgcattatttggtgattctacagaacttgagtttactaaaaaatgagttaaaataaatgttatatgaatttccaaagttcagcttgtctaaaactagttatttagtagataatacttttagaggcttttaatgcaaagtaagtatgtctttttattttacttttgcatagagaatatgttggtgattctgtagaatttgattttaccgcaaaatgagttaaattggattttatatgcattttataatttcttacttgttttatgtttcctttttcttagataatatttagtggtagatcttgtactataagtgccactttttatgttataacatgaaagttcatcattttgtgaatccatagaaattgattttaaggagttaagatgaatttgttatgcatttttgaagtttatagtagttttcaacaattcagcacatgtttaattcagttttcgttaagagtacttcatattcttatataattacgagtaggtcctgctacagtgttgtgtgtattgtatctttgcattacagaccctataatttgttcaattttcaaagtgaagtcctgattccttctctatcgatccagcagtagagccgccatgagcggcacctctgctcgccggcgccggcgacaaacggtgacttggttgggggtgcgaccaaaagacaaaatgaagagaatgttactgcgattccattcctctacttttctcggtcgttggtgaccggagttgcgctagcggcgagtccgagcggaaggtatctttgggtgacggtgcatgtgtgtctacggccatgtactcgctaaatgcgtgcatgcatgtgagtgctagaggttcaagggttctcaccgaggggcctgacaatgctagcaaagcttggacggcagcagcagctcgcgggacggcttggaggcgatggagagcttggcgtcacggcgatggctcgatccacagcatgcatgccaaaatcatttcatgcaacatgtgaaacaccatcccaggttgctactactgcaagcaatcgaccaatggctcaccggtaaaggcggagtcggccatggcaacggcggtgggcgccgaggaagaaggggtttgatctccctctccggtgcaccattatccggggttcttgagggtaaatggagaggaggtcgtggtgatgaagatggcgcggtggctcggcttggcttggtccagagtggttggaacgacggcgatgtcgtgcggcggcgctccgtgcgtgctccagagcttccaggggcgacgccgcgtttccgctgatacaagggatgaaacaagatggaatcaaaagagggaatgttcggcatgggaagtagattagggaacgaaaaaggaattgagacgaccgtggcttgttgacgaacgcgtccatcatcttattcgcggctggtaagggagatgagggagaaagggaaggtggagctcgctccctctcggtgttcacggcattggagtgaagaggaaagctgggcgatgctgctgaggaaggtgtaggtgaggatcggcgttgtcacacaagggagcacgcgtcgagcatgcaggcgcagctctctttctctctctcgttctctctcggctgctgagcggtggaaagggagcgacagaggtgaaactggctccagaggctgccaagtgggccctggttgatggaaccaagacaagggagagagagatgggtatgaaactaagtggagatgagttttggacgaatttcagaatttttctctcctccccaatttgtttattcatagtttaatgtgtggagtagataaattagagtggatttttctggaggtagatgtatgtacctagtttctattttctttggttgcacacaaaaattatgtgtagtttgctcacagaaaaatagagaaaagaggctatgtagaaactagtttgaatttttaggaggtctaaacagaggataaaaattctggaaaaaaatatatttattcattttaaataatctagcattttaataacttattttacctatatacttctatgcagtttggtgcatattttgatgggttaggattttagctgattaaggtttataattagcctattagttgactgcattgactgatttatttgaggtatcaaatttagttattaagttgtaccaaaattatagtgagttggatatattgattagcacttgcaagaatttttccatgattttatcttgcatgatctattcttgataatttgcaaagcttatcttcataggtatgtttacactttataaatgcatctaaattattataaggattaattatgtttggtcttctcctaacctgaggtgatgttatttgtcttcattttcatgcccctataattattacacatgaatgtctttaggtttgcttagttaagttatcttgtattcatgttcatgaacctaacatgaaatgaaaaccaaaatccaaattacataaaaaaaactcaagtcaaactaacgcacttatgtatatgcatgcacacatttatgtttgcactcttgtcttaggttataattgaaaaggttttaatttgttctcaatttttattcatgcaagagttcgatcaacttcatctaggtttaaaataaaaatttttggttcacaaaattaaagaactttcctttcaactagttttgaaaaaaattgcttagccctagaattcgggtatgttacaaaaataaaaaacgaacattagaataagaatgtagagtaaaaacagtaatttagaactaaatgaaattcggaataaaaattaaaatttaaaagtatagaaatataatttaaaataactaaaattaaaaattaaatataaggaattggaagagaggcggtccatgtaaaaatacaatttagaaatgactaaaactaagaattaaaaaaaatattgaacggtcaaacatgcgctaaaaagtcaacggtgtcaaataaaacgacacggagggagtacaatttagtaataactaaaattcaaaattaaaaacaactaataactatcacgtgtatacaatactatattacacattagtttgtttggtcatattagtacaaaatttaaaattatatatttatattttaacaataatatatatatatatatatatatatatatatatatatatacaccagctctagcctagggcagtgactaggggtctagtcaccagatatgaggataggtatgcagtatctatatgcaatcttggatgtgagattagtatgtgacaattggatggcaatccaggttgttaatttttttttatattattatgcaaacataaatgcagtacaggaaataaagacaagctgtaaatacgaattatatacaagatatagaattagatattcagaacatagtaggtttatatagaacggttcaggtgttcattcatataccttgataggttgaaggtagatccttctgaagattacaccaaggacttggtacaacacgttcgtaattatacaggtacaggactctcacaaggactcttacatagactctcacacttagactctcatgagtcttttatttaggttatactatagtactaacacttagatggagtggagtggagtgtgatggctggtggagaggtgagaggaatggttgagtgagatgtgttgtgtgtgaaatgcgatgcctgtggaatgtgatgatgagccccttatatagcgctcggtagagaatctttatgatatctcttcttgacctcaaagagtttatgatacccctttagactttatggagagaatctttggtgatgacgctttagacctttaataaagatgtcataatatcgccttttgactatggactcatcttatctggaatagtgtagattccttatcttgaatagtgatctttgtcggggatgacaagatctttattcattatcttcgttgattattatgggtgctgattgcaccgtgtcgatctctgacggctctgttttctgaaaccactgagccaggcttctgtagtaacttttcttggagcattcattttcaaaatctggtttaattatgcgccctgctcccttgaagtattcataactttggttgtaatatttgctaataaaaatccttgtgatcttgttttggaaaaccggctgatattcataatctgtggtgatagcttcttcaatttctgcagcttcagaaaataatctccaattttcatgattagcaattgttgtatatatttcttcctcttcatccgatagtttgctagtaccgtcttcttgaaaattaaattgtccattcatgatatatatataatgaattgctggacgaacaggtggtgtgaattttggtggtatggaggagaagataatcctgtatcttccatgtccaagtctcctgtagacatctttcacagcgcttcctaaatcagattgaaggatctgatcgagggttgcatagatggaattcacaagaccatgatctataatggtttggagagatatttcttcatggttgtatgtgggtagattccagaatctttggagatttatctcagctttgagaaccaggaatctataggatgggtcagagattgcctggtcatctagccttaagagagggagcatatatatgattactcttatggctgggtttctttctcttccttctaagagatcaaagaaataatcttggagtccaaggaatattttcatttgtctctccttaaacttttgccaaacaagattgaagatgtcttgcccaaagcaggataaagtttgctccgtcttgaagcttaatctaggttggagattttcgtatgtagaactcatgggattttggcttttaagtttcttttggcaagaatctttgtaggcacaagatctacatggtgcttttggctgggtccggagtatatattgtggaaggaatgaattgggatgattatgcagtatgtatagtgtttggggaatggtatcatgtctttttgtggatgatgatggtttattatgtggaaaagattgcaataggttattgatatttatgtggaaaacaaccatgctcgaataccttggtattcttatctgttgccatagattgttcaacttccatgggaagtttatcttggccatcacgggatttctcctcgcgataatctagtaacctctcctcatgatgagggatatcttgtagtttagcccttttttctgttatcttttgatctgaggtcacaaagtttttgaaataatatgctaggccatttaaggcatgagctttttcttttttgttttttgtctgccacaagaggtttaataacccttgttgtagctctgttactctgaaattgtgattaaatcgttcttcatggcctctgggcagttggggcagtctccatgaactcatattcgtgaaccattcagacttctgtgaagccatttccttgcatatatattcaaaatttttagtagcttttaataaatatctatcttcccatgatgtcttacctgtcaagtccatagattttggaagatatgatgggaaagaattgtcatgtaaatatattgtattcacaatttgttctcttttggtctgaacaagctggtcaagaatctcatctatgttagacgaaaatcttaggctcacctgcttgcccattatctcaaattgaatatcttcgtttgtgacaaggaagggacgaatgagtgataaaaacggtgttcctaaaataacatcttgcttaagatttttaacgattagaaaagatgttttaatgcaaacttcagatatgcaaatataggtatcagggatttgatattctactgttaaaagtcctccatctgccccacgaattctgtgggcggctttacggaaatatttatgagggataataccttctcgaatgcaattgacatcagcaccagaatcaattaaagtgatatgctgaaagtaggatccgtctataaaacgatacataacttctgtgtaccatttttgcttcatttatttttgaatggttccaacaacctgatcatcttcttgaattggttcgtccttttcttccatatggaatccctcttttaattctaacatgtatagacgctttcttatttcttctaaatcttgtttcataattttttgttcttcgaataggctgatcaaatctggtttctcattcttctttttctgttcatctaatcttttgaacacttcatcaatagagaggaatttgctcttttgaatatccttttttagtttatccttatcagtcttgactcttgaaaggaatttttcgagaactcttcttttttcttctggatcttgaatggtttcaaaagtatcgagaacaaattcttctaaactggttagaacgagtatattttcatcagactcttcttctgaattatctggctcataacaagagcaaccactgtcttggcagcaattaatctctgcatttttttcttcatctgaacttgagtcattgtctatattatttagtattgcttcaagtttttctttaacatcttctgattctgaatctaacaaggcttggatctcttttttaactttagatttgaaacatctgttagctatgtgtcctttcaagccacatttgtaacaaatggtttctttgctttcagtgtcttttgttcttatattcttattgtaaattctttttggttttcttttggtagcttgaaagctcatcttgcttttatcatttgattttgtcattggtttggaatgggtttttctttttctatggacataaggatcttgaaaaccaaactgatagcaaaaatctcccatttctcttttaccaagaatcctttgttttttgagttgatctttgatttttaggtcattgcaaagctcagcccccaccaattgtatcttttgtgtgatttttccaatatctagatagtgataatttatactccctcccccttcttttcttagggaatttctaaccttttcagcaaataaaggaggtaaaccagaaatatatttttctttatttccattagctatgcagtcattagcatacataatcatttgatgacataaagtaaagatttgatattcagtaaagccatctaagttccattctacaatttctttgccattgtagtaagtcatattttgaatctgaggcatttcctcaaactgtaggtctgcataagttggtcgagggtaataattcctagttgtggaagtaagagtagaaggtttaaaaatcttattgaccatatcatatttttcattatcagaaatctcattgatatttttatttacttttaaattatttagttttaaggctagctcactgactagttcttcagaaattgcggatccaaaagccttttgttttccaagtttgatgttaggatcaattgttgggacaaacataggactaacagactgagaactagaagactgagaattagagggaatatttatctttacctcaggtcttcctgttttgtagccttc

SEQ ID NO: 25028 - DNA, 18513 bp, Oryza sativa
ttcggattttggctcttttttcatcatgtttttttctttgaagaattcttcgaagtgtctgacttggctactttcattccaatcaaagaaaaagatgttcttcctttgttctctcatttctttgtgccaaagttctcttatctttagtctaaatggttcatcgaccctttcaaagtatcttttcatcttgggtcggttcttttgaagcctgagttcttttttaagcaaatctttatcaatttcaaactcatcctcttctatggcaataacaaagccaacatcaagctcgataacattgatatcgaagtctgagattgaaggttcgtcggagttgtcttcataggtagcatagacaacattttgaggttttgtcctaggcctagaatctagactgacagaaggtctagactggagaaaggctttttgttttgaagcaaatgttatctcaacatctccgtctggtgtttcaatcaaggattcgacttccgattgatccatagacttaggttcaacagcttgagataaaacccatttctctggcagggtgatctcatcccattttagggttttgggggtagtacatctattattaggattggtttgaaggagagtggttaggccttttggtgtataatgtttggcacaaggtgctaaagttgtcatggctttgtagtaaactctgtaggtaacggagatgttttcactccctggttctagttcataaccagatgtttgtaagttgagagtgagaactttatggatatttgtgtctgagagggatacagaaaaatcaggaaaggtgttaaaataaacaggaccattactgaggctggcttccaccatgccaagtaaggaatctttgaaccttttatttctgcaatctcttagacaagccagaacagagacgttcaaaccctttctagtcaaggatctgatagcaacttgtataagaccaaagtgaaggtagtgatattgatgtttagctcttatagaattgatttctctttctgaaagaagatgtagggtttcgtgcaaagaactaattggaatagttttttcaattgttttaatatagtagtcactaagtaatgaaaaagtacctacatgatatatttccttaatattaaccttaggaatcttccagttggaaatacttttctcaatatcctcaaaagatatagatgaagcattctttaccgacatagtgccagcagacttctcgctactgcacaaggctacagatcgatcagtggctcttcgtgatctaaccaaccaagacatcttatacgaaagataggaagataggtaggtagttaccagacaacggcggggaaatctcccacaattatgatcaacctatttggatatgatgtgttccagtcaacggcagggaatatttcccacaattaagttcaacctttgcctttgataagtgcccagtcaacgaattacgccgacaaacgccttctgcggctcaacaaggcaacgcgacttcaggcaaccgatcaaaggttcgggaactccgcgacttcagaacaccacaacaccgttcgggatcaccgcgacttcagcacgctacccgacccctctcccccccctttcggagaagatggctggggaggttatatatatatatatgtgtgtgtgtgtgtgtgtgtgtgtgagaaaaaaatataacaatgctagccgcgcaatctgcgcgggccaccatgctagtttgtgtaaagtgatatatctatatgaggggcagatatagcatgtaagcatgattagattaactaaatatattaaaacatcaatatcaggtaagatcggctgaaacctcgattctacccttattggcaatcaaaaggcaggctagagctagagattcaaatcacaacttggtagatcaaacttaactcatgcagcactaagtatgaaaacaagcaatatatctagacaatcaagcccctgactgattttcatggtggtagatatcttagctaatctaatcaacagaatgatttagccgatactggcataaccctagaaaagatctggtcgatatagataaattgaaccattgatatagattaactaagatatatgataaacaatgattatattaacaagattaacatatctaaaacgatataataacctcaataatgcaaaccactgtgacaagcattacctcttgtgaggagatcgaaaccaatgctctaacttgaagaaagaactcgtcgaaaataactaaataaaaaggtggcgatgcgccgagagtgtattgaacggttgttgttttcttatatggttcttgggatatatttatacccatagtacaaacttgtccatgatggacatgactcaaactttcctaagtcacagaaacacacaaacaagtccttacggcggactcttgcaaaatctctaagaaaccgacattaatattcctaattattagatacaattgcctataatggactgtatccttgcacggcaatgctttgcaatccaatccgggcccattgcgaacccaaacacacctgtatcggctactctatccatatcggcttagttaagtccgactctgttctagccgatgcacaaccgaaatttggaaacaactacttctccctcaaaatccacctcgatctgttcttcgactccgagtatctctccaatttcgctgttaataggttggtaaatcatttatgagtttatttactcagattttacaccacatatgatatatatttccaggtgtggtgaaaccatctgtcttttagggacttaagcatatttgttaaagcagtgcgcgcatggtgtgtgctcgatactttggaaatttctttattcacaacatacaagcttctttatagatgttttgttatttgaattttcaaagatgtagtcaactttaggttgctcgcgtcatattttataaagaagtcggttttatcacttgagtcttgtttactcgggggtttataatgcatatgctattattatgctacttaggtggcttaaaaccactcagttggttgatttattcattatctgactatatatttagtttgttcaactaaccacataggcggaggctacacctattaggtgcatctagtcgatgcacctgggtatatatttaattgttttttattcttttcagcctttcacaaccttctgaatagataaaagcactcgggagactatgtcaaagatgatagaaacactcggctttggagtaatctagctcgggagaaaattattttttcgactgtgaaagtctcacgggctaatatggagattatgggtaccatatacctacatggctggcttatccgactggatatagggaatatgttatatctatgaaatatgtaacggaccatgatttgggtattacgttttcttgtgtcttaaggaatggcctaaagttttgattcggtaatattataaagtagattaagtaaactgatgccgtatccggctaggttcctctcttggtaacactgcccctcaacctatataaggtgggcagggagccctccaagggcttagccacaattagatcgtcagatcaatatacacccggtggattcaaatctccaaacaggaatagggtattacctctcattgagagggtctgaacctgtctaaattcttgtcttcgcatccatccacttttaggtctcgtacgctacccccttttattattgtcaatttccagtttcgacaacttttcaaccatgttttctattttatcttagtttcgtccatctttgtcggtttgcgctgtaaaccgtctatcctcgccacgagagtgcgattatccttttgtaggtttgtcccgtaaacctttcgtttgcccacgaaacgagtagttttacttatatcgatctaaatcagcctagaggcttattttgatctctagatctgctttgctagccggtttagctttttttacaaaacctatcttgatttagcttttgcgaggttgagatggttggcgactccatatcaccgcaagtcgtttaagtgtgtcgatcggattttgcgactttgccaaaagggttgccaacaggattattactaagggctatcaagagggcaactaggagaaataaccttcaggaggctacttgtattggtttctcttcatctagctgtgaacattcaaacaagttccagcttaaaaaagtcattcacatagaagggaagataccgtgctgtattgtttgaggatgggaacagtgtggccgtgcgggagaacgactctgagtatctgactgccatttctattgctgaaaattttaatgaatcaggggtacaatggtaacctcaaaattcctaaatcattttttccttttcttttctatttgtttaacttggtattgtgggatccactaaccatctaaaaaaattcccattatcttaaaaaaaaaactgtcatccataagagggacaaacgatggtttcatttgaaaatatcatgggtaaatccttaaacctaaaaaataagagcaaaatcaaaaacaaaattaaaaataaaaattggggtacgaacacaattcgttccacatgacaccaaagatcagactgcacatatattgcttaaccaatcaaacgaatgcaattgtttaatattgtttgttgctgtgctttttaatttattcgagcaagtccttcatttgttcaatctgtttagactctgctgaaaattgtcggcatgcgcatttatcactcaaggtataaaggaagacgtgcggtagagaggcacgcgttttcttttaacacatggagatgtaaattctctggggaggcttacggatcgggcgcccgatctgggagccaaaaaaatcgggcgcccgtccgagccgtccgatccagcgcccctaatctcgtccgtccgcgcgcattaaacaggagcacgacacattagcatgacgtcagcagcttggatgcatgtaaaactactctaaactattttttctcttaaattatttatccaaatcatgatccgattgcaccattaaatgtgttgcaattaaatctttaaaacaagaccacacatggatatattctgatgaaaaaaaaaacttattattgagttatttttaaatgttgcacgctatttcacaaagtatatcggaattgtttcactgagtagatcgaaaatgttcaaaccaccacgtcgacagcagctagataggctactccaaatattatactggtgcgattatgatgaataagagtaacgaccggctttggctaacaggatccgaacctgtataaaaatcctcgtccccatctcttttacctcagtctcgcatatatcctagtaccaacgatccccatactatgcaaataccggaatcgcgacatcaaacgtcgacagtggcgcgctaggtagggggttttggtgctttaggattccgacgagatgtgttcaaaagatggattcttcaacaagaagctactcgttgacttcggaccagaaagatccaacccagccagaatacgtctcccgatgagattggaatcatcttcatcagctatttgattcggcgagatcaatcaagcttaagatgtcgctgccgcggaggacatgcgtctgttcggtatttccgaccatttgacgatcgcgaggatgttgccgaaataatacaacacgccgacacctcgagggaccgaaaccgactactatgctgatcgactttacgcgtggcctggtcggactcggggtgacaggccggatacaccgttgtccaagatcgccacgtattgctgctcccgacatgtgcacatgcatatgcagactcaactaggttgtatccccgcggcactgttataagtataatgagaaataaacacgtaaataaaagaaaaaggtatgttgacaaaagaagaaccgtatggagacaacctaaacattaccatgcaagagtaacaaagttatatgtgcctaaatattagtgttagcatattagcccaattaactgtatagcacacgccaaaaatatttgtagttgacagaaattgcgaaagctggacgctatacagcatcaacccatcataggcataagaacattgacatcaggccaagtgggcgcgtgatgttggagcgtatacaacataatcatatattatgcatagtgcattgcatagaaaagtttgcgtaatagcaaacatataaaaagctatagcaaatgatagtaaatggcaacagttaaagcacaaacctcggtgaagctcagaaataacccaagcaaaggaggcacattcagctgtgtcgaccttggtgtagattctgatctctatgttaatgttggcactgctgatagcagcattcgtaaatcacagtaatcagcaaattcagggagagtaagcaacttgggaaaacacgcaaggaggatccttgtactgattgggagatttgggcgcggacctttctgcggccagggaagatcgtcgaggggaatagataagtacagaaacatcatgccaagtcagtcttagatctgaaacttccactcaagaatttttatctttccctcatttaaaccaaatcttgattcctgaagaaacaaacaaacaaagaatgtcattccatccacagagaaatcaaaagacaaaaatatttctaatcacaccaggtcgccaactgacaaagcgaagcatgataaataccaaatacagtgtagaacgggaatcaacaatgacaaataatttcatataagctactaatgtattgataggaattcaataaataatatggctgattctaaagattagctttccgtttgcaatgtagaccactgactttcttatatgtagacctaacaaatacataagtacatgatttctccgtgcaaacagtataaatttaagaagagattatgtacagtatgctgagctgtattacatcttgcaattatcacataattagttcaagatatcattcgtctcagcacacaaattgcgataatattggactgcactcgggcacgatgttcagactatgcactcacccaaaaccaactggttcttgttactattctcagccattgatgtatggtctgacctatagatggatgtgggaaagcatgaccaattcatcagacagcaaggaaggaatgaagggaagacatggagagcaggagcatacatagcctaagtcatagaagctaaaaagcatgacaacaattgtaagaacctatcggcatgaccgctaaactaaattaagacacattacaatattagcatatgcaatcagcacattgcaatgatcctcgtgagacagcactggatgatttgtattttaaacctttattgatagtctagtttaaatggctcaacaaaggtcattccaattagctagtttgttccatgcattactcagcgtaaaaaggataattatattttgttagtgctttcctttttgttgtcagttctttatgtcagctctaccaatgatagtaacagtaaccgtgcatcacacaaatcagcaatggtagtgaaatgagtaaatagtccggcagagcatagccacacgcaaggcggatcgaggggcattaccttgtagtgactgggcgcttcggtcggagcatgaggttgcaggggctgagcggcttgtcacataatcgtcgagcgagcttcagggggtgacggcggcggcgacagcggcggtgggaggcaatggtagaacttcaggggcacagggaaggattttcgataggctttgatgagcaggggaacagtttggtgaggtggtggggaatagacctcaaatcggcggcggcggcggcggcggtggcgagccaagatttacatcggcggcgacggcggcggtggcagcgacatggatctcctaccgtcctccagcagccagatgatagcacgggcgttaccggcggcgtggttctaaagggacgggaaagaacgatggagcagacaaaagacctaaggctcgtcgtgcatcggacggccagaaacatgcatgggctgatccaatggccagcaagcacatgaacagggcaacagtagcgtggttgcgtggcaacagaagcaacacagcagccgtacctcaccaaaaacgcccaagcatgcactggtttgccgtcttatacatgcacagaagacaattcaacggttaccaaggataattatgataattagtggattaattaatttaattaatctaccaattccgtagatacatccagcatgtatctacaaaggtacgcaataatttatatacaatttaccgtacttatttttcagatcatacgatattatcatatatatgatttattatgtttacctagagcatgttttttatacaatatctattatgtgagcactccctatattaggcctacaacggtttaatactgggggctcgctttattttcttcagtataaatcatgcttatttacggtttacataatgcctgatatttcatctgctcgttatatcctgataatactagaagatccatgcagttttttgagtacatgttcgatattctctgctatatgtcttgccttctagaaaatatttttcaggaacaactgagcactcgagtaggttgtggtcgagcactgttgatgaaaaaaatcgaacacaccagcctgggagatctgcttagctttagtgcaggtccaaaggttgatgggatacgggcgtaccagtcagtttgatcctgcaactgacaagatatgcaaataatagatcaaaacagcagatcggcttacaagccgatgaagtagttccagccgatagctgataatagccgatgccgataccagccgatagcgatagggtttaagcaatcggctatatgtccaatgtagataatgatataaaggtgatcggctgatgatgataaataacaataatatatcaacataatccagtagaaaccaatcggctaacaatatgatgtaatagaacaaatactgatccgaagggtaaataatacatcggctggaggtccgatgtcataaaaaccacaggattagataaatcaatgaaacctttgttgtcattggctaaatccaacttatatatacaatccttataagccgatgcaacgtccagataattcatcggctaaaacctcgatgaaacccttattggcagtcaacaagcaagctagagattatggttctaagcacgacttagtagatcaaacctaactgatgcagcactaagtatgaaaagaaacataatatctagacaatcaagccgttgactgagttttcagggtggtagatgtctaagctaatctaatctagcaacatgatttagccgataccggcagaaaccctaaaacgagaagcagccgatagagctaaattgatatgctaagactagattaacagagacatatgataaataggtaggcaaatatatcatccaaaccagagcaatccaagaggtcgaatgtactgattcagccttgaacgacgccgacgtaaacgatacaattgtctgggccagtggaacattggacttaccccttagccggagatcgaacaccgatgcagccccgcgtcaggtgccaagtcccgccggacgataaaataaagtagaaaaggtaaaaggtggcgatgcgccgaattgtattgatcgtgaagatagattacatagacctcgggtatacatatttatacccatgggttgatacaagtccttgtcggacaagaaagaaaccttcctaaagataaaaggaaaagataaagtccttataggacactaaacacactttcctaaagataaaaggaaactaacaaactattcctaattaatagataacttgccatgccgcattctctttgaactcggtctcttctggataagcttcctttagtagatcaatttccttaaccgaatatagcaagaatccgacaactgacgacttgacaactctcatcggctaatctcagatcttcgaagccgatgctgactctaagccgatgactactccgggcttaccaaatttcactgttaacaagcacactccattatcgagaacatactagacaaatgcagagttgtcgcgcccaacctaccaacgaagaccgacgacctatctcatagcactggccatggctggactactcgagaaaaggttgttaacggataattgctcgcgaacgatgtcggcttgatcacccaacattattgcggacaggacatccagatatgctacgggttgggtatgtgagtcatgctggccacatgagatgcacatgtaataaaccaactctagcacctccattggtgttcgagagataattctactcgctggttcttgaaccagtacatggaagtaatctctcacaccgcaacttccattggtgttcgagagataattctactcgctcgctggttctcgaaccagtacatcgtagtaatctctcacaccgcaacttccattggtgttcgagagataattctactcgctcgctggttcttaaaccagtataccgtagtaatctctcacaccacaacttccattggtgttcgagagataattctactcgctcgctggttctcgaaccagtacatcgtagtaatctctcacaccgcaactttcattggtgttcgagagataattctactcgctggttctcgaaccggtaaattgtagcaatctctcgcgccttaacttcagtcggtcgaggtacgattatggcgatagcgtagcggtcctcgcaccacgacttctgatggtcgagatatgactacggcaatagcgtagcggtcctcgcaccccgacttcagacgacttcagatggttgaggaatagctacgactgaacttcgaccggcagcgtagcggttctcgtaccacaactccaaatggtcgagagacacctactcgctggttctcaaccagtcaatcgtagcaatctctcgtacatttacttctagtggtcgagttacgattaccacctggttctcgaccagcggtgtagccattctcccactatttctacttcaagtggttgagttacgactactacctggtcctcaaccagaggtgtagcgattctcccactacctctacttcaacaaagttgatatcaggtacacaatatcgccaagtgttttacctagagatcccttaccacgacgacacctagagttgaaacctatccttatatccctttacgccgtcctgacaaggcctctgaggaacctaagggaacttcggctgaggacgcccagagcggataaggccttgttggatcatgtagagacaaacgaccatgtaagacctggtcatgtaagagttctcgccgtgcgtattaaccaagccgtgtgatcggaaattgagttttccaacttcacggctgggggctaggatcagtgctttttcaactaaggcaggtcatgggtccaagagccttatcctccgagaacgattctccgacgacaaggctagggtttagggagagtgtatgagtcaacaaactgactgatcgaagtcggtaagagagaagacgctcatgtacaaaacattggtctgtacatttaatttactttcagttttccatacatattataacatgtcaccctttgagcgttcgctcaggggctatttctatataatattcttttatgagtattgatttcaggaaaattctattcgacattgtggaagactccatgtctctatggttctacaccaagatcgactaaggcgagcacgacaaatgttgacaaggctccgtcgcaggctctgcgccttctcgatcactcgagaacggttggtggatctcgacaaggaatacggaatgaagaaatggtgtacctgccgagataaaatttcttgacttcaatccaaattctcgattacagcaagacgggagacttagtcgtatgctctgtactttcttagttgacgtcggagattgactcagacaaaccctataggtgcccgcacgaggctgatatgggaagtctaacgttatctctgaactcaccgagaacggtcatgtgagcacgataacagttactccaaggtctgcggttgagaatatgaatttgttcatttgcattgaagtcgggggctactatcggggttatggataccacatacctactagtagttgactaaatctcgacaggatccaccacataccatgtcttatacagaaactgacttcggatatggagggagttctggataaggaaagacaaccagagttctacatggaaacgacaaagactactcggattgtatccatattggtttccctggttctactcggacaaggggacatctatggttataaatacaaggccccccaggaggagaggggggacaataagagctacaacatacaagccaatatacgccaagacaagacgtcggatatcgacttcagggaaaagcacggctagtcccctacggtgtctccggatactgtcaggagagacgaaagcgctatttctgatctcgccgggcacggattcgaggaggaagaccaccctgttctcgactacgtgacgatacttcaaaccaccacgtcgacagcagctagataggctactccaaatattgtactggtgtgattatgatgaataagagcaacgaccgacttcgcctaacaggatgtagggctattacctgactgttcaggggcccgaacctgtataaaaatcctcgtccccatctcttttacctcagtctcgtatatatcctagtaccaacgatccccatactatgcaaataccggaatcgcaacatcaaacgtcgacagaaacatttttttagtggaacaaaaaaatgaaatggattcccttaatagagggtttccatatatttgttgcaacgacgcattccataatatcaaaattcactgcaacatttgatccgtacatagtgaaacattacgagtatactagctgaaacatcgtaaaactactagttgaaacatcaaaaagaccatatgcaatattcaaaaaatatcaataaaaagagctaaaatatttttcgtcgaaatataatcatgtgtggtcttgttgtaaagatttaattgcaacgaatagaaatgtatgatcggatcgtagattggataattaatttagaagaaaaaacattttgaaatttttttaaaaccacaccttcctgccgagcaggggagggagctccggatttttctccctctcccgggcgaccaagcaggagggttttcgaaattctcttgtcacgaactttgtcgcaaactgagctttacacagttcattagtggactctgtctaccggtttcgagtcttcaactcagcatggtgtttatatttataactatttattctttacgcggtaggataatgaggcatctttggtttgttcaatgagtttttttaaagtaaattctattatggtgccgtcatttcgtgatagagaatatcagaataactttactgagtgctgcagtaggggaaaaaaaggcgaattaacacgtgcatacccctttttcagaagagagaacaaagcgcacaagaatcttaataattacacacataacttgtcaggatgtatggttcttgcaacgatggtgaagtattctcatagattggccagtgtaagaatccatcatgggtgataaatgctaccagaaaatcgtctcatcaggggtaccggtaaccaaaatattcgaatttgtttggatttagcgaaaactagcaaagttttgtttaaatttcatgattggcctagaaatttcgttcgaaatttaattccgtccgctcaaaaattatttgcaaaacaaaatagcaaaccttgtttgtgggcgtgaaagttttgtgcatcttaggccccgttccatactccaactccaaacttcagtttcctcgttttctgttagcatgtttttcaaactaataaacggtgtatttttttaaaaaaaatatttctatatagaaattatttaaaaaacaaataaatttatttttcaagtttataataattaatatttaattaatcaggtgctaatgagcttttctcgtttcacgtgcacggaaaatatctctccagttggagagatcgaacggggccttagtccaaccgttggagagttatttgaaggaaaaccatttgagttattagtggtcaacatgaaataataatatatagtgaacgctgacagttgtttaaaaacggagaatgtaggccctttctgttagacgagaagaggcgatcattatcctcacataaaaaactagagagaaaagagagaaagaaaaagatatgccactatcactcgccacgggcacgcttattataaatagccccccttccaggctttgctgcaagcaaccaaaacgtatagaaagcaaggatgtcgtcgtacttccagaccactcaaccgtttagtaggacttacaagatcggtaaacccaagggcggcggggacgggcagggagctggtaataattactttattcactatcaacactaatatatataattgatagtttcattctgcgatatttgtgcgtttgtgaatcgctagagggaaaacaaggatccgacggtgcaggccggccgcgcgtgcggataatcacacacaacaacgaccacgaaccacgagtcgtgcagcacgaacaagctccagcttcatctccggctccggcccccgtctcctactgaatcaactagcaatcaaccaacgcatccatcgtatagatccgtccatcccgtcatgcacgcgtaagtggcactaaatagtactcctactccgtaaatatttcctcattccctaaatatgtttgacatcgttgacttttttaaacatgtttgttcgttttattcaaaaacttttgtgatatgtgtaaaactatatgtatacataaaagtatatttaacaataaatcaaatgatagaaaaaaaaattaacaattacttaaattttttaaataagacgaacgatcaaacatttttaaaaaaagtcaacggcgtcaaacattttagaatgaaggtagtcctaaaatcaccgcaatggtacgcacagtaagatgagcagataattgggacatacgtacgttcgtacacctgctagttgcgctgctcccccgtagtttcgaccggcttcccgtgagatcgaatagcatgcggcccagcatgcatatgtgtaatatgtctttgtaaatgtaaactataataaagactactttatagccaatgtaatagccaattcatataatagttgtttactatactattaatatctggtcccacctatcatacacatattacgtcttagagtccatcctgcagctagctacagatctatagcccgctgttcttctttttcttcctttacctctttaaaatatgtttacagctagcttaaagcctgctattgtacctgctcttactattcgtgtgtatggcaaatcacggcggcctaggagatctgcttcactccagtgtatgtctaaatcttgcttcgggttcagggcgtgtgttggtatttcttaacgacattactataaatataattcccagcatgacgtagaaatattcatggtatatttatggtcacagaaatgatccacaagcgcacggacataccattgtagcgtttcacccggagtattccaagctatcgtatttatttaatcccaagggaagatatgacaagagagtactatgctaatagtttatatattacttgtatacatcaagttttgtgtaggggttaagtgattcaaagggtaggtgacatacagaagaaagaactaagattccctcactaaacaaatactaagctaagtggagaaagaataagaaaagaattcattcctatacttctaatatacatacatctttagtctacacttgctagtatacagtcatgcaaccaatacccttaacagtgccctcctggtgtttcgagagaccacccttggttgtcgagtttcttatgacaacctgtcatgaccatccaacctccaaccggagctaaataaggaggagtaacctccccaggaaagtgtacttaggattatatactaacgtgtaggaatacccgtactgagctgtcaccatcagcggcccacctctactgtcccgcagcatataaccctaattaatggtatccaataatctaagcaccgtgcttatattactaaatactactctgcatccttgcagctgacatagagcaaccgaatactcgaacattaaacccacatcaatgtacctctctggtaagctagttacacagctatatcgatgcaagtataaagtaaagtcgatactcaaataatatgaatggaataaaataccgaagatgtataaagaagaatattctattaattcgataagtcatacaaaagaagagaggaaagctactagaaccatacccgaattctcctgaagacccgaggactaagaatactattttaattcctactccactagcactaggatactactaaacttgagagagggagagagctcttcttcttgagtgtgtgtagaatggaatgagaggagtggtatttataggccattaggtgccttgggagtgtggtgatgctcaagatatccaataagcatattccctcttgcttcacctccttgtgccaagtgtcatgacggttgcttcgggtagaaacggtcacaactgccatgggatgtcgataactaccagcctgtggattttctaggccatctgggctgttttgggtttggccaaacccaaggttcggccgaaccctggactggcccaattggcccactttttggcaggtgtatctctcggtggatcctcagcccagtggtgtgaattttgggcttgtttgctcgtgttaattctgtgttatgagcccatctatctacaagtctgcttctcgacagcgtttgattgatcgttcgtctattttctgttgattctcctccatttatatgtgcttctcctgcatacatgttagtagcatagtatatagtgggagtagatattttatttggaaattttgcattgcaagcatatctagtcttcattaattgggtagtattgacggtcaaaattggtcgataatgaccgtcaacaaaccccccaagcttaaacctttgctcgtcccgagtaaaggacaaaagaaaacaaagacttggttgttgattaggagttgctactatactgtatatctcaaatgtacaagtgtaagttatgggtactctctctcaaattaaataagttggcacggtgacttacccttacacctaattcccgcaagacactgcctttccttgtcttgagcggttgagagacagaacaacaattagagcactagtcacccactctttattcaacttttattccgggagtttccaaatgattttgcaaaaaaatccaagttcctcatatgattctcttgatcactcaaagtgtatgaatatggattcctcaccaaatttgcctttatgattcctactctaaggtttgatatgtggagcttggtaggtatcaaatgtggcatacttacattcacatttattactaagtcaaaaattggactaaagcaaatgactagacatactcaagatcaagatcatgcaagtgtgtgagtaatatggtggaaatggaatgtggataacaataaagaaaatgcttctcctttatgcatactttcttctccaaaatcctccattcataaatatggagagggcatggctatatttttctatatgttttttttatcatgctcaacatctttgaaagagcagaaatttattcttttcatagccatgcctttccctcctcttttttttcgcaaaggatttttttctaggagaagaaagcataaattggaacggagattatttttggatgatgatgaaatggatatagtggataaaatggatgctagcttccagtgtagaaatttagcatatgtgtgcatatgtgggtgtatgatcttgatcatatggtatgaaaagtatctacacaagtcacaaaatttgacaaagttcaacggaattacaagcaaccaaaatgtatatagtttatcaatacgaatatttttgactctggtaggaattcatatcaaatgaggaactttcaagtttatcatttttgaaaaataaaacatctggaattcaagtcaaacttagaacaggattatagcaactcttatttactatctcatatctcgcaacaacctagacttagattagcaagtgcagctcacttccctcaggttcccagataatgtttggcttttcttactcaacttttgagagagtacttaaccatgaacccatatatgagagatataaaacagagcaactattcatcatttcaacatgaagaactaagcatgtcttacctagcatattaaatctaacctatctttttggtattgcaagtttttgtgttgttttaagttttataaatgcaatgcaaaaattaaacatgcaacttgaaagggaaacatgtaatgtgatacaagttaaatatgtaatgtgatacaagttacctcagtgggggagagacgtctccccct

SEQ ID NO: 25029 - DNA, 2609 bp, Oryza sativa
cagtgaactccgcccaagtgattggttgtccttctgctctgttcatccggaaatgatcccaccattctgaagcagatccttgcaactgatgtgaagcgaaaacaactttatcctgatccgtgcactggagcaattccaacttctcctcaacagcgtgcaaccaatcacctgcttccactgggttggtagtgctagagaaggtagggggtctcacacgaagaaaatcagctaacttgttctgcggcggcggaggattgacattgttgttcccttgctggttctgcatttgttgcactaacatgttgatcaattgggtctgttgagccagcacttgagcaagggttgggttctcttcattgttattgtttccacttccactggcgcgagtgttcaccatctgttgcagattagaaaagatagtaggagaggggttacactaaagataagaccttaaccaggttaacactgatctgatgtgtgtagaccattatattgttcaagttgattaagcaaacaacctagtacagttgcacgctcatcactggactacatcaatgacgggaatgcaaccatacctacacacaaagcaaacaacagcgttctaccctactaactattcttcaaagacactttggcggcataggttctaaggtaggatgccaacttcattccatcttgacatctgggcacttcagttcttcctcgatccactttacttaacctccataagtagacctcattggcgtcttcaagtttcaatgtctcagaactactcaagttgaaagcaggaggggagaggatgataaaatgatttatagagaattctagagaaggaagaaaggaaaaattttcacaaatcatttttgtcgaaaaaattcgtccttaaagtttgaccatttggcttatcctacagtcgagatggctctgataccaacttgtcacgcccggaaattcactagtaatttccgaacttatttgtgcataaaatcctcgtccaggaatcagccgaggtacacaaactgacaattttaatatacaaacccatcataataataacgttacatacttacaaaagaaaagaaaacagcagcggaataacgatttagcgatggcttcagctccactcccacaggcagctcaactggggtataagccaaacgtcttctctttctggatcctttatcttcaactgaggtttgatgattattgcaagaatgagcatatgacatactcaacaagccacacagcaaatatgcaagtgcacaaggattccaaaggatggcataatataggctcatttgcaaaaagcagcatttagcaaaacatttaagataattaaaacagtagagtaattaatcatcaattttaatcaacactgaacagcacacccatgctgcacaggcccaaccatcctgaacaaccatacccggctgtacagatctaactccaaaccaggagctaagcaaattattaccagttataacatccataattattgtgaaaggtgtgagactaatcacgaaaaacattgctcaacccgcccataaccgcgggcacggctattcgaatagttttactctggccagaggtgtaccactgtacccacaagacacgattccacacatgttgccatgccccgaagtaccaccacggcactgcaaagggggaaatcgtgacaatacccttcgcacaacacaactcaccacagtgcaccattcctggatcataatcaccccctcaaaaaccagaggcatggactccccagcgaccgccacggacttctcgccgcttctcagtctggcaccctgtaatgaaccatgctatacaaaagataaagccgttgcccatgctggcttgtggttggcacggtaaatgtttcacaacagtagctcgcgaaccggtccttaattgtcatgagcacaaccatcaaaaccacatgctcacaacccaccttaaccagattttaattatcaattaattaacatcacacgattaatcatcgtgagctaccattaaatataaccataattaataagaataatataatataatttatatttaatcccctttaattagctaatgtttctaagcatagctaagcaaacttacatatagcatttagctgaaccaatccaatatataaggttcatgctaatcaaattataacccataggaaaataagatcatcttcggccattaattaacggggaaaggttcaccacccgatgacattaaaaaataatgcatagttgaaataaaataatagctttaaacgggttcaacatgctcaaagggttgtttgggatctgtgcgacttgccttgggcttccgcaaacacttccgaaccttgctcaacgaaaacgctctccttcagaacgtcggaaactaaagcaaaagaataaaaatcaacaaaacagtacaaaaacaagcataaacagtacatgtgaatatttttaacatgtagatcttgattttagaaaaatttagcaacttgaaccacctgaaacggatctacggttatttagttatgattttccgaagatttcatctataagaaaaaggggaaaaaggaaaagacgatgatgtcatgatgacatcatcaatggtgg

SEQ ID NO: 25030 - DNA, 3141 bp, Oryza sativa
ggtcctcccaggaaggtgatatggtacccgggacccgggtcctctgacgagtctgtgataccgggctccctctcaacctcctctggctctgtctcagctccaagatcagtatcctcctctaactctgagtcgatctggatcggagtctcctcgctagaacccagctgagacgggggtgctgcgaccgcctggataggctcggccacggtgactgtagactgctccccactggggtccaccaagcagggtgcaggctcagtgcccagtatctccgcgctctctaagatagtacggaaggcagtcaggtacggtggagtgaggaacagtagtagtcaaagtggtggtcgcacactggcgcaggtggcggtgggggaggtgcggtggaagtagaagctgctgtcgtagtggcggtggctgcaccgagctgctcctccaactccctgacctgctgctgactactctgcagctgcgcctcaagtgtggcgatcctatcaccacgggtgtcgtactgtcctgagagctgtgcgtactgcacatcacgagcctgaagctgggccagcagcaagtcaatctcgttgccccacgcgtggtgctgctcctcaagctactgtcggtgctgggtgagactggtgatctcggtctcaagctctaacaaacatctctgctgctcgtctatctcaagcagtgcctcctcgtagctgtcgtctactgcctcagcccaatgggacaagtgggtcaccatcgggttgtagcagcacggtgaggcctggacggagcagaaagtgtagtcctctcccctgtacgggtggtgggcaaactcagtcctcatcagctccactcggtgtagtgagtgaaggcgaaggaatgcctccctagcagcgtcctggactgctgactctgcaaagtcacggcggtagcgtgcccggaagcgatactctggctcaacgtcagtgcgtggctcaatcgtcacccgagcctcccacttggcacggtctccgacaacgaacctcctcctccaaaagacgggctgtcttaataagaatttgcttgctgttttaagtgttttaattcagatcagaacaattgcagtttaaattcctttataataaagcttagttcctgagcatctgtttttcttctttcccccccctccgtctgccctcccttcagatggtcaacaccaggaatggcatccgtgcagcaggtgagggcagcagcggtgaagaacgcaccgacggtggacatcccaatagtgcctctggcaacggtccgccaccgctccccgagaatccgacccttgcccaagtaatggctcatcagactcagatgacggcagccatgatgcagcagatgcagcggcagtagcaccagcagatgcaccagaggatgcagcagcaagctgcgtagcagcagcagcagtttggtccccctccccctcagtccaagctgccggagttcttacgcgtcaggccacccaccttctccagcaccaccaaccctatggaggcaaatgactggctccacgctatagagaagaagctaaatctcctacagtgcaatgatcaggagaaggttgccttcgccacacaccagctccagggtcccgcgtcaacttggtgggacaatcacatggctacccgtccgccaggtacggaggtcacttgggcggagttctgtcgcagctttaggaaggcgcaggtgcccgacggggtcgtgccacaaaagaagagagaattctgggcactccaccagggcaaccggacggtgactgagtacctccatgagtttaatcgtctagcgcgatatgcaccagaggatgtccgcatcgacgccgagaaacaggagaagttcctagcaggcctggatgacgagctgaccaaccagttaatctctggagactacgccgactttgagaagctggttgacaaggccatccgtcaggaagatcagcacaacaaaatggacaggaagagaaaggcagcgcagttccggtccaaccaaggaagtcaccagcgaccgcgcttcgctcctggacagcagggtggacctaccaccatgatcgtccgccagcaccgccctttcaacacgagcagcttccaccagggtgccagtggcagccagaaccaccagggaggccagcccaaccgcagtacagctccgcgcccaccgatggcaccagcacagtcagctccatcagcccaagccaagaaggagactggagcaaagccagggtcctgtttcaattgtggtgagcatggccactttgctgacaagtgcccgaagccaagccgtgccggggcaaggtttgcccaagctcgtgtcaaccacgcatccgcagaggaggcgcaagcagcaccagaggtcgtactaggtacgtttcctgtcaactcagtcccttctacagtactttttgattctggtgcaacgcattcttttatttcaaagaaatttgtggggatgcatgggttaagaaaagaagagcttagtacaccaatgagggttcataccccgggaaatagttcaacctcggtcagttatagcccttcaatgctaatagaaattcaaagatcaccatttctagccaacctcatccttcacgaatccaaagaccaagatgttattcttgggatggattggctgaccaagttcaagggagtcattgattgtgcgaatcgcacagtcaccttgaccaatgagaaggtagaaaccgtggtgtacaagtcaccagtctcaccgaagcagagaatctccttacatcagattaaggtggaaaaccctgtgaccaccgaggagaaaagttcacagaaattgaggatatccccgtagtctggaattatcaaaaatggttcccggaaaactcactccattccacccaaaaaaaaaaatggatttccaaatggatttgccaccggggactgttccattttacaagaaaccgtacaggatggcaggcaacgagctagcagaggttgtcacgaccggaaataacccaacgggcgttccttacgtgcgtgtattattccttgccccagaggcaaggttcaccaaaagttgatacaattcaaaatttaacaagcggaagcgtaaatagttaattattacatgggcagcgagggcccagcccacactaagacaacgaat

SEQ ID NO: 25031 - DNA, 3050 bp, Oryza sativa
ttcggctgagggagccggaggttagggatggccccgacaggtggggcccacctggcggtggctcggggggaaggagagaggaggacacggttgggggagaagatgacaggtggggcctcgggtcccacctgtcggagagagagggagggagaggccggctggggaggcaaagcagacttgagggagagagagagccgagcgggccgagggagaaggccggcccgagagggagagagggggggggaaattgggccgaaaggggcccaaagagaggagggaggattttatttgttttctttttattttaattggttaaatgatcttcgtgactttaaaactatttctcgagctccgaaaattcacggaaaattccggagagtacattagggcacaaagaatattacaaaatattcccggccaaagatttttaagggaaaattttaattctcccattattttacttgattaaattgctttaacttttatttaatttccagaaaatgcattattaaatgatttttaatcccgaacgaaaatcggggcgttacaaatctaccccccttacaggaatctcgtcccgagattctgggatggctagaaagagggctggcactggcggtctgtcttatctgctgacacatgctgtctctttgtcacgaccggaaataacccaacgggcattccttacgtgcgtgcattaatccttgtcccaggaggcaaggtacaccaaaagttgatacaaatcagagtttaacaagcggaagcgtaaatagttaacttaatacatgggcagcgaaggcccagcacacacagagacaaacgagaaacagcggaagactaaggcgacgaccacaggcgcttgacggcaggcacgagctagacaccaaagccttcatcttcaaggagctcctcttctgggcttgggaaaaattgagcaagactgagtacaaccaccgtactcaacaagacacacccacaaatgcagaataaatgcaagggagtacgagggaattataccatagaggggttagggttgcagtaaacagcatttaaagacatttagttgctcaaagctattttgtaaacccgatcctagaactatacaatgttattaatcaaggccgtgaacccacacgaacctgccttaacccaaggcctacgatgattcagaccgaaccggcaacccgaccctgggtcccagctcgtcctaagccaacccaggccaaccattccacattttagttgttaagcaggttttaagaattaaaacactaacttgggtacattgctcggcttgcccataaccgagggcgcggctattcgaataggttttactctgatcagaggtgtacatctttacccacaagacacgtcttcctcatgtgcagccacgtgccacataccaccacggcatatggacggaagacatgacatagtttccaacccatcctagccatagacaagagtaccgacccaaccccacctatagccggaacctccgggacaggtaggcaggactgagcccctagcagcaggacaccagccctgtgccatgacatctcttctaccgggccgcagcacgtgtagccttcatttgtcctagagatgtccatcgacccccgacttcgtccatctccatccgtgtacttttgtttataaccagactgagccacaaactaagccttacccactagccatgtggaagtacgatagtgctttgcaacagaggcccgaagaccggtccttatgtggccgaggtgctactatcaaaaccatgcaccccaagcctagcctaaaaccattttgagagttttgaatagaggggaaggtgtgcatccagttccacaataatccaaccattccataatgttcaagtgatatgaataccccaaagtctagaattataaaatcacctaatgttgcctaaataataagcgaagcatctacctaaattcagactagtggaaccatgagtagagtgcccagtagttggggttttgtttattctagggtgaacaaggtaataataacaatgacgacagtaaggtcataacaaaggtaaataggcatggctaattaaaacagtgataacgcgggaatttaaatgaagcgataatgcattaatttaaatcaaaataacttcgcaaagtgggatccaatatgttcaaagatgatgtgacttgccttgctcgctttcccaaacgtcggcttcaacctccacgaagagcggatcttccgaagctgcagcgtctacacgaccaatggaaaagaaaagggcttttactctaataaactccacataacaagcaggaacaaagcacaaaaatgggttcttgacttcttaaggaaaaattagagacttgaacggtccaattccgagttcaaatggccaagttatggccatttgaagtttatatgctctttaaatgaatatttacgaatttcttcatttaaattttaatttaaagggtttattgcgtcagccgggggagagggacgcgcggaccgggtccacgggagtggggcccacgcggcagcctcacagtccacggtggaccgggtgcacctgggctcacaccggcgggcgcggtgggccccacgcgtcagccgcacccgagggccttggcggctgacggccgggccccacgcgtcagccgctcggcgggaggcggcgcccgcgcccctatggtcgccggcgacagccataggcacggtggagcggcggccgagagaggggaagggaagggggaaaaaggcgacggtccacggctcaccccgaggcgacggcggcgacggaggaggcggccggagcagagggaggcggtggcgcggctcgggtcgacggggtcggcggcgttccggcggtcggcgaccgaaacggagaggtggacgaggtcggcgaggatgcggcgccgaggtgggaggcggtccggggcgacggcggcggtggaccggagctcggcggcgacggcgcatagagagagcgacggcgcgagctcgattccggcgtggagaaggtgcggcaagtggcggaaacgggggctgcagga

SEQ ID NO: 25032 - DNA, 2667 bp, Oryza sativa
cgggcagggcggcggaagcggcggaaggaaggggatgacgggggggccccacccgtcagcgagggtggggggggggcccgcccgtcagcggcgcgcgcccggggaggggcccactgggctgcaggggaagaggagtgtcacgcccggaatttctatccaaaattccaaacgcttacatgtgtgtgaaccctcgtccaggaatcagccgaggcacacaataacaaattgataatagagtacaaatattactctaattaataagcgaataaaatgtcattacagaggtagatagttcctctcaatcaataaagttctagcagcggaaaataaataaacggcgcagacggctccactccacaggcagcttgaccaaggctacacctaatcctccacaccatcagcctcattgtagaactcttcctctgatgaatgattgcaaggtgagtatatgacatactcagcaagccacgcagcaaatatgcaagtgcacaggataacaaaggatggcataatagggttccatttgcaaaagcagcatttagcaaacatttgagaattttaacaaaacagttaagtaattaaacaatattaagccaacgctatacaacataccctgttgtataggcccaaccattctgaacaaccaccccggctgcacagttctatctccaaaccaggaatgtaccattccaaaccaggagctaatcaaattattaccagttatagcatcttttacaatgatgagaggtgtgagactaatcacgaaagacattgttagacccgcccataaccgcgggcacggctattcgaatagttttactctggccagaggtgtaccactgtacccacaagacacaaccccacatcatgtcaccatgtgcctcaataccaccacggtatctcggaaaggagttgtgacaatacccctcgcataacacaattcactgcagcgcaccttcctggatcataatcacccccttataaacaaggcatggactccccagcgacccccgtgggcttatctccgccacttctcagtctggtgccccgcaatgaaccatgctatacaaaagataaagccattgcccatgctggcttgtggttggcacgataaatgtttcacaaccgaaactcgtgaaccggtccttaattgccatgagcacgaccatcaaaaccatgtgctcacaacccaccattaccaggttttagttggcacattaattaattaactaatcacgattgaccatcgtgaactatcaataagctatcatgaaataatagtgagtcattagttatcccataagtgtactaatgtttctaagcagggctaagcaattatatctaatatctagttgaaccaatataaataaagctcaactagtcaaattataataacccaaggtatcaaggaataaggtaatcaagaacaaaagggctataacaatcaataggttaattccacccaatgacattcgaaaatagatgcaatagttgaatagaaacaatagctttaaataggatcaacatgctcaaagggttgtttgggatctgtgtgacttgccttgctggccttggaactcttcaaactcttcttccgtgaaaacggactctccggaaacgacggaatctaagcaaaaagaagcaaaatcaccaaaacagcacataaacaagcatgaacagtacatgtggatatttttaatgtgtagatctcaattttagaaaaatttagagacttgaaccaactaaatcggagctaagatgaattagttatgaatttttaaagattaaatcggattaaaacacttaaatcggtttaaattgaattatgacgcaataatgaattatttttgaaaaggaaaagaaggattattgcgtcagcgggctagggtttggtggaccggcgcatgggcggcggttcacacgaacggacggccgagattgatccgatccaaatcggacggccgagatcgattggtccacgaccggctcacgggagaggatcccgatgacgtcaacgatgacatcaccgacgacggcggcggctcggcgaagaagacggctcgggcggcggacactcgtcggcgaacggcggcaccacggcaccaacggagggcaccagcacgtagaggacaacgcggcgaacacaccggtgaccaaaacaacggtggagaagcaacggacggcgacggcgacgagaaggaagcggcggctaccttcgggttgtcgacggcgacgaagctccggcgggttccgacggctgcgaaggggcggacgaggacggcgacgacttggcgacgacgacggcggtcttcccgagtgacggcgacagctggagcgacggcggagcacggctgaagcggcggcggcgacggcgaagctagggcacacggcgctagggcttttccgacgacgagaggcgaaggcgaaggtggcgacgggtagaggagacaccgggggtccttttaaagggctcggaggcggcggcgaaggcccacggcgacggcaacggcgaaggaaaccttcggcttggagagagggaaaaccgatccgaatcgaactcgattccaaagctttccaaagcgatttaaccaaagattccaaaggagaaaaggtagaggagatcccggagatcatttcccctctattgattcggccggagaaggaaag

SEQ ID NO: 25033 - DNA, 999 bp, Oryza sativa
ttcaatggtgcagcaaaagtactgaaatctttgacgaaacggtggtagaatcctgcaagaccaagaaagctcctcacctgtgtgatggtttggggaaccggccaactccttgtggcttcaatttttgactcatccacctcaattccctatggagtaacaacatatccaagaaaagagactcgttccgtgcaaaagatgcacatttcaaagttagcaaacaaacgtgcatcgtgtagagcattaaaaacagcacgtaaatgatccatgtgttcatccaaagacttgttgtaaatcaatatgtcatcaaagtacactaccacaaatcgtccaataaaaggccttaaaacctcattcattaagcgcattaaagtactaggtgcattagtcaaaccaaaaggcattactaaccactcatacaaaccaaatttagttttaaaagctgttttccattcatctccaagtttcattctaatttggtgatagccactacgcaagtcaatctttgtgaaaataatagagccacacaactcatcaagcatgtcgtctaacctgggaataggatgacgatatcggacagtaatattattaatggctctacaatcaacacacattcaccaagaaccatctttcttaggaaccaaaattacaggaactgcacagggactaaggctttgacgtacatacccgcggtccaaaaggtcttgaacttgccgctgaatttccttagtctcatctgggttggttcgataagcagcacggtttggcaatgatgctcctggaatcaaatcaatttgatgctctatccctctcatgggtggcaatcctgggggtatctcagctggaaagacatcctcatactcctgcaaaaggttagtaacaacaggaggtatcgaactagcaatatcatctaaagaaaccaaggcttgtttgcatatcaagaaatagcgcatatcatcatttgaaatatcagcaatgtcacatttcgttgcaagcataaca

SEQ ID NO: 25034 - DNA, 1220 bp, Oryza sativa
ttctcctctaggctttaaaatcaattctaataattccaattaaacaacaatttatatatttgggatttttagggtgtgacaccatcgtcctccgtcgctcgccatcgtcgcttgtcgtcagtgaggcacctcctcctctttctctctccctatctcccgcgccgtctagtcgtcgcgtcgctgcctagccgcttagccacagccagtgtcgccgcgccgtcgcaccgccgccgcttgtcgtcggacgccgccgtctgccgcgtcgccgtcccgcggtagcgccgccgtgcgccatggtcgccgggccggctcgagccgcccgtgcgcgccggccgcgtgctccccgccgccgtccgatctaccctcgggtagattggggccgtcggtttggccacccgcgtggttgccgaatgtgcgccgcgtcggcgccacgtgtgcaccacgtggcgcgccgccccttccccggtccgtggactcggtccaccgtgaaccgccctccccgagtcgttgccatgtggggcccgcatgtcggcgccgcccctctctctcccgggatttatttattgcgcaataattcaattaaggatttttctgtttatagtaaaaacacagtgaatcttctaaaattcatatctaattcatccgagctccatttaagcctattcaagtctcagtaaatcaagaaaaatgtgtagaatccattaaaaatagttttgttctctgtttcagtagtcttatagcctgtttgtattgtttgctttgtatgtcgcttagattccggctctcctgacgctccgttgtactttgaaatagtcaccgaggttcctccagcagcagtgcaaggcaagtcatgcttgtcacttgaacatgttgatcctatattgcaaatgctcttttgtttccgttcaaatactgcattgttttataatattaccatggaatgtttacctactgttatagccatgctattttggtacgatgttcctttcttagcttgggatataacatgactagaggttggactagggattgcttagccttgcttagttcaactagcacacaatgggggacaacattaatgcatagatatcagattgtagaaatgatgttggttaatgcccaccgctccggtgttggttaattaaaatatattaaatggtgggctgtgggtgcatggttttgatggtcgcgcccatggcaattaaggaccggttcgcggg

SEQ ID NO: 25035 - DNA, 5467 bp, Oryza sativa
cggattttcgaaaaatttgttcgttagggtcactgccatatcgcttaaataagcgaatgcaaaatactcgcagatgagattggccccgatggttggactgtagagaatactgttggtatttcttaacatcattactagaaatataattcccagcaatggcgcagaaatactcctggtatattatggttacagagtttatccgcaagtgcacggatataccattgtagcatttcacccgagagtattccaagggtatcgtatttattttatcccgtgggaagatcatgtagagagaacttgactaataatttatatattacttgtgataatcatattctaagcaagggttaagataatccaagggtagagtgacacacaagcattaactactcattctcataatatatcatctaagctaagtggaaagaaaagagaaagaaaatctattcatatatttctgatatacatagtatacatacattctagttaactgatatactagctaataccctctatctcgatgccctcctggtacttcgagaagccacccctgactaccgagttccttacgacagcccgttatgaccgtataaccagggcaaaatacggaagaataccctccccagggaatcaacttacgattatataccggcacggaggaacacacgtactgagctgtcaccatcagcggcccacctctcatccgcaatatataaccccaaatatcatatcccgtaatctagacaccatgtctaaactaccagatactactctaatatcatcgttatggcatagagtaattgcataagcaaacactatacccgcagcaaagcatctcccagataagatagccgtatattcagtataacatgaacataatgtaaagtaggtactcatatactcggaaagtctttcaataccataaggccctctttgtttaggcttaggcttattggcccagacttttaagtcagcttattggcttatatgatttataagccagtggatttaatgtcctaagtttagtggtggagtcatacatctatctcatataagccaaaaaagcttctccaacctagcttttggcttgatagtgttagagtggcttatagcttcaaaaaagccaaatgaaaaagctgcttgtttgttttcgcttagactttttgacttataagttggcttataagtctaaacaaagagggcctaaatgtatttagaagagtattcaagtaaaagtacaaagcttaccaaaagagaagagaaaagctactagagccatacccgaacacttccgaaggcttccgggcttctgatttctactatattcctattccaccagctagatactactaaactaaacttgagagaaatgagagagctattgcttgatgtgtgtgagtgatgtgagaagaggagctccttttataggcaggtaatgacggttgtgacggttggaatggtcggtaataccctccaatcgtcattggggatcaaatccagccgtccatccaaaccctgcatccatcggcgccacgggaggtttggccggccaaaccatgaactggcccaacccagcccatcttcggctggcggcctcctttgttgtcctcctcccatctgcatatcaagtgtgtccattctcctagtgatttcacccaagtcccaacgagaggaacttgagcgccattcacttgaagatggaagcacaccacttgatctggaaggttgattgtccccccattggatgtcatgaggcgcacgccaccggtcctcactggcacttgcccaggttgagaatccaatactgtgacgtggagcatgggtccatccgggtgcatccccaattggctcccaacctgcctcatacatctgcacgggtgtgaactttctcgttcatttcttgtcatgttgtgcgtctccctgtatgctccacctgcgcgagattcttctatggtctacaggggaatggttagttcatggcagttgtacaaatgataccccgcatttggcaacgggatttcatttgtacaactggggaaaaagtaaatcaaagatccgtctactccatttttcagaatgtgcccttgcactagataagcctcatcaatacacggatgagcggctgagataaaagcaatttggtcgctaacgacccctagcccttttgctatccgagtaatcagagaagtgcactcaacaggaacagagaactttatactttctaaccattgccttatcatacatttcacaggagtaatttggatctttctaaccatggcaaacatgataatcaattcatctgccctaatgggcctcagatcacctctaggaaacaaagccatatcaatcgatttgtgcatgagcctaagtgtaggattatggatatcattcgttctaggtttcttgcaaattggagcaccataaatatcttcccaaaacctaattttctcgaacccagaaattcctttctggagatcgattttacaggaatcgtgaaaatcaagaagtgtacttaagcctttccatgtaagtgtaaactcttcacggaaataacgaaaggaaattacatcttctatttctttcaaagtgcacagaaattgtaaagtaagcagacgagcaccaggctcatctaccacagcaaatctctgccaaccaacagctttccaaatagtacgaaattcagcatccatacctatgttttttagcagctccggtgagtattctcgcgtgtgagcatactcccggtcattcagcatgtagtagtcttgtctctcccgatcactgacaaggtcgaggtcggtgtcgtttaggagtcatcgcggagcttcggcgtcctccatcgagacatctgctgatgaacaagtactagactcatcatgatgacttgatgaagagccggaccccttgaacagacgagacagttgtcttctcattctgcacaatggagcaggaacggactaactcggcagaggttagtaatgacaagaatctcacccgccagttagtttcacgaaagcaacttgtatatatgcaactagtgtttgaatttgagggaaactatcaaagcttgaatgaacttgagagcaaactttggagagggaatgaaaatgtgttgaaatggggtggaattccctctctcggccggttggcttaagtagtgcacccacacggtcaaaaccgacctgtggggcccactagccgttgcctcaaagaaggaggcagccgaccgttggcctcgctggttcggccgaacccacagtgggcccaaccaaccccactttcggccgttgggttccaacggtcagtgtggttgtggcacaataaattttcactgaaaattttattttggtttgctctgaaaagttcatttgaagaatttcctaaaaattcaaaaatcctaaatgcaactttgaaattcaaacatgtgatgatgcaaaaatttaaattgttgaaagtaaatatgcggatacataccaatcaacctgttggcgaaggtcgcgtcatttaaagtccgacgtgcaagactatacctccatccagttcagtttgcggattttctacccgtctctggaggtgacggagcgggcgtctttggcttctccctccacaccttctttggttttggtgcggacagcggcttcttttgagccaactgcttctagcttcctggccggtatgggtggttctaccggcgtcttccaataacggttcgtaggcattgttgttttcttttctaggaaattctgaatgaatttcaccaggctgtctgttttaggtggctccacttcgacctcttgaatattctatgggttcggcccgtactttattctaaccatggagcattattccgtgctcagttgaaactcaaacttctcttccttgccgttgatgtggaaatggatactccccgttcccacgtcaatgttgtctcctgcagtgctaagaaactggctccccgggatgaagaaatctcgtatcttgactggcacatcctccgctatccctgccaggtaacggactgacgaatcagccagttgaaggcgcattggtgttggtgccaacaccgtgaagtagagcttgtcgaagacgtcttttggcatgacgctgacactggcaccaaggtcgcacaaggcctggtcgaactgttgtgccccgatcgagcaggtgatcgtaggacaccccggatctttcttcttctccgggagcttatggagtatcacgttgctgcattgttccgtcagcttgaccacctccgttgttgggagtggtctcttgttgttgagtatgtccttgagataacaggcgtatgttggcacttgcatagtgtccaacaacggcacgttgatgtggatcttctagattacttcaacaaaacgagcgaattgctcgtccactgacggtttcctactccgttgagggaacgatagcaaccgtgtgtcgcagtactcttgcggcactgtcttttctggcggaacttccttgccagccgagtcattagatggcacttattttgatatcccattagttcctacagggttaggatatggcggatcacgagtggacttacctcccctcgtcgtgatggcccttattttcaatggaggagtcaggttgccccgggatcctcccagtttgatttgcagggactaaggatgccaactgagctagctaggtttctatcattttattaaagcgcaactgattttgaaaagcagaagcaaagccatctaacttgacatatgttttctaggaccttgtcattagccgcaagctttttgcttagcgcataggtggtcttagcttgcgcaaaaacgagatccttcaaggaggactggttattaccgttgttgttacctccttgataatatgggcatggtttgttccacccctgacctccttgtggacgatacctgttgttgttgttgcccatgtacatcgcctcctcacggctttctgggcagtcattcccaaaatgacccgtgttgccgcagacctcacatgtggcgtgagagtccaaggccttgacggtgccttgcggccgtttctcgtggtcgtccaattgcttcatgaggaggtccagtttggcagcaagtaactctgtctccttgacggtgtgcatggcttgctaatgggtctgtagtcgttcctcgctccaacccatattggagaccatcttctctattagatcaatggctccttgaaccgttttagagaagaacgctcctccagctgccgcgtccatgtgatcacgggacatcggggtgagtccattataaaagttctgcgggatcagccagtcgtccatcccatgatgaggacaggcggctacgtactcatgtagtcgttcccatgcttccggaatagactcatcccttgtctgctggaaacttgaaatccttccacgaagggctttggttttgcccatcgggaagaatttcgagaggaatgtcgtagagcatttgtccca

SEQ ID NO: 25036 - DNA, 1745 bp, Oryza sativa
ctatataaacgctccccgagctccccacctccgtttccgccactcaccgccctctctcctcgccggaatcgagctcgcgccgtcgctctctctctccgccgtcgccgccgagctccggtccgctgccgtcgtcgccccggaccacctcccacctcggcgccgcctccttcggcttcgccgcatcctcgccgacctcgtccacccctccgtttcgctcgccgaccaccggagcgccgtcgaccccgtccacccgagccgcgccgccgccttcctccgctcaggtcgccgtttccgtcgtcgccgtcgccctcggggtgagccgcggaccgccgcctcctttcccccttccctctcctctctcggccgctgctccgtcgtgccggtggtcgccggcggcgaccatcggggcgcgggcgctgcctcctgccggccgcgccgacgtggccgcctccgggcgcgcctagcggctgccgcgtggggcccggccgtcagccgcccgcgccctcgggtgcggctgacgcgtggggcgcacggcgccggccggtgtgagccgggtgcacccggtccaccgtggaccgtgagactgccgcgtgggtcccactcccgtggacccggtccgcgcgccctctcccggctgacgcaataaatatatttttaaattaaaatttaaatgaagaaattcgtaaatattcatttaaagagcatataaacttcgaattcggaattggaccgttcaagtctctaatttttccttaagaagtcaagaacccatttttgtgctttgttcctgcttgttatatggagtttattagagtaaaagcccttttcttttccgttggtcgtgtagacgctgcagcttcggaagatccgctcttcgtggaggttgaagccgacgtttgggaaagcgagcaaggcaagtcacatcattctttgaacatattggatcccagtttgtgaaattatgttgatttaaattattgcattatcgctttatttaaattcccgcgttatcactgttttatttagccatgcctatttacctttgttatgaccatattattattgttattgttattattattaccttgttcaccctagcttaaacaaaacctcaactagtggacactctactcgtggtatccctagtttaaatttaggtagatgcttcgcaattaaattagacaacattaggtggttttacaactctagactttgggatattctcatcacctggacactgtgaaattgttggagtattgtggaattggattcaccccgccccctctattcaaaatccccaaaaatggttttaggctgggctcggggtgcatggttttgatggtagcacctcggccatataaggaccggtcttcgggcctctgttgcaaagcactaccgtacttccacatgtctagtgggtaaggcttagtttgtggctcagtctagtcataaacaaaagtacacggattggagatggatgaagtcgggggtcgatggacattctccagggcaaatgaaggctacacgagctgcggcccggtagtcgagatgtcatggcagagggttggtgccctgctgctagggggctcagtcctgcctgcctgtcccgggtgtcccggccgtagggggattgggtcggtactcttgtctaaggctaggatgggttggaaactatgtcacgtctttcgtctgtataccggggtggtatgtggcacgtggttgcacgtgagaaagatgtgtcttgt

SEQ ID NO: 25037 - DNA, 1509 bp, Oryza sativa
ttcagtaagagaagctttggagaagatgtcttaggtggagtcctggcttataccccagttgagcgcctgtgaagatggagccgtaggcccgctagtccgctgctgtttatttttgattgtcaggcctgaagtgcctttgtaataatgtaaatattatcgatataataaagatgtgccttttgtatcatgtttgtttggtgtaccccggcttttcctgggacagggattaatacactagcgttcgggaaaaggcaattttctcggtcgcgacaacttcttcttcctcctcttcctcttccacgtcggaggtggtgatgtagccatcttctgtagcaacataggcccgttgactagggcaatctttctgcacatgcccaaatccttggcaacggtggcactgaatgcgtcccgtcgaggcgacagatgaggcactcttggcgggtacttgcgaggaacatttacctgactctgctggtcgtgcttgccttgctcttgccctgatgcatgcccctgcaattccttctctgcaagcatagcaaaccgaaacaactggttgacagagttaaatttcttataatcaacaatgttctgaatttcctccctcaaaccatagtaatcctgtacagatttatcccgttgttccaaacgcatcagtttcttgcgtaaatctctatgataagatggaggaacaaacctatcgcgcatagctaccttaagttcttcccaagtagtaggtagtaccccctcatcagataacccagcccaccacataatagcaaaatccttgaactcactactggcttgtctaactctatgttgctcgggtacaaggtgggcattaaacttttgttctactgttatctcccaatcaaggtatttctcagcatcataatatccccaaaaagatggtattttaaacttaaccttagcataaggatcatcgggcactcgattattattattaccttgttggtggcgagtgccacccgtacctgtgcggtttgtgcataggcgacgtcgtagccgtgcttgccttgtagccggtgcgtcaatatagccactggaatcatacaccgtgtcttcaggatgagcatcgtcgtcaccactcaccacttcctcattttaatgaaggcatcttggaaagactttgcaacggcctctgtgatgtccttttgagtattttgttggagagttcgtagttgctcttggctgacacagacagcaaaatcctggggactcttctcaccttcgttacttgacattgaaacaccaaaacagaaacaaaacggtgaaggttatccctaataatctactacgcaggtgtagtggtgcctctcgacgattctcagcaatatggagttcctaactaagctcttataaggttcttaccagcaaagcaaaggatacctagaaggcgtagtcagcgattgcaaggatcaagaacttgtgctatccagaagtaatatgtggagctaggaaggccaaatatatatatatgagtggtacaca

SEQ ID NO: 25038 - DNA, 1770 bp, Oryza sativa
tgaagtttcggcttccggctaggttttccagaggggatataacctagactattatgcggtggaattgggatatggtggcagcgaagttgtagggtgttctggtgatgcgtggtgatctggatgagtgtttatgatggcggaaacggctctcaaaggatgaaccctaacacacggtgaaaggtagcggctagggttacaaaggataaaacacatgactagactaaaatacgtactagaccagcaacaggaacttaaactaggactcaaactcaacactacagactctgaaaaagaatcatgcaaaggctaaacacggtctaggttaaggtaactaacaactaattttttttggcttttctgtagactctaggataattgtgaaaacaaaaactaatctagggcaaagaaactgagcgaacctgacggtgaacctagagctctcataccacttgatgtgcgctagggttcccgatcttccgaaaggttctgataaacaacgatttgggcagagtcgcgacacaaatcgatccggcttcttgaacgcgcacgctcttgagccccgcaatcgcagcaccacgtctcctctggttatcacccgtgtcgaaacgcggatgacctcgccgagaaggctaatccctgtttgccaattgaagaacacaaataaaaacgagatagaaaaacaaccaaaattgcagatgaatgattaagctcacgagttggggtcttacaaaccgatctagcggcgaaactgttctcgacagattaatctaagcaaaacccaaaaacctaaagatggtggcgagtactgatatatagagtttagggtcgtgcaaacccttctcgacgcaaccctaatgggttccaacacaatacacgggccaaaggcccaaatacgatgacgcagcaccgggatagattctggacgtcaacttgttcggtcaattcccgttactccggaaagaatttggacatgggaccaaaaccattggaaattttatcttcttagctttccatcgatataaagaacgccccaatccgagtacgtatgcgacctgggcgcctgttttagtgcagactggtcctggactccgaattgcacccgacgtcgacttggtttgggcctccaccttgaattggacgtccccgatgatcctccatggctctcagaccttctccaagtgtctccttgtcccctccattgttcctaatcacaatataatcaataggtagcaatctattctcgaattcatataaagaagaacataggaacgagctcacctctaaatttaattgtcgcgcacgagctcttgttatcggtccttgaatgaccgttggaggattgttgtgtgtatccgaggtagtgatgtccgcatcacaatgaggtcacgatcaagaacaaatatcctttaccgcagattgatgatttgtttgatcagctaaaaggagctaaagtgttttctaagatagacctacgatcaggctatcaccagttgagaattcgtgaagaggatatccccaagacagccttcaccactcggtatgggttgtatgagtgcacggttatgtcctttggacttaccaatgcacccgcattcttcatgaacctgatgaacaaagtgttcatggaatttctagataagtttgtggtggtattcatcgacgacatacttatttattcaaagtctgaagaagaacatgagtaacatctccgttggtactcgagaagttgaaggagcactacttatatgccaagttcagggctgcaggaat

SEQ ID NO: 25039 - DNA, 1443 bp, Oryza sativa
gtgcctcggctgattcctggacgagggttcacacacatgtaagcgtttggaattttggatagaaattccgggcatgacaagttggtatcagagcctctttgaccctaggttatgccaaatggttatccatagaagccctctaaaaatattggaaaagtagaactgttctcctccctttctcttttaattaaaccaaactaatggcacatgcacttcataatctcttttaatggttctcattaaaaatttattccagtgttattagtactgtacatctattactgtactaatggctcatttaccagcaaaagttttacaatactgttttatttaatcttgctgcaataaaataaatttagcatgttgattttataattttctttcatttcttttgaaaccagttattcaaaattacaaaatttgtgacctcgtttccaactgttttaacttatctcgcaaagcttggtttactttatttacttacctttttactctgattttctaactttattcaaattaatccaaaaacttgtgctattaattggataaaggtcttaactccctcctttcacttgtctttagatgctgcgttacaagcctgagtacctgtttggtgttgagggttttgtccaggagttgcgtacgatgtcctttgtcattggatttgggactgccccattttatgcccagattcctcatgatcgtcatgaagagaagtgccgagtcaaagtcaccttgaacagtaatagtgaagatatcccctcagtgatgtttgaagctggaggaagaaactacatccatgcatgtcaggaggtggcaaggatcgccataggagagctccgtgatcgctacagtgatcaattggccgacactgagtatcgctaccatcctcgccaaccccagggaagtgacagtggcagttaccttgagactgaaggaattgagaatgatgctaccacgaagcatttggttgagatgttgtgggctatggatgaaagtcgtgtggagactgtgttagccgctcaagatcgtgaagaccggaatcgtggtaagatttgcaagttagaagacaaggtggatcgtttggagaaggaattagccgcattgaagggagaagcaccgccgtagaaggccaggattcgtcttaccgcaaggaagagagctctatttgtccctctctatcaactggcgccaaaggttcgtgtggtggagaaagaagttgccccagctcaagcggatcctccggtcatcatcataagtagtgatgaagaagaagaatccaagcgcatcaattccaagattgagtgggtagcaactcaagatgataaagacgagccttcaatcgacctccgatgcttggaagaactagagtgacttgttaagtcgttgtcttagagcgttgtgttagtttgcttgcttaaagtttgcttgtgtgtggcgcat

SEQ ID NO: 25040 - DNA, 2052 bp, Oryza sativa
catcctagggatggactggttagccagacataaaggtgtgatagactgtgccaacaaaaaagtaactctcaccagctatgatggtcgagttgtaactgttcatgcattgtcatctgagtctttaaggtcaagactgaaccagataactttggaagagattcctatagtccgggagtatcctgatgtgttcccagatgatttacctggtatgccgcctaaaagggatatagagttcagaatatatttggtacctggaacagctccgatccataagagaccttatcgaatggcagccatgagttggcagaagttaagaggcaagtagatgatttgctacagaaaggatacatcagaccgagttcatcaccatggggagctcccgtatttttgtggaaaagaaagaccatacccagaggatgtgtgtggactatcgtgcactaaacgatctgactatcaagaataattatccactacccaggattgatgatttgtttgatcagcttaaaggtgccactgttttctccaagatagatcttcgatcagggtatcatcagttgagaatcaaagaggaagatatacctaagacagcttttaccactaggtatgggttgttcgaatgtactgttatgtcttttggacttaccaatgcccctgctttcttcatgaatttgatgaataaggtgtttatggaatacctagacaagttcgtggtggtctttattgatgatattcttatctactctcgaaccaaagaagagcatgaggaacatcttcgccttgcattggagaagctacgagaacatcaactgtatgctaagtttagcaagtgtgaattttggttgtctgaagtgaaattccttggtcacgtcatctcagccggaggagttgccgtcgatcctagtaacgtggaatccgtaaccaattggaagcaaccaaagacagtttcagagattcgcagtttcctaggcctcgcaggatattatcggaggtttatagagaatttttccaagattgctaagcccatgacacgactgcttcagaaagatgtgaagtacaagtggtcggaagaatgtgagcagagttttcaagagttgaaaagtcgcttaatatcagctcctattttgattttgcctgatccaaagaagggttttcaagtgtattgcgatgcatccaaacttgggttaggttgtgttctgatgcaagatgggaaggtggttgcctatgcctctcgacagttacgtccacatgagaagaactaccctactcatgatattgagttagctgcagtcgttcatgcattgaagatttggcgtcattatcttttcggtactcgtacagaagtgtacaccgatcacaagagtttaaagtatatctttactcagccggatctgaacatgagacaacggagatggttggaattaattaaggattatgacatgggaattcattatcatccgggaaaggctaatgttgtagcagacgctcttagcagaaaaggctattgcaatgctacagaaggacgacagttgccattggaattatgcaaggaatttgaaagattaaatttgggaattgtcggtagaggtttcgttgcagccttagaagcgaagcccactctaattgatcaagttagagaagcccaaattaatgatcctgatattcaagagatcaagaagaatatgagaagaggaaaagctattggtttcttggaggatgagcaaggaactgtatggttgggtgagagaatctgtgtccccgacaacaaagatctaaaagatgcagttctgaaagaagctcatgatactttatactccattcaccctggtagtactaagatgtaccaggatctcaaggaaagattttggtgggcaagtatgaagcgtgaaatcgcggaatatgtagcagtatgtgatgtttgtcagcgagtcaaggcagaacatcagaaacccgccggtttgttgcagcctttgaagattcctgaatggaaatgggaagaaataggtatggattttattactggtttacccagaacgtcacaggccatgactctat

SEQ ID NO: 25041 - DNA, 3365 bp, Oryza sativa
agttcatcgttttcacccaagggaaaattggcaccgcgttttgtgggaccttataagattgtcagtagaagaggagaggttgcttatcagttagaattacctcaatctttggcaggagtccataatgtgttccatgtgtcacaattgaaaaaaatgtttaagggtacctaccgaagaagttaatattgagcagatagaagtccaagaggatttgacttatgttgagaaaccaatccgtatcctggaaacaaatgagagaagaaccaggaatcgagttatccgtttctgcaaagttcaatggagtaatcactcggaagaagaatcaacttgggaacgagaagatgaattgaagtcagctcatccgcacctgttcgccagttcttccgaatctcgaggacgagattctgtttaagggggggggtaggtttgtcacaccctgaaaatttaaaatttataaattgttgtttaaatggaatttttagaaataattttaaaagtcttgaagagaagatctagttttaattaataaattccaatataaaatgggcccagataaaatttcattcaatactttgcttaattctataattcctagatttttctgggacttatttgagctaaggaagtatttttaataaatggaattgcatttaagaaataatttaaattgaaaaaggttttaaaaagtctcttttggctttgggccgaaagtcggcccaaaacccctctctctctctcctcggcccagttcggcccagtccgccgcgcgcgcgccctctcgctgtcgctgacaggtgggtcccgcctgtcaggaccttcgtcctccttcggccgccgccgccgaaaccctagtttcgcgccgccgccgtttccttccaaatccggccgttcctttccttctccggtcgaatcaaaagaggggaaacaatctccgggatctcctctaccttttctcctttggaatcttcggctaaatcggtttggaagttcgtggaattgagttcgattcggatcgacctctttctttcaagccgcgagtttccttcgccgttgccgccgtcgtgggcctttgccgccgcctccgagcccctttaaaaggacccccggtgtctcctctacccgtcgccaccttcgccttcgcctctcgtcgtcggaaaagccctagcgccgtgtgccctagctttgccgtcgccgccgccgctccagccgtgcgccgccgtcgtttcagccgtcgccgtcgctcgggaagaccaccgtcgtgctcgccaagtcgtcgccgtcctcgtccgccccttcgccgtcgccggagatcgccggagcttcgtcgccgtcgacaacccgaaggtttccgccgtttcctcctcgtcgtcgtcgtcgtccgttgtttttccgccgccgttttggtcaccggtgtgttcgccgcgtcgtcctctacgtgctggtgccctccgtttgcgtcctggtgccgccgttcgccggcaagcgtgcgccgcccgagccgtccgctccgccgagccgccgccgctgtcggtgacgtcaccgttgacgtcatcggggtcgtccgccgtgagccggtcgtggaccgttcgatctcggccgtccgttttggattggttcgatctcggccgtccgtgtgtgtgaatcgccgcccgtgcgcccggtccaccaaaccctagcccgctgacgcaataatccttcttttccttttcaaaaataattcattattgcgtcataattcaattttaaccaatataagtgttttaatccgatttaatctttaaaaattcataactaattcatcttagctccgatttagttggttcaagtctctaaatttttctaaaattgagatttacactttaaaaatatccacatgtactgttcatgcttgtttatgtgctgttttggtgattttgctcttttctgcttagattccgtcgtttccggagagtccgttttcgcagaagaaaagtttgaagagttccaaggccagcaaggcaagtcacacagatcccaaacaaccctttgagcatgttgatcctatttaaagctattgtttctattcaactattgcatctattttcgaatgtcattgggtggaattgacctattctttgttatggcccttttgtacattgattaccttattccttgataccttgggttattacaatttgactagttgagctttatttatattggttcaactagatattagatataattgcttagccctgcttagaaacattagtacacattcgggataactaatgactcactattatttaatgatggtttcatgatagttcacgatggtcaatcgtgattagttaattaattaatgtgccaactaaaacctggtaatggtgggttgtgagcacatggttttgttggtcgtgctcatgacaattaaggaccggttcacgagtttcggttgtgaaacattaaccgtgccaaccacaagccagcatgggcaacggctttatcttttgtatagcatggttcattgcggggcaccagactgagaagtggcggagataagcccacgggggtcgctggggagtccatgccttgtttataagggggtgattatgatccaggaaggtgcgctgcagtggattgtgttatgcgaggggtattgtcacaactcctttccgagataccgtggtggtattgaggcacatggtgacatgatgtggggttgtgtcttgtgggtacagtggtacacctctgatcagagtaaaactattcgaatagccgtgcccgcggttatgggcgggtctaacaatgtctttcgtgattagtctcacacctctcatcattgtaaaagatgcttaaactggtaataatttgattagctcctggtttggaatggtatattcctggtttggagatagaactgtgcagccggggtggttgttcagaatggttgggcctatacaacagggtatgttgtatagcgttggattaatattgtttaattacttaagtgttttatcaaattctcaaatgtttgctaaatgctgcttttgcaaatgcaaccctattatgccatcctttgttatcctgtgcacttgcatatttgctgcgtggcttgctgagtatgtcatatactcaccttgcaatcattcatcagaggaagagttctacaatgaggctgatggtgtggaggattaggtgtagccttggtcaagctgcctgtggagtggagccgtctgcgccgtttatttttttccgctgcttagatctttattgattgagaggaactatctacctctgtaatgacattttattcacttattaattagagtaatatttgtactctattatcaatttgttattgtgtgcctcggctgattcctgga

SEQ ID NO: 25042 - DNA, 897 bp, Oryza sativa
agcacagagcatactgggctatcaggaactggaacatggactttaaaggagtaggagaatggagaaaaatacaaattgctgaacttgaagaatggagagagaaggcttctcacaacgcaaagatatacaaagaaaggacgaagcgctggcatgataaaaggataaaaatcaaaaaattcaagccattagacaaagtacggatattcaactccagggttaagcttttcggccacgggaaattgcacagtaaatgggaaggaccgttcgacgtcatcgacacctcttcgcacggggcaatcacactccgcgacgattcagttaatatattcaaggtaaacgatcaacgcttaaaaattttccttgagccaaatgaaactttagatgaagaagtggatgttattaaattaatcgataatgagccataatgatctcatctattgcatgcttaaaaccttgtaaagttgtcattttcgtgcttagcttaggaattagtgggcctaggtgacgacgggaaaaccgggacggtcgtaatagtatagtaggtccgttatccgcaaatcgttagagacaatttaatttaaatgcaataaataaataaaaatcagaaatggggagtcccttacttctagaattcatacattacatagaaattctgttaattacatctccgtagagaaaacccctgattaggaattccaacaagaaagaaaataaaattacatgactgctaaaaggctaaaaagaaaaatctatcctaaagctccagatgtcgcagccgtagaatcttctgtagatttccatttatatctttatttcattttgggagtattttagatgcccactaatttgttggtttttaatatcactgcatgtatggtagcaaatttatacatagct

SEQ ID NO: 25043 - DNA, 1511 bp, Oryza sativa
gggcagctccaactggtaagcgacttctccgcgccgagcaatgatacggaaaggacccacataccgaggtgcgagcttcccttttgtctgaaacctgtgtacacctcgcaatggcgtgacccgaaggtatacaaaatcatccactgcgaattccaggtcacggcgacggttatctgcataacttttctgccgggactgtgccacctttagattatcccgaatggttctgactttagcttcagcttctctcaggatatcagtcccgaacacttggctttccccaacttgatcccacaggagcggtgtccggcacttgcgcccatacaacgcttcataaggtgccatttgtatgctggcttgatagctgttgttgtaggagaactcggcataggggagactcttatcccaggtcttcccgaaatctaggacacatgcgcgaagcatatcttctagaatctgatttagacgctcggtctgcccatctgtctgcgggtggtatgcggtgctgaagtttaatcgggtacccagctcttcttggagcttcttccaaaagtgagaggtgaattggcttcccctatcagatacgattttcttgggaacgccatggagactcacgatcctagcgaagtagagctcggctagtttgttccctccataggtggtcttcgcaggaatgaatcgagctaccttggttaatcgatccaccactacccatatggaatcatatccaccttgggtctttggaagtccggtgatgaaatccatcccaatttcatcccatttccattcaggtacttggagaggttggagaagtccggccggtcgttggtgctctgccttgacacgctggcacacatcacatagggccacaaactctgcaatttcccgcttcatgctaacccaccggtatttctccttcaagtctaagtacatctttgtactgcccgggtgaatggaataggggctttcgtgagcttcctgaagtatcagctgtttaagttctctgttatctagaacgcatacccgctttccgttccatagggttccgtgttcatcctctgtgaaaccagcggctttaccctgtttcatattcttgaggagtccatgcatgtccgggtcgttcttctgagcctcgcggatttgatcgagcaaggtaggcttggcttctaacgcagccaagaatccacgaccaactatgcttaggttcagagcttccatctgtttattaagttcgggtggaatgccgcggacgttaagagtgttgcaatggctctttcgacttagagcgtcggccaccacgttggccttaccaggatgatagtgaattcccacatcatagtctttgatgagttctagccatctcctttgccgaagattcagatccgattgggtgaagatgtatttcaaactcttatgatcggtatagatttcacagcgattcccaatgagatagtgccggccagatttttagagcatgaaccaccgcggctaacttcaaatcatgggtaggg

SEQ ID NO: 25044 - DNA, 10513 bp, Oryza sativa
gggggaaaggagagagagggagggatagttgggccaagccggcccaagaagggaagggggggaaagaagacttttagggatttttctttttataaaacctttttaactttgtttatttcttctcaattattatttgtgctctgaaaattccactaaaatttatttacgcattttaggcttttaggaaatatacaaaaatcctccaagccttatttgacttttaaatttgcacattttaattgttgaaggctttcacatgaattttaattattctcggcacaatttcgaggatgtattttagggtcgttttgggacgcgacaaacctaccccccttaaacggaatctcgaccccgagattcggaagaactggcgaagagatcgggatgggctgccttcagctcgtcttcacgctcccaggtagcttcttcttcggcgtgattgctccactggaccttgcaaaaacggattacccggttcctggtcctgcgctccatggtgtccaggattttcactggcctctccacgtaggtcaaatcttcgcggacttcaatttgctccgagtcggcctgctcggatggtactcggagacacttcttgagttgcgacacatgaaacacatcatgcacgttgcccaaggaggcgggcagctccaactggtaagcgacttctccgcgccgagcaatgatacggaaaggacccacataccgaggtgcgagcttcccttttgtctgaaacctgtgtacacctcgcaatggcgtgacccgaagatacacaaagtcgtccactgcgaattccaggtcacggcggcggttatctacataacttttctgccgggactgtgccacctttagattatcccgaatgattctgactttagcttcagcttctctcaggatatcagtcccgaacacttggctttctcctacttggtcccacaagagtggtgtccggcatttgcgcccgtacaacgcttcataaggtgccatttgtatgctggcttgataactgttattgtaggagaactcggcataggggagactcttatcccaggtcttcccgaaatctagtacacatgcgcgaagcatatcttctaggatctgatttagacgctcggtctgtccatctgtctgcgggtgatacgcggtgctgaaatttaatcgggtacccagctcttcttggagcttcttccaaaagtgagaggtgaattggcttcccctatcagatacgattttcttgggaacgccatggagactcacgatcctagcgaagtagagctcggctagcttgtttcctccataggtggtcttcacaggaataaatcgggccaccttggttaatcgatccacaactacccatatagaatcatatccaccttgggtttttggaagtccggtgatgaaatccatcccaatttcatcccatttccattcaggtacttggagaggttggagaagtccggccggtcgttggtgctctgccttgacacgctggcacacgtcacaaagggccacgaactctgcaatttcccgcttcatgctaacccaccagtatttctccttcaagtctaggtacatctttgtactgcccgggtgaatggaataagggctctcgtgagcttcctgaagtatcagctgtttaagttctcggttatctggaacgcatacccgctttccgttccatagggttccgtgttcatcctctgtgaaaccagcggctttaccctgtttcatattcttgaggagtccatgcatgtccgggtcatttttctgagcctcgcggatttgatcgagcaaggcgggcttggcttctaacgcggccaaaaatccacgaccaactatgcttaggttcagggcttccatctgttggttaagctcgggtggaatgccacggacgttaagagtgttgcaatggctctttcgacttagagcgtcggcaaccacgttggccttaccaggatgatagtgaattcccacatcatagtccttgatgagttctaaccatcttctttgccgaagattcagatccgactgggtgaagatgtatttcaaactcttatggtcggtatatatttcacagcgattcccaatgagatagtgccgccagatttttagagcatgaaccaccgcggctaactccaaatcatgggtagggtagttgccttcatgaggtcgtagctgacgtgaggcataggctaccacatgaccgtcctgcatgagcacgcaccccaatccttggcgcgaagcgtcgcaatacaccatgaagtccttgcgagtatccggcaagattaacaccggcgaggaaaccagcttttccttgagagtttgaaacgccttctcgcattgcgggctccacacaaatttctcttctttcttcaacaactgtgtcatgggtcgggcgattttggagaagttctcgatgaatctccggtagtatcctgccaaacctaagaaactgcggacttgagtaactgtcttgggttgcttccaatcggtgacggcggtcactgtttcggggtccacagcaactcctttagctgatatcacgtgccctaagaatttgacttcggacaaccagaactcacacttactaagtttggcatacaattgatgttcccgcaactttcccaacaccagacggagatggtgctgatggtcttcttctgattgtgagtatatcagaatgtcatcaatgaaaaccacaacaaacttatccaagtattccatgaacactttgttcattaagttcatgaagaaggcaggtgcattggttagaccgaatgacatcaccgcgaattcatacagcccgtatcgcgtggtgaatgcggtcttcggaatatcttcttcacgaatacgtaattggtgatatccggaacgaagatcaatcttggagaatacagtggcacctttaagctgatcgaacagatcatcgatccggggaagagggtacttgtttttgatggtgacttcattgagagctctgtagtcgacgcacatcctcttcgtcttgtctttcttctccacaaaaatcacaggagcaccccatggggaagtactcggacgtatgtactccttttctttcaactcttccaactgtttctttacttcggccagttcatttgctgccatacggtagggtcgcttgtacagaggagtggttcctggagcaagatctatccggaactcaatctctcgcttgggcggcataccgggtagttcttccggaaacacgtctccgaactccctgacgatggggatttctgacagtcctatctgatgcagttctgaacttctgacagaggttgggggtgcaaagaaaacaaccggttgttccggccctcggtacagagtgaccgtgcgtctcgcgcaatccactactccttggaattgagccaaccaattcatcccaaggatcacatccaagttctttgtgtctagcagaatcagatccgagggaaaaggaatcccctgaatttctatagggacggcagggctataatactttgctgtcataacccctccaggggtggtgatgagcagagggtttctaagcctttctacccccaactgatttctccccacgaatggcacagatataaacgagtgggaagctccagagtcgaacaaaattgtagcagggatggaatgaacgaggaacgtaccaacgatgacgtctggagttgtcagcacgtcctcggccgtcacgtgattcacacgaccccgaatgacgtccttaccaccgttgttggggcggggaggcgcttggccttgctgacgccttggcttcgggcatttatccgcaaagtgcccgggctcgaagcagttgaagcacagacgctgctgaccttgagcgtccctgtggccttgaccaggctgcacagttggcgtaggaggacggggcgcacgagtcccctgctgaccctgctgctgctgcggctgtgggacgcgcaccacgaattgaggtcgaggcgcggagcgaggctgctgctgctgctgctgctgcgaggaggatccccctggatagggattggtgtagcggaccctttggttagcaccctgttgattgcggaaattcgccaagcggcgcttgtgcgactctagttccttgtgcttggcttccaagcggatgctcttgtccaccagtcgttgaaaatccggatagtccccagagactagacggacggacagctctgggtccattcctaccaggaacttctcttgcttctcctcgtcttcccgcacatcctccggggcgtaaccggccagattgttgaactcatgcaaatactccatcacggagcggttgccttgcttcaactctcggaattcccttttcttaagggccacgactccggcgggcacatgggttctccggaaagcggcggtgaagcgggcccaagtaataggctgcccctctggctgcgtagcctggaagtggtcccaccatagagatgcgggcccctgcagttggtgggcggcgaagatgactttctcctcatcgctgcactgcaccgtgtctaactttttccccacggcatgcaaccaatccaacgcatccacggggttgttggagctagagaaggtaggtggacggatgcggaggaactcggcgagtttagagtgttggggaggtggtagtggggcattaagttgtggcggattttggaggtggtggaggaaagcagtcatcatgttggcttgctgggcgaggatttgggtgagaatggcgttggtgtctggtggtggtggtggaggtggaggaggaggttgaggtgggttgccctggtggttgtggttgctgccttcgggttggttgccatcaccggtagcagcatttctcctggtcatcaccatctgaaaaccccacacagaaccagcaaacagagagagctgacaattaaagctaaccacccacgactaccataattcttgaatttattactgctattaaattggttcattaaggttcaagttgcttaggcaaataaaataagacaggctccgacacagttatgccacacaccggcataaaccatgccccacacaacccaacaagaagacaaacgagaaggaacacacgcgcaagcctactaactgctcgtctaccgctgcgacgggccagggcggaaggtgagcaacagcgcatcctccgtgctaccaacgcaggaggcttccccctcctggggaaccacgggcgcgggctcggcacgaggggtctcgacgaagcaagtccacgccagggactgacgaacaagctcgggcctggaggtgctcttgcgggcggtgatcttctggctgcggcagacgcggcggcgcttggggcggcagatctctccctgggcgatcttgagctgatgcagctgcgcctccaccgcgtctaggtccttcttgagctgcaggttctcctgacgcagctccaggatcttcatgttgttctcgaccatcccgcggcgcaccatctgatggaagtcgatacgagccgcgtcgtacgcctccaccatgtgtgccaggtgcacgatggtagcgtcatcctccgagctagcatcccggaaggtggcgtagtcgcgggctcctccgcggcgagggtggtagcggtagggcgagtgctgcaactcgtccgggtagcgctggtggagagtgccgatggcgaggagagcggcgctctggcaagcggcggggaaggaatcgccacccgcggtgactgtcagcgaagtccgctcagaagagccagcgaggatcactgcagtgacctcccaaccagcgcggggctccgcatcgtcaccctcctgttccggaagcggcctggcctggtagttgtcgcgaccgggaaaattgccttttcccgaacgctagtgtattaatccccgtcccaggaaaagccgggttacaccacacaaacatgatataaaagacacatctttattatatcgataatatttacattattacaaaggcgcttaaggcctgacaatcaaaaataaacagcagcggactagcgggcctacggctccatcttcacaggcgctcaactggggtataagccaggactccacctaagacttcttctccaaagcttctcttactgaaggggggaagaaaaatagagcaagaatgagtacaaccacagtactcagcaagccacaccggggatgcacaattaatgcaaaggagtacaaggggataataatataggggttaagttttgcagtaaacagcatttaaaagtcacttagttgcccaaagctattttataaagacgatcctagagctacacagtattattaaacaaggccgtgaaccctcacgaacctgccttaacccaaggcctacgatgattcagaccgaactggcaacccgaccctgggtcccagctcgtcccaagccaacccaggccaaccattccacattttagttgttaagcaggttttaagaattaaaacactaacttgggtacattgctcggcttgcccataaccgagggcgcggctattcgaatagattatactctgatcagaggtgtacatctttacccacaagacacatcttcctcacgtgcaaccacgtgccacataccaccacggtatacagacggaagacgtgacatagtttccaacccatcctagccatagacaagagtaccgacccaatccccctacggccggaacccccgggacaggcaggcaggactgagcccctagcagcaggacaccggccctgtgccatgacatctcgactaccgggccgcagctcgtgtagccttcatttgccctggagaatgtccatcgacccccgacttcatccatctccaatccgtgtacttttgtttatgactagactgagccacaaactaagccttacccactagacatgtggaagtacggtagtgctttgcaacagaggcccgaagaccggtccttatatggccgaggtgctaccatcaaaaccatgcaccccgagcccagcctaaaaccatttttggggattttgaatagagggggaggtgtgaaacctattccacaatgatccaacaattccagtgtgtccaggtgatatgaatatcccaaagtctagagttgtaaaaccgcctaatgttacctaattaaacagcgaagcatctacctaaaatcatactagtgataccatgagtagagtgtccactagtaggggttttgtttaatctagggtgaacaaggaaataataacaataacaataataaggtcataacaaaggtaaataggcatggctaaataaaacagtgataacgcgggaatttaaataaagcgataatgcaataatttaaatcaacataattttacaaactgggattcaatatgttcaaagatgatgtgacttgccttgctcgctttcccaaacgtcggcttcaacttccacgaagagcggatcttccgaagctgcagcgtctacacgaccaacggaaaagaaaaggcttttactctaataaactccacataacagcagaaacaaagcacaaaaatgggttcttgacttcttaaggaaaaattagagacttgaacggtccaattctgagttcaaatggccaagatatggccatttgaagtttatatgctctttaaatggatatttgcgaatttcttcatttaaaatttaattaaaaacccatttattgcgtcagccgggagagagggcgcgcggaccgggtccacgggagtggggcccacgcgtcagcccctcggtccacggtggaccgggagcacgcggctggcggcggccggcgccgtgggtcccacgcgtcagccgcacccgcgggcgcgggcggctgacggtcgggcccacttggcagccgcgagggcgcgcccgaaggcggcctcgccggcacggccgacgggaggcggcacgaccgcgccccgatggtcaccgccggcgaccaccggcgcggcggagcggcgcccgagagagcggagaggagagggaagcgaaagggcggtcttcggctcaccccgggtcgacggcgacgacgggaacggcggccgaagcggaggaaggcggcggcgcggttcgggacggcgagggcgacggtgctccggcggtcggcgagcgaatcggaggagcggacggggtcgacgacgacgcggcgaagccgaaggaggcgacgccgagacgggaggaagtccggagcgacggcggcggcgaaccggagctcgtcggcgacggcggagagagaggaatacggcgcgagcgcgattccgacggtgagagcgagcggcgaacggcggaaacggaggagagaggcacggggagcgattatatagcaccgggagggggagatagcggccggagagggaggaaacgggcgcggagatctcggccgccattgattgcgtcggcgaggatcgcgggtgtaaatcggacgaatccgagggagagagagagggaaaaacgggggaatcgggagagggaatcgcggggaatgattcccccctcattatggcgcgcggggacggcgggatgcggcggattcggcggcggcggcggcgctagggcacaggcgagcggcgggagcggcgggaggaaggcgatgacaggtgggccccacccgtcagggagggcggcgggcgggcccgcctgtcagcggcgcgcgcgcgggggaggccgatgggccgcgggggagaggagagagagggagagaagtgggccgagccggcccaagaagggaagggggggggaaaaggacttcttttagggtttttctttttataaacctttttaactttgtttatttcttctcaattattatttgtgctctgaaaattccactaaaatttgagggctccttttagaccaaggagaatttaacaaaaattctccgggtcacatttgaatttttcttgtacgtattttagtgtttgccaatttcttttcgaattttaattaattctattattccttttagagaatgatttttaattcgggatgaatttatcaggacgtgacatttagcatctttcttagtgaacaggtatatcagagtagcatgatcagtatagactatcaccttagctcccaccaagtaagatctaaatttatcgatagcaaaaacaatcgtgagcagttctttttcagtagtcgaataattgaattgagctcctgttagagttttgctagcgtaacatattgcatgatgctttttattcttggtttggcccaagaccgcaccaacagcgaaatctcttgcatcacacatgatctcgaagggcagagtccaatcaggaggttgaatgattggagcagagacgagtgcctttttgaggatttcaaaagattttaggcacacgtcgtcgaactcaaagggcgcatccttggccagcagattggtcagaggccgcgcgatcgtagaaaagtccttgatgaaccttctataaaagccggcgtgtcccaagaaactgcgaatccccttgatgttcacaggaggaggaagttgatctataatcattgattttagcatgatcaacttcgattcctcgttcggacactcgatgaccaagagctatcccttcaccgaccatgaaatgacacttcccaattaagtaccaggtccttctcttggcatcgttgtaagactttgtctaaattttgtagacagtgaccaaaggtctttccatagacagagaagtcatccatgaagagttccataatatcctcgatcatgtccgagaaaatagacatcatatacctttagaaagatgcaggagcgttgcatagtctgaaggacatcctatgatatgcataggtgccatatggacatgtgaaggtagtcttacgctggtcctccggatggataggaatttgatgatatccggaatacccattgttgtcgaatggacaactgcatcacgtcgaaaggcgtggttctctcaacagtggttggaattttcggatccccctattacatggccatagggggctatttatagccctattacgggctctccctattggggtttaggttttacaggggaatttaaatggttacccttataacagggacattattggggcacatagtgtcctttacatatatagacccctattgggcttaaaatcgctaggcccatctacttagtgaaagaatttggcccaacggcccgttgagcaactcttcggtgaggttcggcatctggcgaacctgagccctcttgccagggctttcgccttgtcatcctcgcccacatcgccttctgacgaagtccctacctggctaagcttgggtgtccgggccatggctttcgccataagacattcgcccacacacggtttccttctcgatcttcgccactttcctccggtctaagcttgtcgcttaagcctttggttttggcaggcccggccgaaggcccttcgtggtatacctccaactcccatcaaggaaacagaagaagtatagatttgccagctgttccaacatttcgtcaccgaagggtagcgggaaatgatcctttttcgtagccttggtaagcttcctgtagtcaatgcaca

SEQ ID NO: 25045 - DNA, 3975 bp, Oryza sativa
ccaggtgcacgacggtagcgtcatcctccgagctagcatcccggaaggtggcgtagtcgcgggctcctccgcgacgagggtggtagcggtagggcgagtgctgcaactcgtccgggtagcgctggtgaagagtgccgatggcgaggagagcggcgctctggcaagcggcggggaaggagtctccacccgcggtgactgtcagcgaagtccgctcagaagagccagcgaggatcactgcagtgacctcccaaccagcgcggggctccgcgtccccaccctcctgctccgggagaggcctggcctggtagtccactccgtgtggataccccagggccacgcacatgcctcggagctccaagacgaagccagtcatgtccaaaccacgacgggtgacgctgccggccatctacaaacaaaaacaaaaagaaaagcaacattttcaaaggtcagattttggcgataaatgaagcagcaagacagagagagactagaggattttcacaaataaccaaggatttttatttttgaaaatattgctaaggcttgggatctacggctcgtcctagggtcaagggtggctctgataccaacttgtcacgaccggaattaacccaacgggcgttccttacgtgcgtgcattaatccttgtcccaggaggcaaggtacaccataagttgatacaattcagagtttaacaagcggaagcgtaaatagttaacttaatacatgggcagcgaaggcccagcacacacaaagacaaacgagaaacagcggaagactagggcgacgaccacaggcgcttgacggcaggcacgagctagacaccaaagccttcatcttcaaggagctcctcttctgggcttgggaaaaatttgagcaagactgagtacaaccaccgtactcaacaagacacacccacaagtgcagaataaatgcaagggagtacaagggaattataatatgaagggttagggttgcagtaaacagcatttaaagacatttagttgctcaaagccattttgtaagcacgattctaaaactatacaatattattaatcaaggccgtgaacccacacgaacctgccttaacccaaggcctacgatgattcagaccgaactggcaacccaaccctgggtcccagctcgtcctaagccaacccaggccatccattccaccttttagttgttaagcaggttttaagaattaaagcactaacttgggtacattgctcggcttgcccataaccgagggcgcggctattcgaatagattctactctgatcagaggtgtacatctttacccacaagacacatcttcctcacgtgcaaccacgtgccacataccaccacggtatacagacggaagacgtgacatagtttccaacccatcctagccatagacaagagtaccgacccaatcccgcctacggccggaacccccgggacaggcaggcaggactgagcccctagcagcaggacaccggccctgtgccatgacatctcgactaccgggccgcagctcgtgtagccttcatttgccctggagaatgtccatcgacccccgacttcatccatctccaatccgtgtacttttgtttatgactagactgagccacaaactaagccttacccactagacatgtggaagtacggtagtgctttgcaacagaggcccaagaccggtccttatatggccgaggtgctactatcaaaaccatgcaccccgagcccagcctaaaaccatttttggggattttgaatagagggggcggggtgaatccaattccacaatactccaacaatttcacagtgtccaggtgatatgagaatttcccaagtctaaagttataaaaccacctaatgttgtctaattaaattgcgaagcatctacctaaatttaaactagggataccacgagtagagtgtccactagttgaggttttgtttaagctagggtgaacaaggtaataataataacaataacaataataatatggtcataacaaaggtaaataggcatggctaaataaaacagtgataacgcgggaatttaaataaagcgataatgcaataatttaaatcaacataattttataaactgggattcaatatgctcaaagatgatgtgacttgccttgctcgctttcccaaccgacggcttcgacttccacgaagagcggatcttccgaagctgcagcgtctacacgaccaacggaaaagaaaaaggcttttactctaataaactccacataacagcagaaacaaagcacaaaaatgggttcttgacttcttaaggaaaaattagagacttgaacggtccaattccgagttcaaatggccaagatatggccatttgaagtttatatgctctttaaatagatatttgcgaatttcttcatttaaatttttaattaaaaatcgaattattgcgtcagccgagggagagggcgcgcggaccgggtccacgggagtggggcccacgcgtcagcctctcggtccacggtggaccgggagcacgcggctggcggcggccggcgccgtgggtcccacgcgtcagccgcacccgcgggcgcaggcggctgacggccgggccccacctggcagccgcggggcgcgcccgaaggcggcctcgccggcacggccgacgggaggcggcacgcccgcgccccgatggtcaccgccggcgaccaccggcgcggcggagcggcacccgagagagaggagggaagggggaagcgaacggagcggtccacggctcaccccggtcgacggcgacgacgggaacggcggccgaaacggaggaaggcggcggcgcggttcgggacgacgaggacgacggtgctccggcggtcgacgggcgaaacggaggcgcggacgaggtcgacggggacgcggcgaagccgatggaggtgacgccgagacgggaggaagtccggagcgacggcggcggcgaaccggagctcgtcggcgacggcggagagagaggaagacggcgcgagcacgattccgacggggagagcgagcggcgagcggcggaaacggatgaggagagcacgggggacgtttaaatagcgtcgggagagagggaaagcggccggaggagatggaaaccggcgcggagatctcggccgccattgattgcgccggcgaactttgcgggcataaaatcgaacgaatccgagggagagagagaggggaaagagggggaaacgggagagggaatcgcggggaataattcccccctcattatggcgcgcggggacggcgggatgcggcggattcggcggcggcgctagggcacgggcgagcggcgggagcggcgggaggaaggcgatgacaggtgggccccacccgtcagcgagggtggcgggcgggcccgcctgtcagcggcgcgcgcgcgggggaggagccgatgggccgcgggggagaggagaaagagagggagggagagaactgggccgagccggcccaagaaaggaaggggggaaagaagacttcttttagggtttttctttttataaaccttttcaactttgtttatttcttttcaattattatttgtgctctgaaaattccactaaaatttatttacgcattttaggcttttaggaaatatacaaaaatcctccaagccttatttgacttttacatttgcacattttaattgttggaggctttcacatgaattttaattattctttgcacaattttcgaggatgaattttagggtcgatttgggacgtgacaacgaccaacggaaaagaaaaggcttttactctaataaactccacataacagcagaaacaaagcacaaaaatgggttcttgacttcttaaggaaaaattagagacttgaacggtccaattccgagttcaaatggccaagatatggccatttgaagtttatatgctctttaaatggatatttgcgaatttcttcatttaaattttaattaaaaactcatttattgcgtca

SEQ ID NO: 25046 - DNA, 1575 bp, Oryza sativa
atggttgtaccggtgtgtggtatgactgtgtcggagcctgtctttattttattggcttaagcaacctgaaccttaatgaacccattttatatcagtaataagttcaataattttggtagtcgtgggtggttagttttaatagtttgttctctctgttggctggtttgttttggggtatttcagatggtgataaccaggagaactgctgctaccggtgatggcaaccaacccgaaggtagcaacaccaacatccaaggcggcccacctccacctcctcccccgccaccaccaccaccaccagacaccaaccccatcctcactcaaatcctcgcccagcaggccaacatgatggctgctttcctccaccacatccaaaatccaccacagcataatgctccacctccaccaccacccccgcagcattctaagctcgccgagttccttcacatccgcccgcctaccttctccagctccaataaccccgtggatgccttggattgcttgcatgccgtggggaagaagttagacaccgtgcagtgcaacgatgaggagaaagtcatctttgccacccaccagctgcaggggcccgcatctctttggtgggaccacttccaggctacacagcccgaggggcagcctattacctgggcccgcttcaccgccgctttccggaggacccatgtgcccgccggagtcatggcccttaagaaaagggaattccgggagttgaagcaaggcaaccgctctgtgatggagtatttgcatgagtttaacaacctggcccggtacgccccagaggatgttcgggaagatgaggaaaagcaggagaagttcttggcaggaatggaccctgagctatctgtgcgtctggtctccgtggattatccggatttccagcgtctggtggacaagagcatccgcttggaagccaagcacaaggaactggagtcgcacaagcgtcgcttggtgaatttccgcaatcaacagggggctaaccaaagggtctgctacaccaatccctatccaggtggatcctcctcgctgcagcagcagcaacctcgctccgcgccccgaccccaattcgtggtgcgcgtcccacagccgcagcaacagcagagttagcaagggacccgtgcaccccgtcctcctgcgccagctgtgcagcctggtcaaggccacagagacgctcaaggacagcagcgtctgtgcttcaactgcttcgagcccggacactttgcggacaaatgcccgaagccgcggcgccagcaaggccaagcgcctccccgctccaacaacggtggtaaggacgtcgctcggggtcgtgtgaaccatgtgactgccgaggatgtgctgacgactccggacgtcatcgttggtacgttcctctttcattccattcctgctaccattttgttcgactctggagcttcccactcgtttatatctgtgcctttcgtgggaagaaatcaactgggggtagaacggcttaggaaccctctgctcatcaccacccctggaggggatatgacagcaaagtattacagcccggccgttcctatagaaatccagggaatc

SEQ ID NO: 25047 - DNA, 2214 bp, Oryza sativa
ttcttcatgaacttaatgaacaaagtgttcatggaatacttggataagtttgttgtggtcttcatcgacgacatcctggtgtactcgcaatcagaggaaaaccatcagcagcatctccgtctggtgttgggaaagctgcgggaacatcaattgtatgccaagcttagcaagtgtgagttcttgttgtccgaagtcaagttcttagggcacgtgatatctgccaaaggagttgctgtggatcccgaaacagtgaccgccgtcactgattggaagcaacccaagacggtcactcaagtccgcagctttttgggtttggccgggtactatcggaggttcatcgagaacttctccaaaatcgctcgacccatgacacagttgttgaagaaagaagaaaaatttgtgtggagtccgcagtgtgagaaagcattccaaactctcaaagaaaagctggtttcctcgccagtgttaatcttacccgatactcgcaaggacttcctggtgtactgtgacgcttcgcgccaaggtttggggtgcgtattaatgcaggaaggtcatgtggtagcctatgcctcacgccagctacggcctcatgaaggcaactaccctacccatgatttggaattggccgctgtggttcatgctctaaagatctggcggcactatctcattgggaatcgttgtgaaatatatactgatcataagagtttgaaatacatcttcactcagtcggatctgaatcttcggcaaaggagatggttagaactcatcaaggattatgatgtgggaattcactatcaccctggcaaggccaacgtggtcgccgacgctctaagtcgaaaaagccattgcaacactcttggcgtccgtggcattccaccggaacttaatcaacagttggaagccctgaacctaagcatagttggtcgtggattcttggctacgttggaagccaagcctaccttgctcgatcaaatccgcgaggctcagaagaatgatccggatatgcatgggctcctcaagaatatgaaacagggtaaagccgctggtttcacagaggatgaacacggaaccctatggaacgggaatcgggtatgcgttccagacgtcagggaacttaaacagttgatacttcaggaagctcacgaaagtccctattccatccatcctggcagcacgaagatgtacttggacttgaaagagaaatattggtgggttagtatgaagtgggaaattgcagagttcgtggccctttgtgatgtgtgccagcgtgtcaaagccgagcaccaacgaccggccggactcctccaaccactacaagtgccagaatggaaatgggatgaaattgggatggattttatcaccgaacttccaaaaacccaaggcggatatgattctatatgggtagtcatggatcgactaaccaaggtagcacggttcattcctgtaaagaccacctatggagggaacaaactagctgaactctacttcgctaggatcgtaagtctgcatggcatccccaagaaaattgtatctgatcggggaagccagttcacctctcatttctggaagaaactccaagaagagttgggaacccaattaaatttcagcaccgcgtaccacccgcagacagatgggcagaccgagcgtctgaaccagatcctcgaagatatgcttcgcgcatgtgtcctagattttgggaagacatgggataagagtctcccttacgccgagttctcctactataacagctaccaagccagcatacagatggcaccatacgaagcgttgtatggccgcaaatgccgggcacccctattgtgggaccaagttgggaaagccaagtgttcgggaccgatatcttgagagaagctgaagcaaaggtcaggaccattcgggaaaacctaaaggtggcacagtctcggcagaagagttatgcagacaaccgacgccgtgacctggaattcgcagtggatgactttgtgtatctccgggtaacgccgttgcggggtgtacacaggtttcaagcgaaagggaagctcgcccctcggttcgtgggtcctttccgcatcattgctcgacacggagaagttgcttaccagttggagctgcccgcctccttgggcaacatgcatgatgtgtttcatgtgtcgcaactcaagaaatgtcttcgagtgccgtccgagcaggccgactcagagcagattgaagttcgcg

SEQ ID NO: 25048 - DNA, 737 bp, Oryza sativa
tatacggaccacaagagtctgaagtatatcttcacccaacctgatctaaatctccgacagcaaagatggttggagttaagcaaggattatgacatgagcattcactaccatccgggtaaagccaatgtggtggcagatgcattaattaggaagagctactgcaatgccctatgcaccgagggcatgtgtaaagaattgcagcaggagcttgaacgtctcaacgtgggaatagtagaacacgggttcgtagccgctctagaagcatggcctacgctcgtggatcaagtcagagcagctcaagtgaatgatcctgaaatagcagagctgaaaaagaatatgaggctcggaaaagcccgggacttccttgaggatgagcatggcacgatctggatgggagaaagattgtgggtgcccgatgacaaagagctgaaagatctgatacttactgaggctcatcagactaaatattccattcatccgggtagtaccaagatgtatcaagatctcaaagaaaaattttggtgggccagcatgaggagggagatagctgagttcgtcgcgctctgcgatgtttgtcagcgagttaaagcagaacatcataggcccgcaggattgctacgacctcttcaaatcccggaatggaaatgggaagaaattggaatggatttcataacaggtctgcccaggacatcatctggccacgattcaatctgggtagtcatgggggctgcaggaat

SEQ ID NO: 25049 - DNA, 2332 bp, Oryza sativa
aaccaagaatttgacttagaaattaaggataaaaagggagtagaaaattccgcagcagattatttgtctaggctgtagatcattgacatgtaggaacaaccaataaatgacttcttgagagatgatatgctgatgacggttcgtgactccagccgtggtatgctaatatagtgaactatatggtatccaagtacataccactaggggaaaatcaatgaaagctgaagtatgaaagtcgtcatcatatatgggatgagccatacttatatcgggtctgctccgatggcttactaagaagatgtgtgccgactgaagaaggacttaagatcatagagcgatgccatgcctcaccctatggtggccattatggtgcattccgcacccaggtcaatatttggcaaagtggcttcttctggccgacaatgtacggagactcaaaagagttcgttagaagatgcacaagctgcgagaggcaaggaggaatcactgctcatgatgcaatgcccctcacatacaatttgcaagtcgaaatattcgatgtttggggtatagactttatgggacctttccctaagtcccgcaactgcgagtatattctggtggcagtcgactacatctccaagtgggttgaggctatgtcgtgcagtgccgcggatgcaaagcatggcaagaagatgttcacagaaatcatcttcccaagatttggtacccctaggatggtcataagtgacggaggttctcacttcatcgacaaaaccttccgagacctcctacgagacttgggagccaaacacaatgtggccactccttaccatccatagatcagcggtcaaatagaaacatcaaacaaacaaatcaagaatattctgcaaaagatggtcaacaaaatgggaacatgatggaaggatagattgccggacgcactatgggcataccggacagcatacaagacacccattggaatgtcccccctatcagatagtctatgggaagtcatgtcgactgttgacagtcgttatcgataagttttgaccgtcaatattatcaaaatagaggagaacttgtagtgcttgcaatgcatatatatgttagattaataatattctactagtattaggtatactaaccttttgcagagaatgaccataaagtggaggagaatcgacatcaacacaaatgataaatcaatcgggcgatgtcgagaatcagacttatgtatgaatgggccaagaacatagaattgacatgacaaactgggccaaaattcacaagtccgcggagcagaacaacggaggaggctgccagccgaaagtgggctagtttgggccagcccctggttcggctgaacctccctcgcctccgttggatccaggttttggctggacggttgagatgaagccccaatgacggtcggagggtattaccgaccattccaaccgcgataaccatcatagttcagctataaaaggagctcctcttctcacttcactcacacacctcaagcaaagctctctcatattctctcaagtttagtttagtagtatcaagctagtataatagaattagagtagaaactcaggagtccggaagccttcggaagtgttcgggtatggctctagtagcttttctcttctcttttgtaagctttgtactattattagaatactcttctatatatatttatggtattgaaatactttccgagtatatgaatgctaactttacattatgttcatgttatactaaatatactgctagcttatctgggagatgctttgctgcgggtataatgtttgcttatgcaattactctatgtcatgacgatgatattagagtagtatctggtagtttagacgtggtgtgtagattacgggatatcattattcggggttatatgctgcggatgagaggtgggctgctgatggtgacagctcagtacgggtatttctaagcgcgtgtatataatcctaagttaattccttggggagagtactcatccgtatttagccccggttgtatggtcatgacgagctgtcgtaaggaactcagcagtcaggtgtggcttctcgaagtactaggaggacatcggatagagggtattagctagtatatcgaaataactagaatgtttgtatattatgtatactagaagtatacgaatagatttcctttctattttttttcagttagcttagatattatattatgagaatgagtagcaaatgcttgtgtgtcactctaccctttgtttatcttaacccctgcttaggttatgattatcacaagtaatatataaattattagtcaagttttctctacatgatcttcccac

SEQ ID NO: 25050 - DNA, 3951 bp, Oryza sativa
acacatggcagtcctaccgatggcgacaccagggtaggcactcgcccctcgcggccccaccaatggctgccccaccgtaggccctgactcccacacaccaagaataaccactatgcagggatactgccttcgctcggctatgtactccgctaggtctatacccatacgagaagtacggttgtacgagggtcgtttcatgcttaacttcatggctcggtccttaactgaccagggacggcactagccttttccggacaccacccaagtaccccagctgccccggtcgaaaacaatgtttaattttgtttctcttttcacaattcatgttatccttgtcatggcaatgtggtgcccacgcctccacatgccgcatctcaactaccctcccctaaggtagttgtccaagcatatagcatttgataaatatgagaatgcatgattctaattagcatgactaagcatttgttcaatgtcgactaaatacacacgttagcagggtttacaatggtcatacaggtaatcaatatcaaggcatggcatacttaacaagtagggcattcatattcacatatgtatagcatgcaattttatttaaatcaacataattttcgcaataggttcaacatgctcaaagattagtgatgatcgacttgccttgatcgcagtcttgctgacccagatcttcattaactcagcaactccttcggaatctaaatttacgtgcgaaagattcgatttgaattcaattagaattcaaattaaatcaccaaaaattcaacattacaaaaataaatagcaaaagtggttccatcagcaagatgttgattttagatgaatttaggttcaagtttcattcaaatccgagctaaaatgagtgagttatgcttgtttaatgattcaaatttgaattaattcaaacaattgtgaaatggcactgtgcagccgagaggggcattattacagtggctgacatgtggggtcaccccatttctttttcctctgtttttattttctatagaaaatgtacagagtcattgacaagtgggaccggccctgtttgaccctagtcaaaaccggttctttaatcccggtgggtcccgcatgtcattgacagtaacttcataatcaatttttcttagattttcctaatctcccggtcccacatgtaatagagtaatttgcattagattaaaagatgattactgtgcactaatcacaatgtggggcccacagctcccctctctgcctttcccctttctttctctctcggtcgtcttctacctcgcgcacgcggctgaacagaggagcagcgcgcggcggtgcgacggcccgagccagaacggctcggcgcgcggtggggaaaggcaacggcgcatcaccggaaacccatcggcggcggcggcgaggcacggcggccacccgacgcgcggcgcgacggcgcgcggcggcatcgagatcgtaagaacggcggcggcgcaatggtggtcgattcaagtgcaaatgacttcgatttaaccatctagggttcacatggagtatagaaaagcaaaaatctagccgatgctacattggaacgaggtctctccacggcgagctcaaccatggcgcggtagcggccggagtcggcatggctacggcagcgcgcaccccaaatcgagggggctgctagcttctaggtgtccaggcaatgctacaggcgcgaggtcttaccacgaagtggcgaaacagcgaagttcgacggcgagtggcgcggcgcggttgaaacaggggcggacggcggtcggcgacgggcgcaggtgttcgacgctcgtcctccctcgcatagcggcctccggctccctccaacagcagtaacggcagcgcgcacaccacctcagcacacccccgccacccacactggccgagaagccctgtggcggcggcgcagccggcgctcaccaggtgttcgacactcggcggcggcgtgatcttgctcctcttcggtggagcaaaagttttagagagaggaaaagtaaatgggagattgagttcggataagaacgagccaaggtcaagtctatataagcgagagggagagcgattccttaatggataatggtgagcgatgacacggctttgtttcgatctctcccaggttctggttcagtgtacaggcgcggcatgattgcctacgcggtagtatgcaggagaggtctcgctagctggagaaaggggcgccgcattacccagcggtcgcaaccgggggtgacaagatggagacgcgacggggacgcgatggcgacaagagcgacggcgatgggcagtggtaacggcttggataggggggcgcagggctatgccctagggtgacgcggggtcgtcgtggcggctgttatccttccatcccgagggcgacgtgcgaggggacgggatgacgcgggcacccgtggcggcgcagcctttggcacgggcttttggcggcttggtcggcggcgggcccacgtggcgtggcatgacgcggtgcggcgcacgggcacgactagtgcggcgcacgagtcggaaggcaggcgcgcggcacggcagcggttggagagggcggcgtcgggtgttcggtcgggttaggcacagatcgaacacctggcgcgcaatgaacagtagcgccaggaaaagaaaaaggaagagaagagaaaggataagggaaaaaggaagggctaatctgccaaatggcttggaattgagttgtaactctatatattttggattcaagaattcaaacatttgatttgaatatttatttggttatttattagttcccaagtgaatttgcttcccactagatcatcccaaatagaaatattttaatttgcaaaattaacttaaataattggggggggggggctttgatagtcctaaaattatttaaaatattcaatgggtccagtactaatacaatagcacgttggttgaacttatttgcataacaaggtattcatgtaaattgtaattattatttagatgcgcatctttactttgatttttccattgagataatttacagtttggcaagcaatatcaaccataacatccatcatgatgcaaaagttttaaaaagttcaaaattttagtgatttttattattgaggatttttaagatgttacaaacctatcccccttaaataaatctcgtcccgagatttcttaccggtcattaaacagatgtgggtattcagtctttagaaattcttgactctcccacgtagcctcctcttctgtgtgattactccattatactttatacatgcgccaaactttggtccgggttctcttctcagcctcatctaatactttcaccggatgctccgggtaggtgagatcactactaatatgaatatctcccaatggggtttgctcctccggtactcgcaaacacttttttagctgtgacacatgaaacacagggtgtacatcggaaatattttctggcagtgctaactgataggctacttcccctcgcctggcaattattggaaatggtcccacatatctcggcgcaagtttccctttgaccttgaacctcttggttcctcgcagcggggacacttttaagtatacgtgatcgcctatattaaactctaaatctcttctccttgtatctgcatagcttttttgtctagattgtgctacttttaaacgatcacgaatcagtcgaactttctcctcagcctccttaattatatcgggcccaaatacagctcgttcaccggtttgaccacattagtggggttcgacaacgtcgaccaaacaatgcttcatttggtgacatctttaagctggcctgataactgttgttatatgaaaattcggcatatggtaggcacctttcccaatccttggtgaaatccaaggcacaagaccttcacatatcttctagcacttgatttgttctttcagtctgtccatctgtctgcggat

SEQ ID NO: 25051 - DNA, 1579 bp, Oryza sativa
atagagtcatagccagccgcggtcttgggcaatccgacgataaaatccatgcctatttcatcctacttccattccggaattttgagtggttgcaacgatcccgctggccgctgatgctcggccttcaccctctggcatacgtcgcatagcgctacgtattcggctacatcccttttcatgttgggccaccaatacgcctctttcaaatcctggtacatctttgtgctgccaggatgcagtgaatatgcaaattcatgtgcttccttgagaattaactttctcaaatcaccctgttcaggcatataaatcctctttttataccacaggattccgttctcattgattgaaaattctttggcaaatcccgcggccatacgctccttaatttctcggacctcctcattatccttctagatttcctctatctgtgttctcaaaagaggttgaatttctagtgaatttacttcaccttgaggaattaaatgtaggttgagtctagccatctcctcttgtaactcaacagctacgtttttgctgcttagatgattgcaccggcccttgcgacttagagcgtcagccacaacgtttgctttgccggggtgataatggattcccaaatcataatccttaatcaattccaaccatcgtctctgccgtaaattgagatctgactgagtgaaaatgtatttcaggcttttgtgatccgtgtatatgtcgcaatgattcccaatcaaataatgcctccatatctttaatgcatgaactacagccgccaattccaggtcatgagtagggtaattctcctcatggggtcgcaattgccgtgaggcataggccacaaccttttcctcttgcattaatactcctcataagccttgcctggacgcatcacagtaaatgacaaaatccttacggttgtcagggagaaccagaataggtgcggtagtcaatttttccttgagctgctcgaagcttgcctggcattgttctatccactcaaatttcttttctttctttaacagttgtgtcatgggcctagctattttagaaaacccctcaataaacctacggtaatattcggccaatcccaaaaagctccggattttcgtcaccgatttgggtgccttccattccgtcatagcctccactttagcaggatccactgctactcctcctgctgatattacgtggcaaagaaaggcaacctccttcagccagaactcacacttgctaaacttcgcatacagttgatgttcccgtagtttctccagcacttggctcaaatgctctgcatgttcctcctcatccttggaatagatgagtatatcatcaataaacactactacaaatttgtccaaatattccatgaacactttgttcataaggttcataaagtaagctggggcgttggtcaatccaaaggacatcactgtaaactcatataatccataacgtgtggagaatgcagtcttaggaatatctctgggcctaatcttcagttgatgatactcagaccgaagatcaatttttgagaacaccttagcccccttcagttgatcgaaaagatcgtctatccgag

SEQ ID NO: 25052 - DNA, 1568 bp, Oryza sativa
ttggctggacgactaggcggaaggcctactgtgacttcgatctcgctttggttggcttttggacagcgagacacccccctctcctcatagatggctatgagttgaagagtagtatgtcattggttcgatgttagcttgcgtgttgtatcctgttgaactgcgtatatgtgcagtccagtgcatcatttgtctgtgtaatgattgtggaactatgtggcatgttatgatattagtaatgatatgttatgttgttcatgagtttgtttcaccatgcttgctatacaaagatcacattaacgaatataataaaaagggtagagatagttaaatatttacttacctagcatgcttcaacagatggctgggcggcgccgtgcaaatgagaacccaccagaggccgatatgaccaccttggctggggttatggctgcacaaacccaactgctgcaggccattgttaacaaccaaggaggccgtggaggctcaagctttggcgagttcatgaggactaagccacccaccttcgctacggcggaagaacctatggaggctgaagattggctacgcatcatagaaaagaaattgactctggttcgggtacgcgaagccgacaaagtgatcttcgcaattaaccagctggagggaccagccggtgattggtgggacacatataaggaagctcgggaagaggatgctggagaacccacctgggaagaattcactactgcttttcatgagaacttcgtgcctgctgcggtgatgcgcatgaagaagaacgagttcagaaggtgccggcaaggaaacacaacagtgcaagaatatctgaaccggtttactcagttggcccgctatgcaacaggggatctcatagatgaagaggagaaaattgacaagttcattgaagggctgaatgatgaattgcgtggacctatgattggacaggatcatgaaagtttccaaagcctgatcaacaaagtcgttaggttggagaatgatcagaagactgtagagcacaaccgcaagaggagacttgccatgaatcgcccaactcaggaggagacttgccatgaatcgcccaactcaaggggtgcctcagcgactgaagggaaccgcttcctcgggatggaagcccaccggggccacaaccaaccgccctgctccatctagcaacttcaacaggtcggctgcaactccacctcgcacaccgaccccaacattggccgctcctagatggaagaggagtggaagttgcttcaactgtggggaacccggacactatgctaacaactgtccacatccaagcaaagctcctatccgcaccggagccaatgcgacggcagttcgcgggaccactacccctgccgccgctcgaggattattcaggacaccacagaccaaccggtctgctaccgggtttggacgcgggcaagtgaatcatgtgcgagctgaggaggcccaagacgaccagggcgtactgatgggtatgttttctatcaatactaccccagtcaaagttctcttcgattcgggcgcatcgcattcatttatatctttgaaagcaagtcgac

SEQ ID NO: 25053 - DNA, 873 bp, Oryza sativa
ggttcgcgagctactgttgtgaaacatttaccgtgccaaccacaagccagcgtgggcaatggctttatcttttgtatagcatgattcattatagtgtgccagactgtgaaggggcgagaagtccattgcctctggttttgagggggagattatgatgcaggaacggtgcactgtgatgagttgtgttgtgcgaggggtattgtcacagttcctttccgaggtaccgtggtggtgctatggcgcatggtaacatgttgtgggattgtgtcttgtgggtacagtggtacacctctgatcagagttaaaactattcgaatagctgtacccgcggttatgggtgagttgaacaatgtttttcgtgattagtcccatattattaatcaatggtaattgtgataattaatgtgactcctggtttggaatggcatattcctggtttggaggtttggtttgttcaaccggggttggttgttcatatgaggttgagcctatgcaacacgggtgtgttgtatggtgttatttaatattgcttaattattcaactgttttactattctcttaaatatttattaaatgctgtttatgcaaatgagctatattatgccatcctttgttatcctgtgcacttgcatatttgctgtgtggcttgttgagtatgtcatatgctcattcttgcaatattcaatcatcagaagaggagtatctcagcgaaggtgatgatctggaggattaagcttgttcctggttaagatgcctggaagtggagtcgccatagctgttccgtagtttgctttacttttgtttttccgctgcgtagaatgtcattctttgagaggaactatccacctctgtaataatttatgggctgcagga

SEQ ID NO: 25054 - DNA, 702 bp, Oryza sativa
aattcctgcagcccagtcccttgttgactctgctgttgctgcggctgcgggacgcgcaccacgaattgaggtcgaggcgcggagcgaggctgctgctgctgctgctgcgaggaggatccccctggatagggattggtgtagcggaccctttggttagcaccctgttgattgcggaaattcgccaagcggcgcttgtgcgactccagctccttgtgcttagcttccaagcggatgctcttgtccaccagtcgttgaaaatccggatagtccccagagactagacggacggacagctctgggtccattcctaccaggaacttctcttgcttctcctcgtcttcccgcacatcctccggggcgtaaccggccagattgttgaactcatgcaaatactccatcacggagcggttgccttgcttcaactctcggaattcccttttcttaagggccacgactccggcgggcacatgggttctccggaaagcggcggtgaagcgggcccaagtaataggctgcccctctggctgcgtagcctggaagtggtcccaccatagagatgcgggcccctgcagttggtgggcggcgaagatgactttctcctcatcgctgcactgcaccgtgtctaactttttccccacggcatgcaaccaatccaacgcatccacggggttggttggagctagagaaaggaggtggaccgat

SEQ ID NO: 25055 - DNA, 941 bp, Oryza sativa
attcctgcagccccctttgacactttgaaggacaagcttacacatacacctttgctacaacttccaaactttggtaagacttttgagttagaatgtgatgctagtggagttggcattggaggtgtgttgatgcaagatggtaagcctgttgcatactttagcgagaagttgcatggtcctgttttgaattattccacgtatgataaggaattgtatgctcttgtacgttccttagagacgtggcgtcattatttgtggcctaaagaatttgttattcactctgatcacgaatcgcttaaatatcttcgctctccacaaaaatgaccggagcaccccaaggtgaagtacttggtcgaatgtaccctttctgcagttgcttgtcaacctgcttcttgacctctgtcgcgtcccaaaacgaccctaaaatatatcctttaaattatgcctagaataattaaaatacttgtgaaagccttcaaaaattaaaatgtgcaaagttaaaagtcaattaaggcttggaggatttttgtatatttcctaaaagcctaaaatgtgtaaataaattttagtagaattttcagagcacaaataataattattaagaaataaacaaagttaaaatgattttataaaaagaaaaaccttcaaaaaaccctccctcactctcttgggccggctcggcccacttccctccccctctctccttgtcacaccctgaaaattcaaaatatataaattgttgtttaattggaatttttagaaataattttaaaagtcttgaaaagaaaatctaattttaattaataaattccaatataaaatggggccagataaaatttcattaaatactttgcttaattctataattcctagatttttctgggatttatttgagctaagaaagtatttgtaataaatggaattgcatttaagaaataatt

SEQ ID NO: 25056 - DNA, 2373 bp, Oryza sativa
cggggcgcgccagaaggcggcctcgccggcacggccgacgggaagcggcgcgcccgcgccccgatggtagccggcggcgacctccggcgcgacggagcggcggccgagagaggggagggaagggggaagcgaaggaggcggtccacggctcaccccgggacgacgaggagggcggaaacgacaaccggagcggaggaaggcggcggcgctccgacggtcggcgggcgaaacgaaggggtggacgaggttgacggggacgcggcgaagccgaaggagatgacgccgagtcgggaggaggtccggagcgacgacggcgacgaaccggagctcggcggcgacggcggagagagaggaagacggcgcgggcacgaatccgacggggagagtgtgcggcgagtggcggaaacggaggagcgaagcacgaggagcgattatatagcgtcgggagggagagagggcggccggaggggaaggaatcggccgcggaaatctcggccgccattgatgacgccggcgaggatttcgggagagattccaaacgaatccgagggagagagagagggaaaaatggggggaaagggagagggaatcgcggggaataattccccccccactttaatgcgcgcggggatggcgggatgcggcggattcggcggcggcggcggcgctagggcacgggcgggcggcgggcgcggcgcgaggtaggggatgacaggtgggccccacccgtcagcgagggtggcgggcgggcccgcctgtcagcggcgcgcgcgcggggagggagccgatgggccgcgggggagaggagagagagggagggagagttgggccgagccggcccaagaagggaagggggggaaagaagacttttagggatttttctttttataaaacctttttaactttgtttatttcttctcaattattatttgtgctctgaaaattccactaaaatttatttacgcattttagacttttaggaaatatacaaaaatcctccaagccttatttgacttttaaatttgcacattttaattgttgaaggctttcacatgaattttaattattctcggcacaatttcgaggatgtattttagggtcgttttgggacgcgacattagtactccgagtaaccaagcactctcatcacaacgtagcccctctgtcagaatagagattcaaggagtaccatttctggccaaccttattctgttagaatccaaagatcttgatgtcatcctagggatggactggttagccaaatataaaggtgtgatagattgtgccaacagaaaagtaactctcaccagcaatgatggtcaaattgtaactgttcatgcattgccctctgaacctttaaggtcgagtctaaaccaaataactttggaagagattcccatagtacgggagtaccccgatgtgttccctgatgatttacctggtatgccgcctaaaagggatataaaattcagaatagatctgataccaggaacaactctgatccataagagaccttatagaatggtagccaatgaactagcagaagtcaagaggcaagtagatgatttgcttcaaaaaggatgcatcagaccaagttcgtctccatggggagctccagtaatttttgtggaaaagaaagatcatacctagaggatgtgtgtggactatcgtgcactaaatgatgtgactatcaagaataagtacccgctgcccagaattgatgatttgttcgatcagcttaaaggtgccaccgttttctccaagatcgaccttcgatcagggtatcaccagttgaggattaaagaggaggatatacctaagacggcttttaccactaggtatggattgtttgaatgtactgttatgtcttttagacgtaccaatgcccccgctttcttcatgaatttgatgaacaaggtgtttatggaatacctagacaagttcgtggttgtctttattgatgacattctcatttactcctgaaccatagaagagcatgaagaacatcttcgtcctgcactagagaagttgcgagaacatcagttgtatgccaagtttagcaaatgtgaattttggttgtctgaagtgaagttccttggtcatgtcatctcaactggaggagttgccgttgatcctagtaatgtggaatccgtaaccaactggaaacatccgaggacagtttcagagatccgcagtttcctgggtctcgcaggttataactggaggttcatagagaatttttccaagattgccaagcccctgacacgactgcttcagaaagatatgaagtacaagtggtcagaagagtgcgagcagagttttcaagagttgaaaagtcgcctaatatcagcacccattttgattctgcctgat

SEQ ID NO: 25057 - DNA, 2181 bp, Oryza sativa
ggagaggagagagagggagggaaagttgggcgagccggcccaagaagggaagggggggaaagaagacttttagggatttttctttttataaaacctttttaactttgtttatttcttctcaattattatgtgtgctctgaaaattccactaaaatttatttacgcattttaggcttttaggaaatatacaaaaatcctccaagccttatttgacttttaaatttgcacattttaattgttgaaggctttcacatgaattttaattattctcggcacaatttcgaggatgtattttagggtcgttttgggacgcgacaactaccagggcaagcagctcccggagcaggagggtgacgatgcagagccccacgctgcttgggaggtcactgcagtgatcctcactggctctcccgagaggacttcgttggcagtcaccgcgggtggagattccttctccgccgcttgccagaacgccgcactcctcgccatcggcacttttcaccagcgctacccggacgagttgcagcactcgccctaccgctaccaccctcgtcgcggaggagcccgcgactacgccaccttccgggatgctagctcggaggatgacgctaccatcatgcacctggcacgcatggtggaggcgtacgacgtggcccgtatcgacttccatcatatggtgcgccgtgggatggtcgagaacaacatgaagatcctagagctgcgtcaggagaatctgcagctcaagaaggacctagacgcagtggaggcgcagctgcatcagctcaagatcgcccagggagagatctgccgccccaagcgtcgccgcgtctgccgcagccagaagatcaccgcccgcaagagcacctccaggcctgagcttgttcgtcagtccctggcgtggacttgcttcgtcgagacccctcgtgccgagcctgcgcccgtggttccccaggagggggaagcctccggcgttggtagctcggagggtgcgctgttgctcaccttccgtcctggcccgtcgcagcgttagatgagcagttagtaggcttgcgcgtgtgttctttctcgtttgtcttttttggtttgtgtggggcatggttatgccggtgtgtggcataactgtgtcggagcctgtcttattttatttgcctaagcaacttgaactttaatgaaccaatttaacagcggtaataaatttaagaattatggtagtcgtgggtggttagttttaattgttagctctttctcggtttgctggttctgtgtggggttttcagatggtgacgaccaggagaaatgctaacaccagtgatggcaaccaacctgaaggcagcaaccacaaccaccaaggcaacccacctccacctcctcctccgcctccaccaccaccaccagacaccaacgccattctcacccaaatcctcgcccagcaagccaacatgatgaccgctttcctccaccacctccaaaacccgccacaacagaatgctccaccaccacccccacaacactctaaactcgccgagttcctccgcatccgcccacctaccttctccagctccaacaaccccgtgaatgctttggattggttgcatgccgtggggaaaaagctagacacggtgcagtgcagtgatgaggagaaagtcgtcttcgccgcccatcagctgcagggacccgcatctctctggtgggaccacttccaggctacgcagccagtgggacagccgatcacttgggcccgcttcaccgccgctttccggagaacccatgtgcccgctggagtcgtggctcttaagaaaagggaattccgagagttgaagcaaggcaaccgctccgtgatggagtacttgcatgagttcaacaacttggcccgttacgccccagaggatgtgcgggaagatgaggagaagcaagagaaattcctggcaggaatggaccctgagctgtccgtccgtctagtctctggggactatccggatttccaacgactggtggacaagagcatccgcttggaagccaagcacaaggaactagagtcgcacaagcgccgcttggcgaatttccgcaatcaacagggtgctaaccaaagggtccgctacaccaatccctatccagggggatcctcctcgcagcagcagcagcagcagcagcctcgctccgcgcctcgacctcaattcgtgg

SEQ ID NO: 25058 - DNA, 2401 bp, Oryza sativa
ttcccccttccctcccctctctcggccgccgctccgtcgcgccggaggtcgccgccggtgaccatcggggcgcgggcgtgccgcttcccgtcggccgtgccggcgaggccgccttcgggcgcgccccgcggctgccaagtggggcccggccgtcagccgcccgcgcccgcgggtgcggctgacgcgtgggacccacggcgccggccgccgccagccgcgtgctcccggtccaccgtggaccgaggggctgacgcgtgggccccactcccgtggacccggtccgcgcgccctctctcccggctgacgcaataaatgggtttttaattaaattttaaatgaagaaattcgcaaatatccatttaaagagcatataaacttcaaatggccatatcttggccatttgaactcggaattggaccgttcaagtctctaatttttccttaagaagtcaagaacccatttttgtgctttgtttctgctgttatgtggagtttattagagtaaaagcctttttcttttccgttggtcgtgtagacgctgcagcttcggaagatccgctcttcgtggaagtcgaagccgtcggttgggaaagcgagcaaggctagtcacatcatccttgagcatattgaatccccgtttacaaaattatctttaatttaaattaatgcattatcgctttatttaaattcccgcgttatcactgttttatttagccatgcctatttacctttgttatgaccatactattattgttattgttattattaccttgttcaccctagaataaacaaaaccccaactagtggacactctatttatggttccactagtatgaatttaggtagatgcttcgctgattaaattagacaacattaggtggttttataactttagactttgggagttctcatatcattcggacactatggaattgttggttgatggtggaattggacatacacctctcttcctctttcaaaacccctaaaacctgttttcggtggggtttgggtgcatgccagttgtgggaagtagcaccccggccactataaggattaagctcgggcctctgttgcaaagcactaccgtacttccacatgtctagtgggtaaggcttagtttgtggctcagtctggtcataaacaaaagtacacggattggaaatggatgaagccgggggtcgatggacattctccagggcaaatgaaggctacacgagctgcggcccggtagtcgagatgtcatggcagagggttggtgccctgctgctagggggctcagtcctgcctgcctgtcccgggtgtcccggccgtagggggattgggtcggtactcttgtttatggctaggatgggttgggaactatgtcacgtcttccgtccgtataccgtggtggtatgtggcacgtggttgcacgcgaggaagatgtgtcttgtgggtaaagatgtacacctctgatcagagtataatctattcgaatagccgcgccctcggttatgggcaagccgagcaatgtacccaagtcagtgtttcaattcttaaaatttgctcaacaacgaaaatgtggaatggttggcctgggttggcttgggacgagctgggacccagggtcgggttgccagttcggtctgaatcatcgtaggccttgggttaaggcaggtccgtgagggttcacggccttgtttaataatattgtatagctctaggatcgtctttacaaaatagctttggccaactaagtgacttttaaatgctgtttactgcaaaacttaacccctatattattaccccttgtacccccttgcattaatcatgcatctgccggtgtggcttgctgagtactgtggttgtactcattcttgctctatctttctcccccccccttcagtaagagaagctttggagaagatgtcttaggaggagtcttggcttataccccagttgagcgcctgtgaagatggagccgtaggcccgctagtccgctgctgtttatttttgattgtcaggcctgaagcgcctttgtaataatgtaaatattatcgatataataaagatgtgtcttttatatcatgtttgtgtggtgtaccccggcttttcctgggacggggattaatacactagcgttcgggaaaaggcaattttcccggtcgcgacaagctggtatcagagccatctcgactgtaggataagccaagtggataaaacctaaggacatattttataaataaaactatttgcgaaagttccttttttctccttcccctaatgctatttgcaaaaggtttactccttttcttccttcttcaaatttcaactagtactagatggtcaggtcagtgaagaagaagacatcgtcagttgtttgccgaagctccggaagactgcaggatccgctagcgaag

SEQ ID NO: 25059 - DNA, 1495 bp, Oryza sativa
tctccagaatcaaaatgagcagccacgcttgtggttttcagttcactacttatcattgtgtaatcgaaagtttgcagcaatcatgtagtaaataaatatattcatgtctataaacagtgagcttgctatgtttatggatgattcctgttgaggatacaatgtaccgatgttaagcaccttccctttttgtttaaggcagggctttgtattcatgtaataagggagacatgtgtaataaaagcaagttctaggagggttattttggaagatgctgatatggaattatgtgtataattgtttactgtcaaaggagacctagggtctcatttcagaggaactatgttctaacctcgagttaataaccaacctgatgatagaaaagaaaatgccgagtccgggaagatatctgttgattcaattgtcaaggaatgggtcatttcgccgacaagtgccccagaccaagaaacatagctgccagcacgtcagtccacgcaactccttgcaatcagaagcttgctcctcagcgaattgtcatccatgcatcccgaagcagtcctatagaccacgttgcaacaactccaactccagcgagtgcattaccacaaggtgtcaatgctcaatttcagcccccgccatcagttgacaagacagaggccagtatcggcattgtacctttgaatgttccagcacagcagccaaagaaatcaagtacaagatgaagaacccgagcgtaagaaagctattgtctgttacaaactgtagtacctgttaaggaagcagacatgccaatcgccaagtggtcactggagcaaatgcagtacctgataagcctagcgctagtcaggagcaaccataatactcttatatcagtgttcaaatacttttgttttatagttgttccccgtcaatcatgtaataacagagaaacatgagataatgaatgagtttgataagcttatgaaggatccatgttaagagtgcaagtgctgtgagttgtgcacattttgtagttgattagggagacctagggtctcatttccgtaaacccataatctgttaggaatcaaatagcctagcgattgatggcgaagaaaatcaagtgatcaaccaaagaggcatttgtttggactaagagtttcagatgtgtctcttcggatcaaaggcaacaatcgtcagtctagcttttgacgaactacttcagggtttctctgaaagacagcacgcccaaggacctcattgccccagaagcatcctcaacacccggagcgaagagtacctggttgagaaaggtcgaaaggtgattaatggaagagatcggaaaagatgtttggttactgggaaaagaagtaggtcgaaaggtgattgataaaggataacgagaaccatgatttgtgtcactcgaggaagactcccgatagcaaacaaccctacaacagttgccctgtcattaaagtaggtgaattcacgagtaagagagatgaccacaggtagaagt

SEQ ID NO: 25060 - DNA, 4028 bp, Oryza sativa
aattcctgcagcccgtctacagaggtcagagtaaaatcacatctaacaacgaagcttcaaatttggccggataacgatcagacaataagaagtccagcagtaaaactatttgggaagacgtcaaagtatgtcaagtgggataagttggttctcttgggaagcataattcaaaggcaaagttatcgaccctggcatcaaatagcagaagtagctattacccggagaccgggaaagctaatatgagacagttggtggcaagttagaagtgaatgacaagcatgatattcttatgatgacaaacctggtatcctagtaatgacaagctagtgttgacgcatgacatgaagtggtgacttgtatgaggttgactccgaagatatgaatcatgagaagttctggaatggaagcatcattaaactaccgcaacctagtctgagtcagccaaaaggtgcaccctggttcaagtcaggtgaagagaagattccatccgcaacaggaggtcaagccaagcagttccgagtggtgaagttttgctggaagtttgtcaagacgcaacggaagaagtcagacaagaagagaagaccgcccaacctatcttcttgctagcctcctcgaatctcggggacgagattcttgtaaggggggtggatttgtcacgtcctgataaattcatcccgaaataaaaatcattttctaaaaggaataatagaattaattaaaatccgaaaagaaattggcaaacactaaaatacgtacaagaaaaattcaaatgtgacccggagaatttttgttaaattctccttggtctaaaaggagccctcaaattttagtggaattttcagagcacaaataataattgagaagaaataaacaaagttaaaaaggtttataaaaagaaaaaccctaaaagaagtccttttcccccccccttcccttcttgggccggctcggcccacttctctccctttctctcctctctccccgcggcccatcggcacctcccccgcgcgcgcgccgctgacaggcgggcccgcccgccaccctcgctgacgggtggggcccacctgtcatcgccttcctcccgccgctcccgccgctcgcccgtgccctagcgccgccgccgccgccgaatccgccgcatcccgccgtccccgcgcgccttaaagaggggggaaatattccccacgattccctctctctttccccccgtttttccctctctctctccctcggattcgtccggattccatcccgcaaacctcgccggaacaatcaatggcggccgagatctccgcgccggtttccatctcctccggccgctttccctctctcccgacgctatttaatccacccccgtgcctctctcctccgtttccgccgctcgccgctcgctctctccgtcggattcgtgctcgcgccgtcctcctctctctccgccgtcgccgccgagctccggtttgccgccgtcgtcgctccggacttcctcccgactcggcgtcgcctccatcggcttcgccgcgtcctcgtcgacctcgtccgcgcctccgtttcacccgccgaccgccggagcaccgccgccctcgtcgacccgagccgcgccgccgtcttcctccgctccggccgtcgtttccgccgccctcgtcgtcccggggtgagccgtggaccgctccgctcgcttcccccttccctcctctctctcgggtgccgctccgccgcgccgttggtcgccggcggcgaccatcggggcgcgggcgcgtcccctcccgtcggccgtgccggcgaggccgccttcgggcgcgccccgcggctgccatgtggggcccggccgtcagccgcccgcgcctgcgggtgcggctgacgcgtgggacccacggcgccggccgccgccagccgcgtgctcccggtccaccgtggaccgagaggctgacgcgtgggccccactcccgtggacccggtccgcgcgccctctctcccggctgacgcaataaatgggtttttaattaaaaatttaaatgaagaaattcgcaaatatccatttaaagagcatataaacttcaaatggccataacttggccatttgaactcggaattggaccgttcaagtctctaatttttccttaagaagtcaagaacccatttttgtgctttgtttctgctgttatgtggagtttagtagagtaaaagccttttcttttccgttggtcgtgtagacgctgcagcttcggaagatccgctcttcgtggaagtcgaagccgtcgtttgggaaagcgagcaaggcaagtcacatcatccttgagcatattgaatcccagtttacaaaattatttttaatttaaattaatgcattatcgctctatttaaattcccgcgttatcactgttttatttagccaggcctatttacctttgttatgaccatactattattgttattgttattattaccttgttcaccctagaataaacaaaaccccaactagtggacactctactcatggcaccactagtttaattttaggtagatgcttcgcttttaattaggtaaccttaggcggttttacaactatagactttgggaaatattcatatcacctggacactatggaattgttggtttatggtggaattggacatacacctctcttcctctttcaaaacccctaaaacctgttttcggtggggtttgggtgcatgccagttgtgggaagtagcaccccggccactataaggattaagctcgggcctatgttgcaaagcactaccgtacttccacatgtctagtgggtaaggcttagtttgtggctcagtctggtcataaacaaaagtacacggattggagatggatgaagtcgggggtcgatggacattctccagggcaaatgaaggctacacgagctgcggcccggtagtcgagatgtcatggcagagggttggtgccctgctgctagggggctcagtcctgcctgcctgtcccgggtgtcccggccgtagggggattgggtcggtactcttgtttatggctaggatgggttgggaactatgtcacgtcttccgtccgtataccgtggtggtatgtggcacgtggttgcacgtgaggaagatgtgtcttgtgggtaaagatgtacacctctgatcagagtataatctattcgaatagccgcgccctcggttatgggcaagccgagcaatgtacccaagttagtgctttaattcttaaaacctgcttaacaactaaaaggtggaatggatggcctgggttggcttaggacgagctgggacccagggtcgggttgccagttcggtctgaatcatcgtaggccttgggttaaggcaggttcgtgtgggttcacggccttgattaataatattgtatagttttagaatcgtgcttacaaaatggctttgagcaactaaatgtctttaaatgctgtttactgcaaccctaacccttcatattataattcccttgtactcccttgcatttattctgcacttgtgggtgtgtcttgttgagtacggtggttgtactcagtcttgctcaaatttttcccaagcccagaagaggagctccttgaagatgaaggctttggtgtctagctcgtgcctgccgtcaagcgcctgtggtcgtcgccctagtcttccgctgtttctcgtttgtctttgtgtgtgctgggccttcgctgcccatgtaataagttaactatttacgcttccgcttgttaaactctgaattgtatcaacttttggtgtaccttgcctcctgggacaaggattaatgcacgcacgtcaggaaagcccgttgggttatttccggtcgtgacaactaaccatcaaaggacgtctaagatcttctacttccatcccatggtttccagcaaaactcatagatagaaaggaatgcgtagcaccagaatcgaaaagcactgttgcaggaactgagttaacagggaacgtacccaaaatcacatctggagcacgttgagcttctgcagcagcaacatggttgacacgtgcctttgtcgctggtgc

SEQ ID NO: 25061 - DNA, 3681 bp, Oryza sativa
cgtgtaacctctctccgccgcttgccgctgactccagccgcgtcgcgccgccgcttcggtcgacgccgacccgcgccgttgcctccctcagctccgctaggacgaggaggacctcggccgccgcccctcttcgccggaaatccgccggagctcctccttcctcggtcgccgatcgaggccgagcccgtccgccccatcccgagcgacgcccgtcgccagagctccgtcgcgacgtcttcctgaggagccccgccgccaccgttccttgccgtcggccgccccttcgccgtcgtgcatctcggtgagcactccacttcctctcccttttcctccccttcgtcggccgcctcccgggtgtcctcacgacgtgctgccgccgccggtggtcgtccgaccgggtcgctgccgccgcgctccgcgctccgtgcccgcgccgttgctggtggtgccgggcagacggttgccgcctaccccttgccgcgccgccgcgcgccgtcgtttggctaggccggctttgtgccgtgccttgccccagccgcgccgcccggctgtccccagccgtccgatcggccttggccgatctgggccgtccacgtggtggacgcgcacccgaggccacgtgtggacttggtccaccgtgcgccgcccctttgtgccgctaacgtgcggggcccgcctgtcggcgctggttccccttgctgacgtcagcaaatgccttttcctttgagaaattaatcatttaatacgcaataaattcgttaataactctagaaattctcttaatggctcaaaacctctaaaattcatatctaattcattcgaactccgaattgagccattcaacttgcaaaattcatctaaaattgagctcaacatgtttgtttactttttatgtactatttccttggtttttattagagtttttcctcgttttgcgtgccagcgtgtagaatccgtcgtttcggaagtccgcggtcgcgaggaaaagagttcggaagattgtttgaagaagcaaggcaagtcacacattccccttgagcatgttgatcccaatttacaaatgttttactgtttgcaaataaatatgcatattttgctaattacatggggtcagggtattacctatctgctcgcttgtgccatgtttacttgatatctgttctttgtcaactttgggtaatgaatcgactagctcatgttacttatgtgacctagctagaactatatgcttagccatgcttaattaccactagctcagttgatgggataattacagtattagacctttttagtatcagaatgagctgtgtgctcaagacatctggccatgcttcatggtcataattatccaactaaaatgcgactgaatggtgggctgtgggtgcatggttttgctagtcgcacccatggcaattaaggaccggttcgcgggatgccctggaagaacttatcgtacttaccacaagccagcgtgggcaacggctgggcttgtagtgtagctttcctctagacgacacatccaggcaagggtgggcgtgatggagtttggatgggccctgcgacggcctatgcggcttccggattcacctaggcacgagaggggactgcccgctgccttgcgaggagtgggggtgaaacctgaggtgtggtgtgcttggttagagggggttatgcgaagggtcctgtcacggcctctttccggtatgtcgtggtggcatgtcggcgcacggaaacgtgtcgtggggctgtgtcttgtgggtacagttgtacacctctgatcagagtaaaactattcgaatagccgtgcccgcggttatgggcggtcgaccagattcaccgtgattagtcccatcttaataaatcgacccaatacactgtagttcaggtgggttggttgggcctgttcaatgtggtgtagcgttgatcagtggagatttaaagttactttaattactcaactattgtactgttttgctcaataaaatattttacaaccgcctttatgcaaatagccacaaaccgtccttgtgttccccttgcacgtctgcatcgttggtgtggcttgttgagtacggtggttgtactcagccttgctattattcccccttttcagaagtgtagtgcttctgagctgaagacgaagttagaagaccaaggctcagaccccagttgagttttgcctgtggagtggagctaaagccccgctaggatcgcctttttccgctgctgccgttctctttcggtgtgaggactaagtgcctcttctgtaagtatttacgttttatttacgttgggaactgtatattacttgtcgttttgtgtaccctggctggtcctggacagggatttaatacgcaaaatagtctggaaatttgggttaaatttctggacgtgacaaagtggtatcagagccaactcgactataggttgagccaaacggtcaaaccctaaggacaagctttctgaaaaccctatttgaaaaatgtctcccctcgcccttcggcttttctttgcgaaacagtttttcaaaattctcctccctgtccctccaattcttatagttgttaaaccgtggaggataaaccgtcagctttgtgtctgttcggaagtcaagtcaagcatcaagcttcatgcagcaaagagcgggaaggtccgcccagagtcgtcatcccgcgaaggtcaaggagagttttcctggagtttacctaaacccaatccttcctggaagagtagtttcgttagctgctagggcgtgtgttgtttgcttgtgtgtaggggtatggtttgcatcattggtggggatgcgaccatactaggttgtttgcttaagcaacttgaacaataaaagtctactcacaacagatcagtaggcaagtggtttagtacctcatctctagtaatccctctcattccctccccctctctctcgtgcctgcagcagatggtcagtgtgaggggcaatttcaacggatcaggatcccgtcagtttcatggatcaactcagctcaattctataagcttcccacgtcaacctctcaaagatcagccacaaccccaagtcatggctaatcagactcagacagtggaagagttgttacagcagatgcgacatcggtaccagatctatctgatgcagcagatgcaacggcaatgtcaggagccgcgtcaagtccaccagccacaaatgcaagtccaggtgccagcccggaacctgaatcagagtcagagtcaggagttcccaatatcggcacctaagacccctgtcaaagtgctgtccagatccccgaagataacttcagccaactcaccgtcggaccaaaggaaaataagtgctacctgttatgactgtggtgagcaaggtcattatgtaaggaacggtccatggaagatgttcgccaggtcacctgaaaaatacaagaagcagtgcccagaaagtaaccaagctccaagtcagtctaccgaccagaaggatggtactttgcagcccaactctggagcgaacaggacagtaaaatggaagatggataatggtaggaccatgatcatcaccagttcagaatttactcctgaagacgcagcaaggatacccaagcgtcagaaaggaagaaataccttccgtggagcacgccagctaacccgacatctcataaagtacggtccgcccagacccgaagatgatat

SEQ ID NO: 25062 - DNA, 2925 bp, Oryza sativa
ttcctgcacccctggtgaatacacccattactcacatgaatgccctttgaggaaggtcacatgtttcctgtgtgagggaaccgatcatgtgcctaaggattgtcagcggaactcggtcctagctttgaccaagaaagaacaagggacaaccgtgcaacccattcgtcaaccaatggcagtcgacgacatcagtcacaatccttctgctcttcctccaattccagcccgagtggaagccaaccatggaagaagcaacgtcgctagggatgttcataaatcactacttgttccagtttcagctgtcaatgtgcataaccagaagcttgcacctcaggaccaagcaagtcggttttgtctcaattgtcgtaagccaggacattgtttcagtgattgtcctcttccaagagcagcaaaggcagttcatcgtgattcacaagttaccagcactgcccacgacaccaatcgacacctgaatgtgcaacctccgcctcaacggattatcgtcaagggcaccgtcagaggccgcattgttccaccggccatcgtttcaagcctacagcaccagcgccagcagggtaagcaatgccaggagaacaacagctcgctacagttacaaaggggaggtacgctccttcgtcagcacccgcagcaagtgtcgccagcaccaggtcgctcgactattgtcagttctagcaatgcacctcgtattgctccaattcggaggtccatcggcaaatcaccgcttggtaaccccacgggcaagaagatcctacctgttacagctgtcaagacagttgccactccaccatcaaagattagcaagcagggcaacgttcccggtgaagcttcagctagtaggagttaaagaacgagtcagtcaggttcgaacaatggaagcaattgcagctctagtcaagccctttacttttccatcccagcagtagccttcaagtgtttatctttgtcgcatttcatcttgtacatagaagtttatggcagttatctaatgaaaagggaatattgaataaagtatgagtcaattagttttgctctccacttatatggtccattttgagcatgccaaagcaagttaacctgtgtatctgtcagtgctacaagaaaccaagagtttctcttctgactcatcgcaattttgttgagctcccaaaaccgatttgcgagccaatagaggaatggtttaccaacggagtgaaaatgattagaccctcaacactcgacatgatgagatctctctaaaggcagtgtcagtggtactcaaatgaaaagagtaatggaatatttgaaaaacgacatcatataaagaatcttgagaactttctaaccttggaagctgttagggggttgtaatcgacagttacaccctagtggtgcgagcatgaattcagtatgtgtttccttagttcaaggcaaccagtataagttccaggaatcatttcaaggtttctcagaagttgaaaaaaaaaaaaagaaattgttccatacatgggtcagaagtatatagagtcaagtccagaaatgtgtagtcaagtagggtatatggcagagtatccccttttaacggatcatcttcaccaaaaatatgaaagcgaagttgttatgatcaaagagcagaaactcttggcagcatcaaagccagtttccgatagttgttcagattgcaatattttccggaaaactgttgcaggatctatggtccgtcaacccaggaagagtcagcaaaggatggtcgaagaagtgaaatgtcatgccatgggaaggacctcttgagttcgatctgttaagtgatcagtgcttgtttcaaggaaggtcaactatgcaatctgtttaggtatatgacaacaaaaatcaagtcagaaccaagacagttgtaccagcagttagaactggttggggaagtagtcaagagttagtatgatcaggagctaaatgagaatttatgtatgtggaatttcctatcagcaactgagggttaagttccaaatcttgttgggatgatagtgcgtcgtcattgctctattttgatgaatcggtgaagtttcagttttcaaagtgagggtctttgtaagtccgagaagtgttggttattttccaaggacaatagtccagttgtttccagtcaggcgaaagtaagactactccctgtaaggggggtaggtctcggagatgagttttggctcacctcatcgctgtttcagttgaaggttcaacccactgcaacaatccgggtagtacttgaagaagtcagttgcaaagtgtcagcagagttacatcgattacaagttatctgattgaattctgaggtacactggtgaggcctggtcaacagctcagctttgagaagcagcatcagggacggttgcagttcagacgaaagacagttcaagcaggtttcctggaattacgtgtcattcgagtcaggacccgttcaagcggacgtaggatcaatgagttacaaatggtcgatgcaagtttcaccctcttctaccagcttggtgaattgtcaggttattaaattgctagtattgacagttcagcccaggataagtaagttttatgagtatctgcagtcctagtctgcgtcagttcaagcagaaccaatcaattcaggtttgggaagcaacgggacaacagtgttgaatccagccagatcgctcgtataggtttgatcagctaatcggtcgtgttgggtaccagaactccagggatctaatccgatgataccagtcagttcagtcgtttggatcaaagtaacagaaaggtcaaatctaacctgttcagttatgcaggtttggtccatcaagcaatcagatagttgaatcagaaagagtgtcacgtcccacaacgaccctaaaattcatcctgaaaattgtgcaaagaataattaaaattcatgtgaaagcctcc

SEQ ID NO: 25063 - DNA, 1819 bp, Oryza sativa
ctgcagcccagccttcctgtcttttccaggctagcgcttacacatgttgtatggttgcaaaacctaattataataatccgcaaatctccatataacagcattaaacttcggatgatcatctcttggtcatacgaaccccgaatcgacccgttcaagtctcctaatatttgttataacctaaagaagcatgtgctttcttttttatgtattgttatcgcttctttacaggcttatagctttgcatgtgtgcttcgcgtagtttctgtcgttccgaaagttcccgaagcgtggtttgctgtcacgaccggaaataacccaatgggcattccttacgtgcgtgtattattccttgtcccaggaggcaaggtacaccaaaagttgatacaattcagagtttaacaagcagaagcgtaaatagttaattattacatgggcagcgagggcccagcacacacgaagacaacgaataaacagcggaagactagggcgacgaccacaggcgcttgacggcaggcacgagctagacaccaaagccttcatcatccaggggctcctcttctgggtttgggaaaaattgagcaagactgagtacaaccaccgtactcaacaagacacacccacaagtgcagcataaatgcaaaggagtacaatggagttataatatagggggttagggtttgcagtaaacagcatttaagagacacttagttgctcaaagctaaatttaaaacgtgatcctagaactatttgatattattaaacaaggccgtgaacccacacgaacctgccttaacccaaggcctacgatgattcagaccgatctggcaacccgaccctgggtcccagctcgtcccaagccaacccaggccgaccattccaccttttagttgttaagcaggttttaagaattaaaacgctaacttgggtacattgcttggcttgcccataaccgagggcgcggctattcgaataggttttactctgatcagaggtgtacatctttacccacaagacacgtcttcctcatgtgcaaccacgtgccacataccaccacggcatatggacggaagacatgacatagtttccaacccatcctagccatagacaagagtaccgacccaacccacctacggccggaacccccggacaggcaggcagaattgagcccctagcagcaggacaccagccctgtgctatgacatctcgactaccgggctgcagcccgtgtagccttcatttgtcctagagatgtccatcgacccccgacttcgtccatctctatccgtgtacttttgtttataaccagactgagccacaaactaagccttacccactagacatgtggaagtacggtagtgctttgcaacagaggcccgaagaccggtccttatgtggccgaggtgctactatcaaaaccatgcaccccaagcccagcctaaaaccattttgagagttttgaatagagggggaggtgtgcgtccaattccacaataatccaaccattccatagtgtccaagtgatatgaatattcccaaagtctagagttacgaaaccacctaatgttgcctaattaatcagcgaagcatctacctaaattcatactagtggaaccatgaatagagtgcccactagttggggttttgtttattctagggtgaacaaggtaataataacaataacaacaataataaggtcataacaaaggtaaataggcatggctaaataaaacagtgataacgcgggaatttaaataaagcgataatgcaataatttaaatcaaagtaatttcacaaagtgggatccaatatgttcaaagaa

SEQ ID NO: 25064 - DNA, 1360 bp, Oryza sativa
attcctgcagcccgattttgcctgatccaaagaagggtttccaagtgtactgcgatgcatccaagcttgggttagggtgtgttctgatgcaagataggaaggtggttgcctatgcaactcgttagttaccctactcatgatcttgagttagccgcagtggttcatgcgttgaagatttggtgtcactatctttttggtactcgtacggaggtgtatacggatcacaaaagtttgaagtatatcttcacccagccggatctgaacatgagacaacggaaatggttggaattgattaaggattatgatatgggaattcattatcacccaggaaaggctaatgttgtagcagatgctctcagtaggaaaggctatagtaatgctacggaaggacgacagttgccgttggagttatgcaaggaatttgaaagattaaatttgggaattatcagtagagggttcgttgcagccttagaagcgaagcccactctcattgaacaagttagagaagcccaaattaatgatcctgatattcatgagatcaagaagaatatgagaagaggaaaagctatcggtttcttggaagatgagcaaggaactgtatgattgggtgagaggatctgtgtcctagacaacaaagatttgaaagatgcaattctgaaggaagctcatgatactttatactccattcacccaggtagtactaagatgtaccagcatctcaaggaaagattttggtgggcaagtataaagcgtgagatagcggaatatgtagcagtatgtgatgtttgtcagcgagtcaaggcagaacatcaaaaacccgtaggtttgttgcagcctttgaagataccagaatggaagtgggaggaaatcggtatggatttcattactggtctacccagaacgtcatcgggccatgactctatttgggtgatagtcgatagacttaccaaagtggctcatttcatcccggtgaggaccacctattccggaagtcgtttggcggaattgtatatggcaagaattgtgtgtttgcacggtgtgcctaagaagatagtatccgatcgaggtagccagtttacttcaaaattttggaagaagcttcaggaagagatgggttccaagctaaacttcagtaccgcttatcatccgcagacagacgaacaaactgaaagggtaaatcagattttggaagacatgttgagagcttgtgctttagacttcaatagaagttgggataagattttgccttatgcggaattctcgtacaacaacagttatcaagctagtcttcaaatggctccttacgaagcactgtatggtcggaagggccgcactccgcttttgtgggatcaaacgggag

SEQ ID NO: 25065 - DNA, 8711 bp, Oryza sativa
aagattacgtgtggctcagtctcgtcacaagagttatgccgacaatcgccgtagagatctaagttttgaagaaggagatcatgtgtaccttcgtgtcacgcctcttcgaggggttcatcgttttgataccaaaggaaaattggcactgcgtttcgtgtgaccttataagattgtcagtagaagaggagaggtcgcttatcagttggagttacctcaatctttggcaggagtccataatgtgtttcatgtgtcacagttgaaaaagtgtttatgggtacctacttaagaggccaatcttgaacagatagaagtccaagaggatctgacgtatgttgagaaaccaatccgtatcttggagacagatgagagaagaaccaggaattgagttatccgtttctgtaaggttcaatggagtaatcactcggaagaagaatctacttgggaacgagaagatgaattaaagtcagctcatccgcatctgttcgccagttcttccgaatctcgaggacgagattctatttaaggggggtaggtttgtcacaccctaaaaatcccaaatatataaattgttgtttaattagaattattagaattgattttaaaagcctagaagagaagatctaattttaaataataaattccaatataaaattgggccagataaaattttattaaatactttgcttgattctatagttcctagatttttctgggatttatttgagccaaggaagtatttttaataaatggaattgcatttcatgaataatttaaattggaaaagttttaaaaagtcttcttttggctttgggccgaaagtcggcccaaacctctctctctctctcctccccggcccaggtcagcccgcagtcgagcgccgcccgcgcgcgcgtcccgctcactgacaggtggggcccacttgtcagtcttcgtctacctccagccgccgccgcgcccgaaccctaactgagccgcgctgccgtctccttccaaattcattcatccctttcccgatccggtcaaattgatagaggggaaatgatccccgagatccactcaaacttttctcttttggaatcgtcggctaaaatcgtttggaaatccgtggattcgatctcgaatcagattcgtctctctctccgaaccctaacctttccatcgccgccgccggtcgccgtgggccttcgccgccgccccctagcctctataaaaggacccccggtgtctcctctacccgccaccaccctcgcttttgtctctcgtcaccggtagagccctagtgtcacgtcctgataaattcatcccaaaaataaaaatcgttctctaaaaaggaataatagaattaattaaaatttgaaaagaaattggcaaacactaaaatacgtacaagaaaaattcgaatgtggcccagagaatttttgttaaattctccttggtctaaaaggagccctcaaattttgcttgaattttcagagcaccggaaataattattaagcaacaaaaacaataatcaaagtttattaaaaagaaaacctaaaaataatcctccttttcctttgggccaagtctggcccaaagtctccctctctccccctcggcccgcagtccaagtccctctcccctccctttgtttttctctctttcctcccgggcagcccactccctcctcctccttcctcctggcctgcctcggcccagccgcccggcccaagccgcgcccttgcccgagtcgcagcgccctcctgtcgtagccgcgtgcgcacgagcgccgcacgtgcactgaccgcgcccccgcgtgggacccgcctgccaggcgcttcttcctcctcccgcacagctcttctctctctcccgtgaaccctagtttcttgctctctcgaatccgcgcgattcaagcgttggattccaaaattaattggggggaattaatcccctttccttcctctcccttttccccctaatctcccctttaatcgtgcactattttgaccggagcggctgcgccattcatggctgccttccatggccgtcgggcgccttttccgccgccattccccgctcctcccgtcgccggctcgttcccttccgctataaatggaaccccttctttgcgttctatcgttttagccccttcccgagctcccccgcgaccacaccacctctccccgcctcctccttctctttcctcggtgccggccaccctccagccgcccctaccgcctcacccacgcgccgtccggccgtgccgccgccttccccggcgtcgcagcagcctcctctcccccggcctgccctccgtttcgcgcggagaccccttgaggtgcgcccccgccggcaactgtggcgttgccaccactgttccgcctccggccgccactgtcgcgtttcccgtgcgccggccgacgtcgccatcacctccctcgtctccgcgacgctgccctcatccccggcatcacctcctccccgcccgaagctcgccggagtggccttctcgtcggcatccagtacctccccgcctccggccggctcctgtacgtcgccggtacgccgatcgacgttgcagcgttgtcctctcctccagctgctcctctgtttcgccggaacgccgtcgcccgtgctggcctctccatcctcattgtcgctgatgtcccttcggccgcccgttcatcctcgccggctcgtcgtctcgcggcgccacctccgtcgtcggcatcacagcggcgtgttccgcgccgtcctcgtctccgtgcagctgctgctggctgtccctcgtcgcctcctcgccggccccggtcatcgttgtcgtcgtcctctcatcgttcccggtcgtcgtggcgttcgtccctccgtcaagccgttcgcgttcgccgcccgcgtttcgtcaagtgtgcagcagccccgtcatcgtctacgtcctcggctccgcgtcgtcaagtctcgtgtcggccgtgtctcgccttcgtccaaggatcgccaccgaagccatcccctcgccgttcgtctccgttgtgcccgtccgtctccgccgcgcccgttcgtcgtggtcgttcccacgcctcgtcgcgtggtggtaaggatctctctcctttcgctgccccgtcctcgtcctttcggtgtcgcccgtgcccgttgtgcggttgtcgaccccggtgcccgtgtaccggtgtcggtaatcgttcgtgggtgcgtgtggtgaccgtgtttgtgtgcccgctcggtagccgcgtggtttccacgtgtgcagcccgcgtggtgtctagtggagtccgtttgtcggccactcgcctcggttgacacacggggtccgcttccgtcgacccgtggaccgtctctgtgtactcggtctaccgtggtcccttaggttgacatgtggggtccgcatgtcaacagtgcagccttcctgtcttttccaggctagcgcttacacatgttttatagttgcaaagcctaattataataatccgcaaatctccatataacagcattaaacttcggatgatcatatcttggtcatacgaactctgaatcgacccgttcaagtctcctaatgttggttataacctaaagaaccgtgtgcttcctttttatgtattgttattgcttctttataggcttgaagctttgcttgtgtgcttcgcgtagcttctgtcgttccggaggttcccgaagcgtggtttgcggtcgacgccgaaggttcggaaggccgttctctctgagcaaggcaagtcacatcatccttgagcatattgaatcccagtttataaaattattttgatttaaattaatgcattattgctttatttaaattcccgcgttaccattgttttatttagcattacctattaatccttgttatagccttattattgcaattgttattatcaccttgcttaccctaggcaaacaaaaccccaactagtgggtactctattcatggttccactagtattaatttaggtagatgcttcgctgattaattaggcaacattaggtggttttataactctagactttgggaatattcatatcacttgaacactatggaatggttggattactgtggaattggatgcacacctccccctctattcaaaaccctcaaaatggttttaggctgggctcggggtgcatggttttgatagtagcacctcggccacataaggaccggtcttcgggcctctgttgcaaagcactaccgtacttccacatgtctagtgggtaaggcttagtttgtggctcagtctggttataaacaaaagtacacggatggagatggacgaagtcgggggtcgatggacatctctaggacaaatgaaggctacacgagctgcagcccggtagtcgagatgtcatggcacagggctggtgtcctgctgctaggggctcaattctgcctgcctgtccgggggttccggccgtaggtgggttgggtcggtactcttgtctatggctaggatgggttggaaactatgtcatgtcttccgtccatatgccgtggtggtatgtggcacgtggttgcacgtgaggaagacgtgtcttgtgggtaaagatgtacacctctgatcagagtaaaacctattcgaatagccgcgccctcggttatgggcaagcctagcaatgtacccaagtttgtgttttaaattcttaaaacctacttaataactaaaatgtggaatggttggcctgggttggcttgggacgagctgggacccagggtcgggttgccagttcggtctgaatcatcgtaggccttgggttaaggcaggttcgtgtgggttcacggccctgattaataatactatgtagcaataggatcgtctttataaaatggctttgggcaactaagtgacttttaaatgctgtttactgtaaaacttaacccctatattattatccccttgcactcccttgcattaattatgcatctccggtgtggcttgctgagtactgtggttgtactcatttttgctcaatctttccccccttcagtaagagaagctttggagaagaagtcttaggtggagtcctggcttataccccagttgagcgcctgtgaagatggagccgtaggcccgctagtccgctgctgtttatttttgtttgtcaggcctgaagtgcctttgtaataatgtaaatattatcgatataataaagatgtgccttttgtatcatgtttgtttggtgtaccccggcttttcctgggacggggattaatacactagcgttcgggaaaaggcaattttctcggtcgcgacaagctggtatcagagccatctcgactgtaggataagccaagtggataaaacctaaggacatattttataaatgaaactatttgcgaaagttcctttttcctcctttcccctgtgctatttgcaaaatgtttactctttcttccttcttcaaatttcaactagtactagatggtcagctttgcggagaagaagatgtcgtcaattgtctgccgaagctccggaagactgcaggatccgctagcgaagtggaggaagcagtgaagctagctgtgaagaagcagtgaagatcttagagaacccgtcgcagaacccaagccaccctctagggtagagtcgttagtcgtgtgtttccttgcttgtgtgtgtagcgcgtggtttgcatcagtggggtgtgatgtaaccatgttaggttgtttgcttaatcaacttgcagaataagtgaaacagacaacacatcaacaagaagagttagttcctttaaggtcctgtctctagtgctggtctattctttcctggcttgttttcctctctcacctcaatccctgtcacagatgtttaacagagaaaaaggaaagaatgtcagcgggtatgcctccagtaactcaagttttcaactcaatccaccattggcctcaagagagttaacaagggcacacccttggtccattccaagcatgctgcttagttcacagctaccattggttggaagtcaagaccaaaatcagtatgtgtttgatcgagcatttgccacccaggtcaatgagcttccaatgccagaagaggatgtccccttttgtcacgattgtagagaacaaggacactatgccctgaattgtccatgggtatatgccaaagaagccccttcctttggtttagcagggcagacatcgctaaaccagcctcctcgcaccaagtcaagcttgcagcctagtgtgcaaagtagagagcccaatggagagaatccattgaatcccgggaaatgctttcctcctagcctttcgtaccatgtggggtcacgtactaagcaagccaaaggcaagaagagtaagaatcagaagagaaaagcaccgatgcgaactgaagaagaagtatgtaagatgactattaccagcaccgaatggcctccggcagggataactattcctagacgtcaaagaggaaataccttccgaggtgcacgacagttgacccagcacctcctaagccatggtggcagagtatctgatagtgaagggtcagatcaagtctcctcggatgatgaagatgagtctccctgacatctcggcgaggaagagatggaatcaaaagcatgcacccgttgtggagaaattggacacgttgctagcatgtgtctcacactctgccctcattgtgaagaggaccatccaccaggggagtgttccactcgtaaggtcacatgttttctatgcgaaggtacaaaccatgtgcccaaggattgccaactcattgtgttgttgaccaagaccacagaaatccaacgaacaaccctacgattgtctcatcagctagtcagctccaaccacaacatcgacgatatcctccacagcaccgatgctcctcctgctgcacctgactctgcaataaatcatagcaataataccttcagcaccaaccattctctgcaccgacagcctcagcaaagagttgtcatcgatggaagaagttgtgtctctccccgacctactccaggccgagggaagggcaatcaacctcaggagggcgataccaagcagaagaccgttatccgcttcaaccagcaatcagaaggaagcttctcctatgaatgatagcaatatgcagtcctatcacatcatcacagaaccaatcaaggatgatgtagtcactagaacaatgccagctatatctctccagaatcagaatgagtagccatgtttgtgattttcagttcgctacttatcactgtaatcgggagtttgcagcaatcatgtaataaataaatatattcatgattataaataatgagcttgttatgtttatggaagattcatgttgaggatgcaatgtaccgatgttaagcaccttccctttttgtttaaggcagggccttgtattcgtgtaataagggagacatgtgtaataaaaacaagttctatgaggactcttttggaagatgctgatatgggattatgtgtataattgtttactgtcaaaggagacctagggtctcatttcagaggaactatgttctaacctcgagttaataaccaacctgaggatggaaaagaaaatcaagtgattaaccaaagagacatttgtttggactaagagtttcagatgtgtctttttcggatcaaaggcaaagacagtcagtacagcttttggcgaaacacttcaaagtttcattgaaaggcagcagaccaaaggacctcattaaagagtaccacctgttagatgtaggccgaaaggtgattgataaaggataatcagaaacatgctctgcatcactcaaaggagacccctgatagtaatcgccctgcaacagacaccttgttattgaggtagaaaaaaaatcgtgagtaagcaagatgacctaggtaaaagtgtttctatgaaggcaaggagtgaaatcttcaactcagtatcagatgctacacggagtgaaaactgcaagcaccggttaccaggcaatgccatgtcttgggagatgatccaatgggaaggaactcatcaaggtcaaaggtgtaaaggaatacggtgaatgctaaataatgacaacctgaagataatagtgggaagtaaactgaatgtaaagaaccaagtgatatgttcgaagatagtctacagaggtcagattaaaatcacatctaacaacgaagcttcagatttggcaggataacgatcagacaataagaagtacagcagtaaagccatttgggaagacgtcaaagcatgtcaagtgggaaaagttggttcggttgagaaacataattcaaaggcaaagttatcgacactcgcatcgaatagcagaagtagctagcacccggagagcaggaaagctaatatgaggcagttggtggcaagttagaagtaaatgacaagcatggtattctcatgatgacaagcatggtatcctagtaatgacgagctgatctcgacgcataacgtgaagtgggtaacttgtatgaggttgacgccaaagatatgaactatgcgaagttctggaactgaagtcccatcttcaagtgccacatcccagtcgaagtcagctagaggtgcaaccagggaaaagtcaggtgaagagaagattccatttgcaacaggagatcgagccaagcagtccagagtggagaagttttgttaggcaagtttgttatagaagatggagcggaagaagtcagacaagaagagaagaccacccaacctatcttcatgctagcctcctcgaatctcggggacgagattcctgtaaggggg

SEQ ID NO: 25066 - DNA, 3240 bp, Oryza sativa
ttatttttgtttgtcaggcctgaagtgcctttgtaataatgtaaatattatcgatataataaagatgtgccttttgtatcatgtttgtttgatgtaccccggcttttcctgggacggggattaatacactagcgttcaggaaaaggcaattttctcggtcgcgacacctagcgtcgtgtaccctagcgccgctgtcgccgccgttcgtccagctgtgcgccgccgttgctccggtcgtcgtcgtcgctcgggaaggccgtcatcgtgatcgtcatctcgtcgccgtcctcgtccgcccctccgtcgtcgccgtagatcgccggagccccgccgtcgttgtcaagccgaaggtcaccgccgcttcttcctcgacgttgtcgccgtccgttgaccttccgccgctgcttcggtcaccggtgagttcgccgtgtcgcccgcaacccggaggtgtcctccgttcgcgccgtcgtgccgtcgttcgccggcgagcatgtgccgtccgagccgtcgccggtgacgacgtcaccgctgacgtcatcgacgccgtccgccgtagaccggtcgtagaccgttagatcttgtccatccgttttggatagatcgatctcggccgtttgtttctgtgaaccgccgccgtgcacccggtccaccgtgagccgagtccgctgacgcaataatccccttttccttttcaaaaataattcatgagatatgggttcagctggatattagatataattacttagccatgcttagaaacattagcacatagttgggataacttatgcttcactattatttaatgatggcttaatgatagctcatgatggttaatcatgattggttaattaattaatttgccaactaaaacctgataatggtgggttgtgagcatatggttttgatggttgtgctcatgacaattaaggaccggttcacgattttcggttgtgaaacatttaccgtgccaaccacaagccagcgtaggcaatggctttactttctgtatagtatggttcatagtagagcaccagactgtgaagtggcagagataagcccacgggggtcgctgggtagtccataccttgtttataagggggtgattatgatccaggaacagtgcactgctttgaattgtattatatagagggtattgtcacaatctatattcgggtacttgttaagtatcgcgacgcatggttgacatgatgttgaggttgtgtcttgtgggtacagtgctacacctctggccatagtttaaactattcgaatagccgtgcccgcggttatggtcgcgtctaacaatgtctttcgtgattagtttcacattcatgcttgtcaggaggtggcaaggatcgccatgggggagctccgcgaaagctacaatgatcggttggccgacaccgagtatcgctaccatcctcgtcaaccccaaggaagtgaccgtggcagctaccttgaacctgcagggattgagaatgatgctaccacaaggcatttggttgagatgctgtgggccatggatgagacccgcggtgagattgtgatagcagctcaggatcgcaaaaccggaatcgcggcaagatttgcaagctggaggacaaggtggatcgtttagagaaggagctagccgcgttgaagggagaagcaccaccgcaaaaggccagggttcatcttaccgcaaggaagagagctctattcgttcctcgctaccagttggcgccaaaggttcgtgtggtggaaaaagaaactatcccagccccagcggatcctccggtcgtcaacgtaagtgatgatgatgaagaagaatccaagcgcacccattccaaggtcgagtggggagcaactcaagatgatggagacgcaccgaacgagccttcaatcaactccgatgcccggaaaacctagaatgccttgtcaagtcgttatcttagatcgttgtgttagtttgcttgtttaagtttggttgtgtgtgtgggtcttgcatgtggtttacatcagtggtgggatgtaaatgcatgcctttgtttgcttccgagtgttaggaagttggtgagtttagtggtgtgagagtcttcagttttgtaataatgaaactcagttaagatcaataaaagttaagttagtaaaaattaattccctgtcctaagtagtttttcccgtttctctttttgtgttcctatctatgccagatgttgcttactcgcagcaacgggaatggccccaaccccaacaacaacaacaacaatgcagagaatcccacgcttgctcaagtcctggctcaacaggcacagcttatgaatttgatgatgcagcaactccagaaccagcagaaccaggaaaacaaccatgcacctcccccaaataagctggcagaatttcttcgcgtgaggccgcctactttctctagcaccaccaatcctgttgaagctggtgattggctgcacgccatagagaagaagttagacctgcttcagtgcacagatcaagagaaggtttcttttgcttcacaccagctgcatggccctgcctctgagtggtgggatcacttccgtctcaacagaactactgctgaacctatctcttggcttgagttcaccgctgctttccggaagacgcacataccatcgggagtggtgtctctcaagaagaaggagttcaggtcgctcactcagggatcccacactgtcaccgagtatctgcatgaatttaatcgcctggctcgttatgctctggaagatgtgcgcactgatgaagagcgccaagagaagttcttagagcacccgcaatggtaaagtaaggtgctctctataaaacatgtacatctcagcaatagactagattaatagtaaaccacctcaatagtatgtctacaacagtatctatagctctctcatgcattgcctcggttttctctatagactatctctaagttagtagatagctttgctctctctcttcatttaatatcttccaaataggaaaatatgctgacatggatctcttgtagagagcctatagataaccattgtgggtgccctaaagggctatatgatgagctttcttacccactcatgactggggattatcatgatttccagaagttagtggataaggctattcgccaggaggacaagtacaaccgcatggagcagaagaaacgccgaattgctcacttcaaggctcagcaggggaatagtcagaggccgcgtcttgctatgggacctcagtcagtgtcac

SEQ ID NO: 25067 - DNA, 1502 bp, Oryza sativa
attcctgcagcccagcatttagctgaaccaatccaatatataagtttcatgctaatcaaattataacccataggaaaataaagtcatctacagccattaattaattgggaaaggttcaccacccaatgacattcgaaaataatgcatagttgaaataaaataatagctttaaacgggttcaacatgctcaaaaggttgtttgggatctgtgtgacttgccttgagcttccgcaaacacttcggaaccttcctcgacagaaacactctcctccggaacgtcggaaactaaagcaaaaagactaaaatcaacaaaacagtacaaaaacaaacataaacagtatatgtggatatttttaacatgtagatcttgattttagaaaaatttagcaacttgaaccacctgaaacggatctacggttatttagttatgattttccgaagatttaatctattagaaaaacgggaaaaagaaaaagatgatgatgtcatgatgacatcatcaacggtggccggaccgagatggcgacctcgccggagctagggtggtcggctgcgaatttggagggtatgtacacgtagaggacgacgagacgaacccggcggtactcaccacaacgtctaccgatgaccgacgacggccggcgacgagagggtggcggcggcggctcgggttgcgtggtggcggcgggctacggcggccggcggcaaaggagaggtggcagccgggcttctccacctcctggaaaagccaaaggcggcgacgtcaagcgacggcgacggcggaggcggcggcgcggtgcggatggaggatggccagcggcggcggcgagctaggtggcggcacggcggctctaggagtcacgagagaggacgggagagggggtaaacgaaagaggaggactagggggtcctatttatagccttggattgaagagatcggactcctcccgcaaggaatcgatccgggaaatcaaaaactcggttttgaagataaactcgaaaacgagttcgattcgggcaaaatactcaaccaattgctacgattcttgaggggaaagatagaggaagatgtgaggataaaaacccccctaacaatcggactcgggatggccggattagacgcggatttgagggagaagggggcggctcgggcggcttgcttggccggccggctggctgctagaggttagggaagggtccgacatgtggggcccacatgtcggtctcccgagtggagggggcgacggcggcgggctgggccggctttgtcgcgcgggagagatgaaatgttgggccaaaaatggcccaacgactttagggagggattttagaactttttaattaaaataatttgtgaaatgttgttccaattattaaaaatacttcccttgctcaaataattcccagaaaaatctagaaatagaggaacaagaatagtatttaataaaattttatctagttcatctttatgttgaaaattttcctagattactagagtttag

SEQ ID NO: 25068 - DNA, 823 bp, Oryza sativa
ccgcctgcacggctggcctattatgccgccgttgttgggcgtctacatcttcaccgacctgcttgccttcgccgccgccgactggtgcttccgcctgcacggctggcctattatgccgccgttgttgggcgtctacatcttcaccgacctgcttgccttcgccgccgccgactggtgcttccgcctgcacggctggcctttatgccgccgttgttgggcgtctacgtcttcaccgaccggcttgccttcgccgccgccgactggtgtttccgcctgcacggctggcctattatgccgccgttgttgggcgtctacatcttcaccgaccggcttgccttcgccgccgccgactggtgtttccgcctgcacggctggcctttatgccgccgttgttgggcgtctacgtcttcactgaccggcttgccttcgccgctggcgactggtgtttccgcctgcacggctggcctttatgccgccgttgttgggcgtctacgtcttcaccgaccggtttgccttcgccgctgccgactggtgtttccgcctgcacggctggcctttatgccgccgttgttgggcgtctacgtcttcaccgaccggccgcctcgtccgccgccgactggtacttccgcctgcacggctgacttattatgccaccgttgttgggcgtctacgtcttcaccgaccggccgcctcgaccgccgccgactggtgtcaccgcctgcacggctggcctgttataacgccagctgatgctatcttcttcacggcggcctacatcgctgtcactactaataggcatcagtatcttcagggctgcaggaat

SEQ ID NO: 25069 - DNA, 5013 bp, Oryza sativa
attcctgcaccccagtgttgtttggtttagataacaatctgctaaaaaattgtttgtttttagataaataatctgctcgatatttgccgaatatatatggtgtttagtttggataatttgtagcttgggagaaaatggatggatgaacaatgcgattgtctttgcccaattggcaacggatgaaaatttgtatgacgaacggaaatatttattttttaggtaggtgtcgaaacatgaattcggcaataataaaacggggtagcgcacgagacctaaaagtggatggatgcagagacaaaggatttagacaggttcaggccctctcaatgagaggtaataccctactcctgtttggggatttgaatccgccgggtgtgtattgatctgacgatcaggttgtctcatgccccctagagggcctcctgcccaccttatatagggtggggggcaggattacaagatagaaaccttaaccaacacggtatcggcttcctaaatctactttacaatattatcaaatcaggactttaggccgctccataatataaaagaaaacgtaatacccaagtcatgatctgttacatattccatacatatatgttatcccctattactagtcggataaccatgccgtgtgggtatggggtacccataatctccacagtagcccctgagaccttcacagtcaaaaagataatcttctcccgaactagattattccaaagccgagtgcttcaatcatctttgccatgatctcccgagtacttttaccaaatctgaagactgtggagggctggaaaataaagtcaggtgcaccgactagatgcacctaataggtgtagcccccgacaatgtggttaattgaacaaaccaagcatatagtcaaggaataaataatccaaccaaccgagtggttttgataatcgtaatcaaccaagtgacttgatatcaatatatagcatatgcggtgtgaatcctccaaataacatgatccgagtgatataccaactgctttgtaaaatatgatgagtgatatagcaaaatagctataaagaagcttgtatattgtgaataaagaaatttccaaagtattgggcatacgccatgcgcacactgctttaacagatgtgcttaagtccctagaagacacatggtttcaccacacctggaaatatatggcatatgtggtgtaaaatccgagtaaataaactcataaaggatttaccaaccgcctagaaaatgaccacaatatataatcagcctaagccataatattggtcaataaaaatgcacacttacgtggcgaaaagcaatgatattgtatccaatcaattgcttaaaaacccaaacagcaccttgacttatatataaaaaagtcagcgggacagctatataaagctttactgtttgacaccttttaagatgcattgtaccaactcctaaaaagttaagtaactgcggtataaaaggattttaaggtattgggcacttgatcacgcgcactttggcctaagcaaaaagtgcctaagtccctaaaagaacgtgacaggccacacctgaaagtatgggctgcagacatattaggcctaggccaaaacatatgccttcgacaccctttaaaggatgacgcatataacatgctcccgagtaataaatcttccgggtaatatagaccaagcgtagctcatatgaatagcttctgatctgagtggttatcccttatgggatactccaaaatagatgtaacaattgaatcccgactggcgcaagtattcagttgataacccttacggggaataataaatagtccagtctttgagcatataaaatagacccatgatcatgaattcatgttgcatgtatccggagcaaatccaaattaaagatataatacttgtatttgagctagtaagcccctgagcacgtagtcacaattgttcattgatggtagctgacgcagttggcatagagacaagacaaccaatatagagagaatattgcccaccagaggtggcaaaaatattggtggtagtgaagatagtgataccaatcaaaagtactgaagtcgcatagccacggaggcgaagaaaccagtcggcggcagtcaggtcagccagcaatgaatatgaaggcgctcagcgataaagttgtgtagttgacgacgacaaacgcaaccgacatgatgaagatgacgatgtcggtgatccagccaatagcagtgtagcaaccaatgataatgacaaagacgctcatcagcatttgcatagtaggtcaaccgtgaaggtgaaataataagtcggcgaaaacataatcatccattagcaacagcggagatgtcagggtcgatgaagcagaggtgctggtgatgatgtcagtgacaataatccagcaaattaatgttatagctgtgtagatgcttcacttggaggagagttgatgttgttgtccaactcgtccaaaccgaaatatttgaagttgttgaagtagaatgtctgctccgaagcaaagatgaagataatgactcctggagttgactcgtgggttgatgaattgatttcttcagcttgacataaaatttgtcaaattttgagccttgtatttgtgtagcccccgactctttgattagttgggaaacaactgaacatagagtcgagaactgtagcctcttgtcgtcgaatagttattgcttgattgaagatatgtgttgaagatgtccaagtagaaatcatgaatgttggagagcctcttgttgtagtaaaataacatggcatcgcatgccgagatgtcgaagctcacaaagacgtcgtggttggtgaagtagcaaaacttgcgaagtagcagcaatagagtttgctggtaccgaagataataaagatgaagtcgctccaccatgatgacaaagttgtgttgccgtgatgaagtgacagaagcaaactggtagtgaagacgcgcagttgtgaagataaaagcactagtcggcggcagcataaccagtcggcgacggaagacgatgatgttcatcagtagtggtagctgtctaaaccagacgtagaggtgagggcactagtcagcagcagacgtagacagcttgtgttgaagatactgatgcctattagtagtgacagcgatgtagccagccgtgaagaagatagcatcagctggcgttataacaggccagccgtgcaggcggtgacaccagtcggcggcggtcgaggcggccggtcggtgaagacgtagacgcccaacaacggtggcataataagtcagccgtgcaggcggaagtaccagtcggcggcggacgaggcggccggtcggtgaagacgtagacgcccaacaacggcggcataaaggccagccgtgcaggcggaaacaccagtcggcagcggcgaaggcaaaccggtcggtgaagacgtagacgcccaacaacggcggcataaaggccagccgtgcaggcggaaacaccagtcgccagcggcgaaggcaagccggtcagtgaagacgtagacgcccaacaacggcggcataaaggccagccgtgcaggcggaaacaccagtcggcggcggcgaaggcaagccggtcggtgaagatgtagacgcccaacaacggcggcataaaggccagccgtgcaggcggaaacaccagtcggcagcggcgaaggcaagccgcggtcgaggcgagccggtgatgatgttctgactgatccattcctggagcgtaagagataagcttaaagccatgaatctcttttatgcatatctggatctggatcctgcagaacaaacatataggatgagtagtatctgatataaatataatactcgagaaaaaatcaagcattttaaaatgtttataaatatgtatttcttctcttgtcaattgtgatttcctcgagcagatgactccttacgtttaaacactctgcccgactagtcatagtccccaagcatcgggagtcggcctaggcacttcccaaacatgcatatgagtgacatgagttcgtcattaatggaacaaagtttcacggattagaatttactactcaggtacttttgcaattattaagagcagaaaataaatttatcttatctctatgcttttgatttattccgaataatacttagcaccttgcgttactcggtccatccaacgagcccccgggtgctaggaatcggctcaaaggcaaccatccattggcaaaccaaacggaaagcataggaagatagaactccataactcgataggtacttttgtactcagattatgtcgcaagcaatcaagataaatattatgaaaaatatgatataacatctgtagcccccgactcactactcaatggaagaccaattggtgtagtgaggcagaggaaaaggaaaaatatcatataaagaataaaataaatgatgacttagctttgtaatattccccttggtgatggcagaagtggccaatgtgggaacaaagtcgtccatcaataacaatgaagacaccactcggcggcgacggaggcaggccggcggtgaagtcgtagacgcccaacagcggcggcataataggccagccgtgtaggcggaggcaccactcggcggcgacggaggcaggccggcggtgaagtcgtagacgcccaacagcggcggcataataggccagccgtgtaggcggaggcaccactcggcggcgacggaggcaggccggcggtgaagtcgtagacgcccaacagcggcggcataataggccagccgtgtaggcggaggcaccactcggcggcgacggaggcaggccggcggtgaagtcgtagacgcccaacagcggcggcataataggccggccgtgtaggcggaggcaccactcggcggcgacggaggcaggccggcggtgaagtcgtagacgcccaacacggcggcataataggccggccgtgtaggcggaggcaccactcggcggcgacggaggcgggccggcggtgaagtcgtagacgcccaacagcggcggcataataggcggggtgcaggaat

SEQ ID NO: 25070 - DNA, 1556 bp, Oryza sativa
acgcccaacagcggcggcataataggccagccgtgtaggcggaggcaccactcggcggcgacggaggcaggccggcggtgaagtcgtagacgcccaacagcggcggcataataggccggccgtgtaggcggaggcaccactcggcggcgacggaggcaggccggcggtgaagtcgtagacgcccaacagcggcggcataataggccggccgtgtaggcggaggcaccactcggcggcgacggaggcgggccggcggtgaagtcgtagacgcccaacagcggcggcataataggccagccgtgtaggcggaagcaccaatcggcggcgacggaggcaggccggcggtgaagtcgtagacgcccaacagcggcggcataataggccagccgtgtaggcggagacaccagtcggccgtgacggtggcaagccggcggtgaagtcgtagacgcccaacagcggcggcataataggccagccgtgtaggcggaggcaccactcggcggcgacggaggcgggccggcggtgaagtcgtagacgcccaacaacggcggcataataggccagccgtgtaggcggagacaccagtcggcggcgatggaggcaagccggcggtgaagtcgttgttgatatcagcaatggcggtggcgaggacaagccggcggagtggactcgcggccgattgaccggaaagctgagatgccttgagtccatgaccaacatcgttcgcctcagtagtgccgcgtaattatatgcgaacaacaacaaaaaatagcaagaaattaatctgagtttagaaatcaatctaatatatattgattattgataacaaattgaaacgaaaaactcaagtcgagcagtgaggctggatcgtgggtgatagccggcgacgcgccatgcaacatgtataagccccggcaactaactgctaactcgatgttctttcggtatgacgccattatcggaggtagccggcggagcacatcaaccgtcatacatggaaacaggaatcgaacggcacatgtgtacatgcaatagaaagcaattagtagattaattccagtctgcatatacgtgttgattaataaatcaacagatgcgtgtgtttaatttgctcctggcggcctgtgctactccagcaacacgtccaactgcaaggaaaggaagagaggagcactcggacacggcaagggcacccgagcaggcgacgatgatggccgtgtctcgatctcatcgagtatatgaaatgcatcaaaatatcaggaaatcaaacaacgattaaaaatcaatctaataaaaattagattggaacgataaacccgattaaagatttgagccgtcgaaattgatgagattgatctccgggcttcttctgaagttgattccatcgcacttttcgacaggtaattcgacgcatcccctacctggcgcgccaactgtcgaaacatgaattcggcaataataaaacggggtagcgcacgagacctaaaagtggatggatgcagagacaaaggatttagacaggttcaagccctctcaatgagaggtaataccctact

SEQ ID NO: 25071 - DNA, 1757 bp, Oryza sativa
aggtacactatattaccaaggcttcgtggggattaaggtcacagatatcaaaaacttttacatgcacagcttctttctgaccaaagttcggctctattgcccttaccacctgtgggttaccatggaggcttcaaatatgaaacagattagtgttttggtctgtaggctagggaaatatggttgatccatataacagataaactaaggaagatataagttgaacaaagaagaagcatgtttatgtgaatggaaagagtgcagaaacagatacctgcttatgagagaaattgtttcctagattggtgcattgggataccacctacaaacagtgctaccttgtagggctagctggtctggcaagcatgaaagagtacattatttaagcaagaacaggcaaatatgtaaatgggagaggtgataatagggtaagaatttatttcttaccgtctcggaatttaacagttaatccaacaaacaatataacaacaggtccatggtctggttgctgctgtaagttttcagcgtggaactgtgtagcatgggcaccccacaatgcaacgacagcagtttcgctgtaggcacatagaagaatgaagaggtggaaaataatgtgcatgaattaagctagtattcacatttgcaaataagagagttgtgaaacaatgttgatattataaacaaaaaagaaggattgtacatgtgtaaaaagaaactgacaatgcatgtgcggacaattaagtcattttgtatttaatacaaaagcagctggaacaattagcggattaacgcatacataccttccattggttatgtggacattaagcaccgctttcataacacctccacaagaaacagtttgcactggtccaatggctgtcattatacctatagcatctacaggagtagtataagggataaaatttgcacatgagtaagtgagagcagtaagcagggaatggacaaagctaataaggaatgagatagattgatctggaccaaacagagtcacctgaaagaatatctttcctgtaagcacgacctctgagttcatcaaaagaaagaaccttgtaagcatgagatgggaatgtggatggtgcctcagtgtcttctctaacggttgtgtgggcagtgaattttgccatgaccatccgatcaataggcctgtactgggggcgcgcctcagcaacttcgaagtacttgatgtaatacacagcatcctccttcagcaaaggcttgaattgagaaacatgacgtcctgggatctgcgcatccatcatgtacccttgttgatgtttggatgtgtaagagacaaatagcatggaggtaaaataaggcatgaccatgtgcttattgctatacctgctcatcaagcaggactaaatcaagtcgcagaatcttgtcaggttcatttgctgtagtgaactgcgagaagcgcgtgacccgcactcggacttgccaatggtgtgattcctgtgtcacattccttagcatagtgtaatccatctgcaacacataaagaaggcattacataggttagagggaaactataataataataatactttgcatgatatgaagatataaagtcctaattgttgaaggaactgtggtgcaggatatatctttttctttttcgaggtgggaaatgtttcccaactgacagtgtttcaagcaggcatgtttaaaagcaactgattgcatccaagagaagaatatgcaaaaataagaaagaacaattaataagcagatatggaaga

SEQ ID NO: 25072 - DNA, 2367 bp, Oryza sativa
agtgacaaactgacaataagattaatctatagcaacgataatatttcagtgtagacgatgttcctggtagtggaacaaggcttgccatcatcatcctctatcaacaacttgaggccttgcttcgatgtagcgcgcgaaacagcgacatatagctgaccatgtgtgaagacagggtttctgaggtatacaccaacattccccaaagttgcccttggcatttgtttattgtcattgcataacatagcctaattgggaactgccttcgctggagcgtgaaaggccactttggactgttcccacttaggacaatccatggaatacagaccagctggccaatatttgtgccagtcatgattttggactcgaaaacataatcactgagtcggatgaccatcaatcttgtctcattgcaaaggccgagtgattggttaatgttgcgaagcaggactacagctgaaccaattttgagggatatgcgatgttcctggaaattgtttatggatattgagtttagaaattctatggggtacaatagatcaaaatctacaggcttttcaagtgtatttgaaatagtgtcgctgctaagatagtcctttgcatccccaggcactttagcaagcatattatcattaatctcatcaacaactgtattgacaggacagacaattgcacgctgagaaaggtaaggaatgcagtcatagttcaattcaaaatctgggtacacagcatcaattatagctgtaatcttgtcaccgcagggagtaagcagcaactccttaggtatctctatccatgtcctctcaacctcaccttgtcttttgttcatgggagcacgaccctcaccaatgtcaagaacccatttagcaaactctgccaattcacccctggcttgctgcgacagggatggattatgtagcctcatgttagtggtaaggtgtaagacttcaacatgcttccatagtgcagacctaaccagcgaagcatctaccacatcagctcttgtacctttctcaatcaccggtaagacttgcctaaaatcaccaccaagtaaaatgggtttacctccaaaaggcttatattcattagctggttcatcagcggattgaatatctcgtagagttctatccaatgcctcaaagcacagcttgtgtgtcataggcgcctcatcccatataatcaatgatgctttcctaataagatctcctaggattgtccctctacgaatagcacacatcgaccgatcatgtatatctataggtatccgaaaccatgaatgagcaatccttccaccaggcatgagtagagctgcaaccccagaagaggcaactgcaagaacaatttcacctcttgatctcaggtttgccataatagcattccacaagaatgtcttccccgttccaccatgtccagatataaaaaaaaatacacttttcgtgatggtctatcctgtcaaaaatcttgtcatatatcatcttctggtcattgttcaagctggcatacatggacaaagattcttgatggaggctatgttggttaaagctaagatcttctaagataagcctgtttgctgcactggatcctgaacaatcaactggtgtggcaaattgtatgatgagattgataagccattatttgagaacatggcatccaactctttgagcaaggtatcctgcaacataacttctggaatagctgtgcgctgtactccaagagctttggttaacttgtaagcaaaatcatctaccatgtatctccagtacttatcaaacaaaaccctaacatcacctacatcacagtgtgctagtacagtcatgaaaaggttcctgagctggtatgaagtagcccagataactgcctcctcaaagaggtgatcccattcagcgtcatcaccaatgagaccacgtgcctgacaggcttcacgataggtgccatacagcacaccttcatatgtcctaatatcttcaaaactcatacatcctcgaactaccatgagcaacattctaaggtagaacggctcccagtacttggatggatgtgccttaatctccctatcttggttcctcttttacgctttgtccaaactttcttctcaggatcccagctaaacttggtaggaaattcacaataggtgagatccctggcaaagatgtgacgttggttggtagcaaccattcagtaagcattgttctagaggaatcagggtcttctatgacctcttcaaggtcagctccatcatggtatgtcacgaactgcatgctcggcaagtgcacaatgaggcgttcaacagaaggactccttccatggatctcaaaaccatataatctccagaatgattcacaagttgataggtatctggatttgatgtgt

SEQ ID NO: 25073 - DNA, 700 bp, Oryza sativa
aaatgaaacaagtaacataatcatcagagatcgaagctgagtaaaaaattgctcagatattacaaattacaaagagtagccttgagcatacacgtcactgcattatcatgtgtgatctctgaactatataattgatgcttgttgctgcgcatatgtttccctgaacaggtgtaataagggataaaagaatgttcctaagagtatcctggcactgatgttccaaaacaagcagatgctaacaaacaatacactaagtttctacaatctagtatgcttcgaggtaaacaaatttctttggagagtatttacaagcaaatttgtttccaaggataaaggttgtcatatagaattaagaaacattttatggagaacttttgcaacatcagcttgctctctatatatagcccggtatcaattgttaccaagtatcaatgtaattttatcccaatcatatgaagcaaacactcgctgttaagaaacagtctgttcacatgtatgaaaagtgaaaacatagatgacaaatataggtgatcaaagaatgttgaactaacctgcttaatctcagagaacttaacaagcaagtcctctggaatagaccagtcataaacatctatgttctgctttatcctttcttcggtcacactttttgggagtacactgtgacccatctgaatgttccagtgcagtgccacttgtgcag

SEQ ID NO: 25074 - DNA, 898 bp, Oryza sativa
tacatacatgaccatgcattctatcaagagagctccagaaatacacattccattgcaatctttctcatgggagatagatggagaaggaagatggcctaaagttatatattgaacatcagaagtgatagagctgcatgttcagcaatacatcttctagatctcaaaatgcacataagccccaggctcgctcaaccatacgagctggctggcaataacttgcgctaaatttcatgagctcatacatattgtttgtcgagacctaagggaatcgaaatgtgatgcatattgacatattgtcaggcaagagctaaagataatctgttgctatcctaggaccatcagttatgatcaactgatgctgatggtgaggccggtctgagagcgttactgccattctccattgtagaatcatccacaaactggctcgtgccatgtagttgctgctcgccaatttgaatgacgatatgatgtgttctccttgctacgctgggtattctggtactgacctcctgtttgcctccctgcagcatacacctgttgattgttctggttctggtgatgaactgttgtttgccgctgcgtgttatatgcctgtggatgattattgttctggtaatgcactgcagtttgccggttggtagtatacccatgtggactctgacctgacctgcttcctcctctggctggctggtgatgatgatcatcgtatgggttaggtgccacatagtcaagatatcataaaaatctgtcatgaggactcactaaggtatttgtataacggctggcactggctcttccaccaagttttgatccaacatcaggtgtgcaaagcagtgacaataatccatttcggtcagtaagcgcatgcgcatcagaaacaaacttattgctcgcgttg

SEQ ID NO: 25075 - DNA, 896 bp, Oryza sativa
cctgctcctggacaacgtccggaattcgcccagctgtacatatatgacaccgccaatgagctccagaataggcttaatatttttgatcacactgataatcctggggatgtccctgatcctgttattgtgcaagagcttatctcgatgcttgatcagttcaatcctcttgtgcagcagttccgtcttgctcgaaacaagctgctttcttcaagtgctcctgagattgctatcaagctcattgggtcaggccattctcagagtgaccgttacagccttcccaccacctctgagttggcagcactgattatacctagtgcatcttgtgaggtatcaaagtttgatgtcattgtgcagaagcattcaggtgagttatgtcagttgtcacctattcatccagcccttatgtcattgcagtacccgcttctattcccatatggtgatgtgggttttcatactggtatcaagcttagagaggtagatgatcagccacccggtagtcacgacgaagcatcgatgcttgaattttatcggtacgagtcccactatcgaaaggatgagcccaatccattcacctgttgtggtaggctttctgatcagctcgctgtgaatgctttctcatgtatagagacatctcgactcatataccatgccctcaaccagaaaaaacttcgctctgagacacatcaaggtatatctgatgctgttgctaggggagacagtgatggaaaggatgttggcaccaagtaattttgccatcaagtttcataggaggaaggcgatacatggttcaaaactaccatgattcaatggcaatctgccgttcttacggtcctcctcaaatattctcaactttcacctgcaattctaaatggccagagattattgaagctattcgt

SEQ ID NO: 25076 - DNA, 715 bp, Oryza sativa
tggcgatgaatcctgcaagcaccaagaagtgagccccacacttgaggactcggcctaatgtgcattccctgtatgagctcaacggcttcgtccaaatgcccggcacgaccaaggagatctaccatgcaggcatagtgctctgcacgaggggtgacattataatccaccatcgactcaaacagcctcttcccctcatccacgagtccagcatggctacaagccccaaggacactgataaatgtgatgatattgggtgaaacgcccatttgggtcatgtcttcaaacacctgaaccgcttcatggccaaatccatgcatcccatatccagatatgagtgtattccatgacacaacatccttccggtgtcctattaaatcaaagatatgccgcccagcttcaagacatccacatttcatgtacatcgccatcaatgcgttcagaactgaaacaagtgagtcaaaacccctccggaggatatacgcatgcaacaatttgccctgcccgagagcgttaactccagcaaaagcatgcaagatgcatactattgtgactgaattgggtacaaggtcttcatcagaagccaccatctcctggaatagcaaaatggcatcacctggtctctcgttcttggcatagcacccaatcatggcagtccacgacacaacattcctctctggcattgtagcaaacacactctcagcatagctgacgattc

SEQ ID NO: 25077 - DNA, 3885 bp, Oryza sativa
aagtactgagcaatacttacagagaaaagcggcttatgaacaacaatgtcgtgaacaacagagcgactggcgggtgttaactatggcactccctccatgggaagcccgtccaagatgcaggtgtggtgatcgttgtcaggttcttcgttccataaatcctacaacattgggtcgaaggttctttgtttgtccaaatattcttgacgacgagttcatggtaagaatattttgattacatgaatccttattttctcacaacatttactaactttgcttgctttacatctattctttcctcccaggaaccaccaaggagatgtcaatacacagaatggatagacaccagaagggttctaactccacctagccgtgttgtgcagcttgaactaccagagaaatacagggttactaaagcgcggtttgagagaggagagggatcctcacgtaggggttagctattatcggacaacttggcatattgaaatttctactgtcatgcttccttgtcccattactacatcgtcgttgtgttcaactattgcactacctccctcctagttcgaatctaatatcatctatgtcacgcccggaaattcactagtaatttccgaacttatttgtgcataaaatcctcgtccaggaatcagccgaggtacacaaactgacaatttaatatacaaatccatcataataataacgttacacacttacaaaagaaaagaaaacagcagcggaattaacggtctagcgatggcttcagctccactcccacaggcagctcaactggggtataagccaaacgtcttctccttctggatcctttttcttcaactgaggttgattgattattgcaagaatgagcatatgacatactcaacaagccacacagcaaatatgcaagtgcacaaggataccaaaggatggcataatataggctcatttgcgaaagcagcatttagcaaagagttaagagtagtaaaacagtagagtaattaattaaaaattttaatcaacactgaacagcacacccatgctgtacaggcccaaccatcctgaacaaccatacccggctgtacagatctaactccaaaccaggagctaggcaaattattatcaggtattaacatccataattattgtgagaggtgtgagactaatcacgaaaaacattgctcaacccgcccataaccgcgggcacggctattcgaatagttttactctggccagaggtgtaccactgtacccacaagacacaaccccacatcatgtcaccatgtgcctcaataccaccacggtacctcggaaaggagttgtgacaataccccttgcacaacataatccattacagcgcacctttcctggatcataatcaccccctcaaaaaccagaggcatggactctccagcgacccccgtggacttctcgccacttctcagtctggcgcactataatgaatcacgctatacaaaagataaagccgttgcccacgctggcttgtggttggcacggtaaatgtctcacaacagtagctcgcgaaccggtccttaattgtcatgagcacgactctcaaaaccatgtgctcacaacccaccattatcaagttttagttggcaagtaattaattaaccaatcacgattaaccatcgtgaactatcattaagccatccttaaataatagtgagtcataagttatcccaatagtgtgctaatgtttctaagcatggctaagcaatcataactaatatctagctgaaccaatatataaagcccaactagtcaagttataataacccaaggtatcaaggaataaagtaatcaatgcaaattggccataacaaaggaataagttcacaccactcggtgacattcgaaaataaatgcacagttgaaataaatagagaatttaaatataggatcaacatgctcaaaggattgtgtttaggatctgtgtgacttgccttgcaataatcggccttcaagtaatcttcttgatcacttccgacgcactcacgaaccttcgcaacgacggaaacgacaagctaacacgcaaaacgaagaaaaagactaataaaaaccaaataaacagtacatataaagtaaacaaacatgtagatcatgattttagatgaatttagcaacttgaaccactcaaaaccgagttacgatgatttagttatgaatttccgaagatttaatctattagaaaaaactggaaaaggagaagatgatgacgtcatgatgacatcatcaatggccggaccaagatggcgacctcgccggagatagagcgaccggctgcggatttggaggacatgaacacgtagaggacgacgagacgaacccaacgatactcaccctcgtgccaaacgacgaccgacgacggccggcgacgaggaggcgacggcggcggctcgggttgcacggggcggcggagctccgatgaccggcgacgaaaaagaaagggtggccgagcttcccctcaccacggcgcacccaacggtggtgacggcgaccggcgacgacgatggagacggcggcgcggcggcaccggagatggccggcggcggcggtttgcttggcggcggtggcgacggagctacggagcacggcagaggacgggagagggggcaaacgaaagtggaggactagggggtcctatttatagccttggattgaagagatcggactcctcccgcaagaaatcgatccgggaaatcaaaaactcggttttggagataaactcgaaaacgagtttgattcggataagatactcaacgatttgctccgatttttgggggtaaagatagaggaggataagaggaatatttcccctcaacaaaattggagaaaaagagcaacggggaggcgagaattggaaggaagaggcggcggcactgtgcacggcacggctggctcgggctctgcctgagttggaagatgaacagtagcgcagggagggaaagtagacttttccggctgagctgagaggagaggaggcggctcaggttgggccggcggaagagagaggaaggaaaggaaggaatgggccgaaaatggcccaagctgaggaggaggattttattactttcccaattaaaataatcacttaaatgatctttgaattattaaaaatacttccaatgctcaaataatttcaagaaaaatcctgaaaatacttggacactcaaagtacttaaaaaaattacaattagaccatttaatgattaatttaatatgtgggtaattactgaaatgctctttgtatgattaaaaattaggaattgagctccgaaaaatccgagaaaattccagagagtataattaaccatggagaatttaataaaaattaaatccatccatgctttatatttaggaaattttatttcccacatttaacttcacttgtaaattaatgaacatttaatataaattctattattaatttattaaacaatttataaatcctgaaacgaaaatcaggatgtgacaatctatgtaaccgcaatgcaaatagttgtatcatgttcaaattgtactactatttcttcatgttacataattctcctagtttaagtccatataatgtttctacgacccagactgcgataagcctatataaattatccgagtactaatacgtcgaataaggtacaaaataatacctcacttaacatatgaaattgcgcaacaaccaacttcaatacatttttataacaatattaacaagttttaccaataaatacttctttatttattattaacataacatagaaaaatcttttggccgtactttttcatctgggtcctttgccgcccagggacccagatgaaaaaagtacggccgcaagctctttatgggcggccaaaattgcaattagccccttg

SEQ ID NO: 25078 - DNA, 1329 bp, Oryza sativa
caggtacttgacttccgtaagcaaaagaattatctttggttatcaagcacccacctccttagtccttaccttaccatatgtatctttcatggccttattgttattatatgtgaatgcatgccgcagcaaatagccaaggtcctttttaaagaacatatattaacaggtactgatcaaagaagctaatattaatctcttggcagctttctgatgtatctttacacacagttactaaaattatgcttttacccactaaaactgcatgagagttaagcatttgtgtgtccttttccctttttcttttaggattaatcagaactatgcttattaactttgcaccatggatattctatttttaacttgtgacagttgcgtgcatcaatttttctagcacctctcatgtttatgcggataacttctatcttggtttatttatcagaaggttgtgggtcaaggcttgacaagaacagcatcgattgctgcattaaatccacagctacctggatcgtcgacaaatgggccgatggcacaaatgtcccttcctcagaaacagcagcaggcagcatggttaaaacaaatgcaatcatcgctgggatcacctgtttctccacaacaatttcagcatcaacaaaggatgctattaatacatcaacttcaacagcagtcaggattgaatcaacaccaaatcgcacaaacccaacaacagcatcttcatctcaatacccagcttttacagcagcaacacattctacagcaacttcagcaacaacaacaatctccaaggatatcagcatctggttcccagaagtccatgaacctgacaggatccgaaccgggcactcctttatcaggtggaactatgactggtggaagtgcaagtcaaggagcagaagtaactaatcaacttcttgggaagagaaaaatacaagatttggtttcacaggtaacaaataaccttctgggttcattcttatgagcttctgtatcactggtatgatgtgatcgtatcatgatctttgagatttttcttgaaatattagaatcgcattcccatttttcagaagcatattctctttgttggttgaataataatattttgctcttttggtcgaataatactttactcttttggttgaataatactttgctttgtctttgaattgtgaactcctatttacaggtagatcccctgggcaaggttgatccagaagtggaagatttgcttttggagattgctgatgacttcattgattcggtaatgtgtttgttgtttgtaaatcatgcttttacagcacacttgctcttagtgaatttctatttggttgaaaa

SEQ ID NO: 25079 - DNA, 1080 bp, Oryza sativa
atgtctaaatgtgcgaaccggatagtgatctgtgcacatgtaattcagcgtgctaattcgagttctatgaatattaggttgcgacgacgtgccaggacaggatgcacgagattgtcgccgaggagcacaacaagggggcctccggcgaagtggcgccttggagggatgtgatggagaagagcttcgcgcggatggatggggaggtcggtaaccgggcgtccacccgcagcgacgacgagcccgcctgcccgtgcgagcagcagacgccttcgcgtcgcgaccacgcgggttccaccgccgtcgtcgccgtcgttagcccaacacaggtcgtcgtcgccaacgccggcgactcccgcgccgtcatctcccgtgccggcgtccccgtcgcactatccgttgaccacaaagtacgtatatgctcgcatcacagggccggctgagcctttcccgtccatctgcaaaaaatcgttagtttcttgtccatgagcgtgtgcctgacatggttgctacttgctacctcggaacggttcagcccgatcggcccgacgagctggaacgaatcgaggcggcgggcggccgcgtcatttactgggacggcgcccgggtgctcggcgtcctcgccatgtctcgagccatcggtgagctgatctagttttaccttcttctctcgtcgtctcaagaattttgatttggcacccggatccgaaactcacctgcgtatgggcgcgcaggggatgggtaccttaagccgtacgtgacgtcggagccggaggtgaccgtgacggagcgcaccgacgacgatgagtgcctgatcctggccagcgacgggctatgggacgtcgtgaccaacgagatggcgtgtgaggtcgtgagggcgtgcttccacaacaacggtccgccggcaccggccgcgcggccgagcggcgtgccctcctcggccgaggcggcggaaaccgagaacggaggagccgcatcggtgaaggggataagcaaggcggagtcctccgacaaggcgtgctccgacgcggccatgctgctgacgaagttggcgctggcgcggcggagcgcggacaatgtcag

SEQ ID NO: 25080 - DNA, 1441 bp, Oryza sativa
aagggaggtggcgatagctcctcactcatcggcgccatgggcaccgctgccaagaacagctgcattgacgtcgtcatcctcctcattatggcgttggccctgtccgcgcagctcgcacctgttaggcccgatcgaaatcacagcaccggctgttgctttctcctactgcccgacgcctaagcctccgatgccgcctaatccttaaaatataagtatttagcaagatactaagtacaatgacttagtaaagtggaaaaaaatatatcttgatcgtgtaaagttgtcaaggataatgacagcataattcatgctttcatctgcctctccaaaaaattgagacacgtacatgacttgtgtaaaagacaaatacaacagctggcgtaagtgaacatgctgaacgggctggtgcacacggtagtcggcaccaaggccagcgacacatgctgcccgctgctgtccggcgtcgcctccctcgcaggcgccctccttgccatccgccgaatttggctcaacaagtggtggagattgatgaaaaaaaaaagaagagaaagagatgatgaagaaaaaaatgtatttgacgggtgggtctcacttatagagaaagaagatagaaaacataacggcagtggcacgattataattttgtaaaatttcagtgacacggctacaaatagacgcactgtaataatatttatctaaaatgttatattttcaatgacatggattgaattaaacccttacatctaaacttgcgtgtcagtgtctcacaatacatcagtagtgctacagacaatctccagttccccgctgccaggaaccaatgctggattgcgggaatcaaccaaaaaatggctatcatctcgggtgatcatattactcgatctgacccgttgatctatagaatgggcggtcaaaaaacgggtccagtactccagtcatgtaccaacccttcgtcccaagtgccaactgcgcctgtccgatcggttccgatccgaccaagccacacgtcgccgaatccgaacagctcttccacgaaccacttgcccctcctcacgccctctcctcgtcggtttcgaaccatctagaagcgtcgccgccgactcgccatctcctctctaggtcaccggatttcctagccggcggcgagctcgtcggctcaggcggcggcggcggcggcgatggactggagctccgtgactgcggaggatctggtggacgcgctgcgggaggtggactggtcgacgccgccgcgccccgtctccgagttcttctcccgcttcaccgccccgcgatcctactccaagtggaccagccgcctcaagtgcaacctctactagtaagtagtacggcttctatctcgaatctacctcccacctctgtgcctctcctcacgaatcgaagaatgagtgagctagattggttggcccactgtgatttgggt

SEQ ID NO: 25081 - DNA, 2548 bp, Oryza sativa
attcatgtttgatatgcagttttgcagttacattcaatgagaaagtcacaaggacagtcagacaattttcaccacatttagcagcaaagatgaggccacccttaaggtggggatcctctccccctatttcttctataacattcttctttttttaaagagtctcagaagaacgggctaacaacattgctgatatttgcagacctgtcattcgtggccgaccaagctcaaaaagatcaattcatatttgtggccggcctcgatgggtttttgttgtattattttctgtcggttagtataaagcactgacctccatacatactattctagaccatagttttttttttataaaaaaaacaactaaataaataatgaactcaacatataatttattttatttttgcagtaagctgcttcctctggatgacctcatgtagtctccttacggttctgtgggcactaattgttgtctgcttggtaaggccaaacttgaggtttaaaattttaaaattgtgcatgtgtgcctaatatataagtttgtgccttgcagcaaccttgcttcacgccagtttcagaacacctaatctgaaagcacgcctgaacacattcagggaggaatttcgagcagtatggcggaattatagcgagttttaaacgccctttttgtctaccccatgtgagtgccttcatcgctgtcttatggtcgaaaattgaatctagcgaagggcttaaagtgctacctgttctgtcagtgcatcattgtggagctgcttattggatgtctctgcggtggtgcaatgtagaaggacctacttcagtgtgctttcgaatttcttgattttctctgcagatttatgtggtaaaaatgttaccaagttccatatctctgctgcctcttgcgactctttaattgtgggagattaaaaataggcatgctattttctccagtttatggatttggctttagattgtggattattctagtcccccaccacatggatctccatagttttagcttctggtccaaaacttctactgtattttgatacattggggaaggaacagcatgtaaaagagacagctatcctgaagagaagaaaaaagatattgttgtgaaatgcctgttatttttcatcgttcttttacagtaatggcacattttgtttcacataggtgatttccattcttttagatttctccatcaaaaagctcctcgtaggttttgtagacactctcggggtgagcaaatccatctcctctgatttgcttaacctgtccaacatgaacaatgcattttcagttattacaattccaatacaaggcctacaactacaagaaacccttggcgtatccactatacttgcattttgttcaatagtacttttttctgtactggttactaacttatcggaagttcagaactgtatgaagtttattcatccggaattgcataagatatgaagacagaagtgaaactgttttctgcacttgagacagctgaaaggttggatgcacttgcctgttcgatttcagagagcttggcacacagttcctcaggaatagaccaaccaaacagatccatgttctccttcaacctcgcctcactgacgctcttgggaagcacactctgaccctgctgaagaccccagcgcagagcaacctgagccggagttcttcctagcatctcggctaccgatggcaacaccgaatcaacggcgatgcccttcatcctgcccaatggagcatacgcctgcaagaatcatgtgagcagtgaaccacagcacaatgctactactacatatcaagtgatcgatgagctcagaaacatgcaggacttacagagagatgaacgccactggtgtggcagaacgctctgagcttcgcctgctgccagcccgggtggcactcgacctgatcaacggccggagggacgcgggcgacgcagagcagatcgccaagcttcttggaggagaaattgctcacgccgatcgcgcgagctttgcctgaatcgtacagctgctccatcgctcgccaggtgctgggtatgtcaggcttgacgaagttctctggactgagctccgtgcctttcttgatctgaaacggccaatgaatctgcagagattgcaccgttgggcacctgtcagaagcagagcaaaatggcaaacctttcactgtctacgtttacgctgatcatgatgagcttaccagatacagatcaacgtaatccagctgcagatctttcagtgtactatccattgcgagtgggacatcttcaggtgcgaggtcgctgcacctgcagagtttgggacgtcttcaagaggaagggatagaacataattcgaaatagcagaataaacttgcactactagtagcgttcagaagttgaggtcggtcaatagaaggaacaagacagcagcagtcagcaccatatcttggaggtgatgaagaggtcttcccgcttgacaaccccatcatcgaagagcttcttcagagcaccaccaatctaggagcacacacaaaaatcactctcacaagttaaaccggtgcaatt

SEQ ID NO: 25082 - DNA, 1683 bp, Oryza sativa
ctcccagcacggaaaccgcccaccaactttcgccgcatggcgccggtcgccggggcggcgtctgagagggcgcccgcacggcgcgcggcgcgggtcggaagcggaggagggcgatcgagatgagggagctcgccggcagccccgggacgtggagcggcctctcgctgcgggtggggcagctcgtcttcgccgccgcgtccgtctgcgcacggcctccgccctcggcttcgccgcatacaccgccttctggtgcgtgccgtcccgccccctcttctccccacccttgtctcgacgtcatcccgtacgagtagacgagtagtctgtcgctcgattgctacgagcaaccctcgctgcgtgccttatgcgtttgcaaatcgattggggatgctctggtgacggcgtttcgcgtgcttgggcagagtgatttagtgcggatcataggcatcatagtatcatacacgcttgaacaatcatgattgagtcggccaatttgctgattgatagagtagcttattaaaatttggccggcatgtcacgccgccctgcaatttgctgattgatatgcagctttgttgctggataatcattgttgtggctttattctatatccgactgcttgcttcctggagccgtctgctactgtaattggggatggaagttttgtggcaatgaggtttcctttgtgcattatattattcacaatttcattgacagaacgattcatttcgtaattcaagtttgtgcaatttggatcatcaaagtaaatatattgtcactgttgctttgaatataagttggccttaggcttttggtctaagtttgtagccactgatagctgtaagatttgaatagacactccttcaaaattgacaatcagttaaaactattcagtgactgaggcatctgtttcaagcagtagaatggctttgttcatcttcgggtgcagcagccggggatgttgttattccgttatctaaatgtttgaagcactaggagagaccaaaggtagtcaatataatgaaatttaaaatttttatgttgctggaacattgagcaactttactcatatccaacattcattgtttaagtagggtaggcatgccaatcattcatgataatctgttctttgtttgtttgtcctatttattactctatttaatttgatgagtgacataggaagtctcagtgttgtctgtgctgttaagattggtgtgttcattttgtggaaggaatctggcagtcgtttgcatatgtgaacattcgtctatgcatccatcaaagcaaaaccatttgatctgcactatgacagaacttgcagattgaatagtatcctgttaagtaaccagtttttggtgaactctcaatttcagttacttgattgcatcgatgggactacaggcactctggagcttgggacttgcttgccttgattgctatgccttgaaattcaagaaagatctccacagtgctgttctcctgagcttatttgttgttggcgactgggtaattattaatgattttttttcatctcatgtattattcacctcagtagttcccacaaccattgaaatggataaatatttagaaacaaatcaagtaaaaatttaaatttctgaaaatttctctgccaggcctgtcaaagcataagtattatactcagatagaactcattataaaaatatc

SEQ ID NO: 25083 - DNA, 2991 bp, Oryza sativa
tttctcttggccatatgtatatggctacccatttcagggagctattttgtggagtagaaaataatatggaacactctcgtcctcacaatggcttgcaagactgaggctgatggaagaacaagaagcatggcctaggatggtttctcatctcgttggcttcagttgctccactagctcatttggtttattgattgagatactgaagaacttcagatccataaaccatcactcatcggtatacagaaaatgacaaggcttgaattgccagtacagatcgaaatcaccaccacaaatcacaaccgcaactgcgaagctcagcacagcagcatgagcaaattgccgtttcatacttacataccagtagttctacttttattttttctttttctagtttttgcgatgagcttgtacaaataattggcctatagtttatatggatctgcctgatccttattattatccactttgcatcatttgctacaaattgtgcaatacatcatgggtctgttccatatagcagtatatatttgtttcaaaaagaacaaagtacaaggctgatcctcttcttttataggaaaaagagtttcttctggtcctcttggtgcagggttgagaactttactggatggtccaaatgaaggtacaatcaaatatggcacactgaattctcattgagaagcagttttcagaatgtgagtaacacacatgctaggtcaacatcttggaaggatcacaggtataaactaaagatactgcataaaagaacttgagtataccataacataaaaggagggttagttcacatgacaatctcaggcttcaggatgcttgacttgatctctttgtgcgggagaacaacaccgccgttggtatagacctcatcacctacatgtacgtcctctcccaggatagtcatattttctatccgtgcccattgtccaacagttgagtgccatccaataatgctgtttgatatgcaagcatgcttcttaatgtgcacgccacgcatcaccgtgcaacgggaaagcctcacaccatcctccacgacgcatccaggaccgatagcaacatcaggaccaatcagacagccttcgccaatcttggcactctcgtgaactagcacattcccaacaatgtgtgctccagtggctaacctgttggttgatctcttcctaagtgaatccagataaaggcgcaagcctgtaatgtaatcccttggttggccaacatccatccaaaaacctggaaggaccagagcaaagagctttgcatcagatgcaattcgaggaaagacctctttctcaattgaagttggcttcagctcgatgcggtccaggacagatggattcaacaagtaaattcccgcattgatcttgttgcctacaaatatttttggtttctcaacaaatttttccaccattccagtgacctcctccataaccacaacaccatattttgatggttcgtccacctatattgaaataatagtcagtatacacagtacacaagtttacaattcaagagagtggtcaaagaaaggatctaccttggtgaccataatcgttgcctcaccaccatggctcttgtgaaattttatgagctcagcaaaagggtattcacttatgacgtcactgttgaggacaaagaatggctcaccagatccatccacaagcttgtcccttgctagagcaagagggccagcagttcccaagggctcagtctcttgggaacacgtgattgtgatgccaagcttatcctcaaagtccttcaggaaattgagcattacctaaaagacggatcagagcaaaccaattagaatgtgaagttagttatacttataccatgagacaacagtaaaagattatctcctttttacctccggtcggtagttgatggctaaaacaacttctgttactccaacttctttcaaggcctcaatctgcataaatcggaaaacttttaattcagagctcattactctcctcaatcctcatgctcatgtttgctggagccaacattttggatataaatcaagtactcttgataaccgattggaattttcgaggacagagaaaatttggtgtgataccaaaagagttttccaaaatcatgtaaccaaattgataactaaggaaagaaacaattgaatagtaaaaaggtgcattcaatcacatccaagtgcaacctaccatggatttttagttgttacaccatgtttatgtgggagtaataaacaaatcaaatagtattaatgttctctgaccagtttagcaccctctccctcctttcatggagaggccagtgccattgttggactgttggtaaagaatactgtactataattaacttgtgcccaattcatccattggcactgcaaataagtactcttattactccatcagagtactagcgaaaccacttattacctgatgcagaatcatgggcttgttcgcgaaatcaacaagaggctttgggaaactgagcgtcaaaggccgaaggcgagtgccgaagcctccaacaagaatgagcgccttcatggtgaatcgccgcctcctgttctcccctccctaatccctactccggcggggatcctcaagcgggctcgggaaggagaaagctgccattgcaacagtcaaaatcaaatccgacactaggttggagcatcaaagaacaaagaaagaaagatttcgatttgatcgctcgcggccgcggcaaagctccgatgagtttagggcttccgtaccaataggagggatcagcctggaagatctctcttccttctccacgaccagcggaccagccctcttggaggtaggtagcgcagctgcggtggaaggaggagggctttgtgctgcgctggattgggaatcgagaattgggtgggactttatagagacgaagtggagaggcgacgcgaggggaggggaacgagagtacgagacacgacgagaggttcaggctttcagaattcagataactacagtagagatg

SEQ ID NO: 25084 - DNA, 619 bp, Oryza sativa
agcagatttgtgatccactagacctccaagtcattgtatatattttatcaacatctgtacttaaaggcatggaaatcggatactaatcaatgtctgaggtaatttgaaatggaaagagaatggacagagtgaagaaaaggccttaaagaaagataaaataccctccaaatccagccctcatgtccaatacattccggagtttgaactttctccacttaaaaacacgaatataaccttcaacaatgtcatcccaaaatttggtttctgctttgaaaagctccttctttgatgagtgtgcatccatttcaacaccttcaagcctttttggtggctccattaaacgtgcaggccatggaaagggagtcagcccatcaccgttttcaggaagccggctgatacatgctttcagattgacatacctgaaagagaaatagaacataaagaatagcacaaaaaagattcatgccaaataaaacataacagcagtacaacagtccaatcaaacagtagctaaggcctctgaatgatgtagtataatctacataaccagaaaaatgaatagccattatcacagattttgttgataatatgctttgcatttatgaggttttaatggtga

SEQ ID NO: 25085 - DNA, 1571 bp, Oryza sativa
  unsure (1)..(1571): unsure at all n locations
taagcttgtttttgttattgaattcttgtcactaaatattactagtatgataatggttatttattttgcataaactaagcataatacatttcctttttttattatgatatacattgaatgaatgttttttttcttctacagacggtatctgccatgtttatattgacaaatcagctgacatggacatggcaaaacgtattgtattggacgcaaaggttgattatccagcagcgtgtaatgccatggtacttctctaatttacaaatttattagcgtgtgcccatatggtgatacctctctatttattgtacttttttttaaaaaaatgtatattacgaattgtatgtgtgttctacatcgttgctggccactcatgctaacttacaagtattgttgtcgaacttctggctaaaagcaatagttcactgtggaagatgccattctattcaagtctaactttcctatttgtccacttaanttatttcttggaaaattttatcatttgagcacagatatctaaatattttttatattctgtgcaggaaacgttacttgttcataaagatctgaacaggacagaaggccttgacgatttattggtggagcttgaaaaggaaggtaaaatccacacccttgtagttgaagtattgcagccatttgtatcttgacatgtgttctgcaaaaagtgctacttcctccgtttcacaatgtaagtcattctagcatttcccacattcatattgatgttaatgaatctagacatatatatccatctagattcattaatattaatatgaatgaggaaaatactataatgacttacattgtgaaacggagggagtatttcattttattatgagaaatgatgaacagttatgtagctcaacatcaaagatttgatgttcttaattactttcaatgcttctcaagggagcatattacagattttacttattatgttgcagtcaatccaaaattgctttgcaacacgagttcttgtgcaaatcagcaaaaggggatcagaagagcactaatggattttaattgatgtcatgttgcaggggtagttatctatggcgggcctgttgcacatgacactttgaaactaccaaaggtagattcatttcatcatgagtataactcaatggcatgcaccctcgaatttgttgatgatgtgcagtcagcaattgaccatataaatcgctatggaaggtatgcagtttttctccatactatatcctcatcactttttttttttggaagtatgcagtttttctccttactatatccccatcatttcttttttttttttttgaactaaacttgattgtgttaaatatatgttcatttcagtgcacacacagattgattatcactactgatggaaaggcagcagagacttttctacagcaagttgataggtgtttaactaatttcctttgcacaactattatgtttgccgcttttagtacataccttaattaatggagttattcttctataaattgcaacagtgctgcggtattccataatgcaagcacacggttctgtgatggggctcgctttggtct

SEQ ID NO: 25086 - DNA, 673 bp, Oryza sativa
aaagtacctgagcgtggcgacgctggtgctttccatgataaagatctggctggtgtagggcggtctgctgctgaagccggagacatgcacatcgcagaagcctaatcatcagactggagcctcaactgaaccatcccgtatctgatctgtttagataaagacagttatattagaaatcgccaataagtctcggacgaaaattcccagcatttcacaacttaagaagttcagaattctagcagctattcgtaatgcatcccattgcagtattgcataacaaattacagagatgaatatcaatctcccagctcagggcctctaaccatgacagatggtagatactctcgtatcagtgtcaacattaggtggggatattacaatattacatccatgtctggtatccacagtaccatcaccattccaaatgtgtcaggataccgttactactactgatgtgttaaacagggatccatcacaaatgtatcaaaattgtctggcagagattccaattctctccaaacaaacaactcagcaatcttttgaggtacctcctgaaagactgagtcatgatggctagtctaatcaatatgttaggctatacaacaattcctacgtcttcagtggttattctgtataaatcagtaaagctcccaaaaaacattaatagagtccg

SEQ ID NO: 25087 - DNA, 661 bp, Oryza sativa
ataaacaaggaaagaacggcaatgcatgaatgaggaataaaagagcagctgtcataaatctaaaaatgcaaacgacaagaacaaatatgaattcgtcatgtgggaaaataccaacagaataaatgaaagactagtgtgtttcccccacaatggaacaaaaattactaggggtacataggaaataatgcatacctttccatgcttcttgctgagcctcttcatgcttataaacaggctgtgctgcccaagcaaaataaccgccggctctgagcattctattaacctccagaagcaggattccatctttaaagtggcaaatcatggcaacaaaagttaagcaaattggaagtcagggtgctacaaaaaacagttatctttgtgttgatattttgttgaaaacaatcattggatgaaaaagcgtcttcacgtgctaaaaataacacactatctttgcaatgtttgagtgccttgagcatgtctatttttctaataaaggaacttccagtcattatttgaataaaatatttttcttatgccgtaggaatgaattcagactagctccttaaatactccttaaatatgttgcctttgctcaaacgcataactaagaaaaaaaaaggtagaactttacatcaaagtgagtgctcaccatcgtgggtcc

SEQ ID NO: 25088 - DNA, 675 bp, Oryza sativa
tcacgtgaaagtaagtatgcaccaaaacttgctactccacagccaacatccagggcaactctagtgtgagagccaaatgcaatatctggtaccatctggatgaacagagagacaggtggtgctactgagagtcagcaacatgataaaattttcatcagataaaagtacaatcagcatacttgagaaatctgatccaggtattgatttgctccatggataaattgagttcctcctccaggaaatctaaatttatccttagctttactaatccaattctgccctcctttgtcatcaaccaaccgcgtgtgaggtacattgctaaaccatacctgcaattcatcaaagtgtgttatagaaactcctttacctgaacccagaggtctttgaaaaattaaaccaaatcagttggttatactccctccatttcataatataaggcacaactacttttttcagatatttcataatatgaggtgtgcatgcatgcatgcaattaaatagcacctcctctctattcaattattatatttaaatcctccacactcaagatctctaattctattgggtgcatgcattgcatttgttacggtgatccaaactaggaggtgatcgtaattgtttcttggtctttgggttaagggtggttatgccttatattttggaattttggaatgg

SEQ ID NO: 25089 - DNA, 510 bp, Oryza sativa
ccattgcctatatccagaatccaattattaaagtcattgatttctttatattctaaagtattagatttggttttttgtaatcgcatattttcaaatagaaatatttttttaacatacccccaaagatatgactttacgattgatgcattaataatttccagttttgatgcattttctataactggtaagatttgtttagggtctcctcctagaacaacaactttacctccaaatggtttatcgatagcattaatatatttttctgataatatatctcttaatgttctatcaagagcctcaaagcattggcgatttgtcattaatgcttcgtcccatattataagagaagtttctattagtaattcagctaattttgttccacgtttaatatcacataatgatagttcatctatatcaactggtattcgaaatcttgaatgggctgttcgaccatttggtagtaataatgatgctactccagacgatgcgactgttagaacaatttctttt

SEQ ID NO: 25090 - DNA, 585 bp, Oryza sativa
ccctacgtcatcttgtacaagtggaataaataacttagatgagcgattccttcactctccttggcatcaggatcgatcatattgtgtgttgcagttctgttacagcagagtactcccttcagctggtccaagccaaaaaataaacacaaccagccctgagctcctgtgacagcatctacctggcttcaagtgctgatgccgcagtctcgacagtcccaagtaagcaggtgtacaccttctgcttcagctgctcaatggtttcaaccaaagcatcttgagatttatcaacctcactatgcaactggtcgagccagttactcgtctccttcagttgcgacaaccgaaccgcgatttgcccgtctccgcccttggagtgccctcttactcgttctctggtgttcttgttttggccctcgaacttgaatccagcttcaagagcatcttccaagaaactgagaaaccatgactgtgattctttctttagaataatccatgatctggagatctccttgaaaccatcctctctggcccagtcaatcttttcacttgtgtaagcatcgtcagagttctttgccgtactacctg

SEQ ID NO: 25091 - DNA, 731 bp, Oryza sativa
agcatcttagttcaaatgtaaattaaacctacgcacttaaacgtacctgaggttttgattcttgtttgaattttgtcggagctgacttctgatttgcagaacatatgctacttcctccattacttttgtcactatctatgctggagtttagattggtaattttgctattgttgctagatatcccaagcatgtaacgtgaagctacaactgccttctgctctttgatgactaccttcctctgagagttctccttttcactttcagacagttcagctgactttgtagccttccgttgatgagccaatgcttctgaaatcccagtgggagttgacatctgcatcaaatcctttggatttccaatgcaagggttccttcctggaacaggtcgaaccccaacaagaactgggacagggatactagattggaccttttcaacatatatgaactgtccaagttgaagtttgtttgataagatgagttcattatcctccttcgataaagaaacatacgttgagtgcgacgagtctgaaacttttataaagaaaccatggtctggccaaagttctgaaccagtgattgcaggaactatgctaataacttggagaagaatggaccgatattctccacatactttcacatcagaatttatattttttagtacttttaacagtacccctggagtaagagatgccatatcttcaagccagcttactcttctgggctgcaggaat

SEQ ID NO: 25092 - DNA, 520 bp, Oryza sativa
gtagcagctgagaggtagaggatgagtagttgagttttagggtgggggatgaagaatgatgtgtgggtgggagggagaagaaggttagggtgtgtatttatagggagaagaggcgagggtttaagcatgtgagctgaggctggctaagcagcttcccctacgtgacacagaaaatgttgggaaatattacgagggaaaaaataaaccatataaattagaggtcatgcatatgccactgacaactggggcccatgcatgcgtttgactttttgcagcatataccattggctgattggctcgtccttgctgcatggccagagctctctcttcaaaccatgtcttttcatgcaagtaaaatcttttttttacgccactagaaatagttactgtgaattcatcttttttttttaaaaaaaaatcatatttattacatcctttgagcacatgtccataagtagctatcaagaaaatcggtcaaatattcccaataacatgaaaagagaaactacctagatccagg

SEQ ID NO: 25093 - DNA, 1137 bp, Oryza sativa
gcgtggtaacgtatatacacacgtcactgcatacgtaacatcgtactcatacacccatgttcaatgaagcagaaactagcgagacatcctaaaattttattaaaacttgaaagtccatcagtttcaaaaatattttggggttggaacggaaatatgctagggccatatggtattatggcaagtcgtctcgtttccattttaacatttttagcttacttttaattcttataggcatatgggacaaggagctataaacttgtaacttggacgtttatagcttgatcataacattggtgctaagaattttaactataaacattatagttttatgataattttattgttaaatatgtggttttgtaatacttaatcttaaatcaatagttttgtgacaaattcagtgttaaatctataatttaataatacaacatcttaaatgtgaagttttgtgatagtttgataaaaatatattaagttttgtaaaaattactctattaaaaaaaggaaatgtgtgctatgctccctatcttgctagtccagggaccaaataaaacacatatacttgaacaactatcagtccattgcagcaacacttaataaacagccaccaggttaattcaagtagcatatgacagtataaataatagaatcaaacgtagataagttcacatatcaccgaactcgcgtacactggttcagtacacatgtctcgcacaacttttatggtagtctatggctcataaaccgacttgctaatacaccaacacaaattaatcaagcttgaaccttaaccggcatcgcatgccgatcccgtcttttgacgttgcagtaattttccgttcattagcctctgcatacttaccactgcagcttaagcgttcatgcgagccgggtactgctcgacgcagtccagccacgggctgcgcgccgggcggcgcacgcggcggacggcgcgccacacggcgctgttgcacttgaacccggagccgaaggcgagctgccacacgcggtcgccgcggcggacgcggcccttggcctccaggtacgccagctcgtaccagatgctgctgctcgacgtgttgccgaagcggtggagcgcggtgcgcgacgcctccaggtcgccgtcgcggaggccca

SEQ ID NO: 25094 - DNA, 1983 bp, Oryza sativa
ggcgagccccgcgccgctggcctggagcatgtcgcgggcgaggtccaccgcgatgacgccggcgctgcaccccatgccgccgaggttgtagctgaggatgttcccgcgcatcttgtagtggttgacgatcatggcggacagcgacggcgtcgggttgaagaggctgcagttgacgacgagcacgccgacgtccttgggacggacgcggcacttgtcgaacagctcgtccagcgcggcgaacatggcggcggacgcctcggcgcggccttccttcatggtggcgcagttggtgcccggctcgaacacgcagcgcggcatgtaggactcgtcgccgatgccagacttggccagcagccgcgactggaacgccaggctatcctcgtcgaacttgcccgacttcctcgccagatcgatgaactccgccttcgacacctgcaagcaattgtccatgcaaaatcacatccttgcttacaaatcaccagctagtaccataatgcatcaaactgattacaaactgtaagtaacaagtgaaatcgaagaaatttcatgcatgcgaaccgggtaaacttggttgtttgactcaaatccatcgtgcgtgcaaggatagtgcaggttgtggtttgtgtgctcacgcaaaacatttttcgaaaagaaaatgtgtgctcacgcaaaacatttacggtttaataatacggttcggctcattgaatgtgtgtgccaagtcgcccaaccgtatttgatgacccgaccaagtgaaagcgatcgactgatcgagtcaccggctggcctggccataaccgaaagcatcctaccagctcgtcataacttcgaccctgccctgcccattcacttccaaggactggggcccaaccaaaggtgcctcctaacttgcattcaagactccaacaaaataatggtagccaacaaactgttttccaaaacttagtgatgtgtagcatataagggcctgtttagttcgtgaaaagaaaatttttatatgtcacatcagatattttaccggatgtcgaaagaggttttcagatacgaatgaaaaaactaatttcataacgcggtttcgtgaaaagaaattttttatatgtcatatcagatatttcaccggatgtcgaaggggttttcggatacgaatgaaaaaataatttcataactcgtttggaaaccgcgagacaaatcttttgagcctaattaatctgtcattagcacatgtggattactgtagcacatatggctaattatggactaattaggctcaaaagattcgtctcgtgatttcccccctaactgtgcaattagtttttgtaatttatatttaatgctccatgcatgtgttcaaagattcgatgttatgttttagggaaaaaaaattggagaactaaaccaggcctaagtctgcaaagatataactagagtttcttttggagtatctactaaggaggagcttcttatcaattttggatctaatatatcatgtaaatactttataatattcagttaatattttattaccattcctttagtcaacatagagtaatcagggaaaaaagcagtggtcaaagactttacttgagaatgatggcagtatttatactaaaagtaacatacagtacaagataacagaggcactcgggcacaaggaaaagcatctatctagtgtaaacttattaggtgtagaatcaatatatgataaatgaatttgattcatacaaaatagcactacctccgttcttttttttttgtgcaatttctaagatattgctttgaccattgcacattttacaacgttgtgttaggatataatccctccgtttcatgttataagatgttttgactttggtcaaagtcaaactgcttcaaatttaactaagtttatagacaaatatgaaaaatatggtaatatttaaattagcaaattagttttattaaattaataattaaatatatttttataataaatttatcttcggt

SEQ ID NO: 25095 - DNA, 656 bp, Oryza sativa
agtaaattttgcgaaagtaaacttggccagtgatgaaatactaatgggacatgcaaaatataaagttatgccaccacaaggtttgctctaaattttgcctatgactttgtctttttgaatacttgctgtaattggacctacatgaaaaactcttaaccatagaattgttctacaaattctcatgtatagtgatatccttcttttctatgttgtcattctgcaaatttttcagctttcagcatgtttttggcatgagttgaccatcctgtggctttcagggcttgcagtaccactatggcaagcaaataacaacttggatgttgagcataggttgtaactgttgtagttgtaccgtatactttttatacctaaatacttagttgatttatttggatcttcgtgaaccaaaaatggcctctttttttttttgcacagttgttcaatggaattaatagcaatggctgatagatggggcttaagtaacctgttcttcattgatttggtcatcattcctaacttaattcattagtcctgaatccggcatcgccaacagtacctcccagcattgggtttgctatcttcaaccaaattctaccataaagcgtggcatgagccaggaccatctcagtgccggtgagcacccacatggtgatttc

SEQ ID NO: 25096 - DNA, 883 bp, Oryza sativa
tatagggcatggttctcctggttgttttgggttgtacatgaggcactggatggtatatcagtatgtttagctctgtttgttttaactcttagggcaatggtagaaagcactgccctttttcttttggggactgcgaaaacaccacaaaatttggatcaaatgcaagcataccatattaattaagctctttcatatttgccatcagtttccttatgaaggctcttgctttctagtagtatatatgttgtagcattaggttccacataatttgtctgctagtgataatttggcattgagaccatattttcttattttgtttgttcatgaataccttcattcttcattgatcataaactttgttttcctttttctgtttttcagctgatgcaaggtccttagtctaccaagcaaggaatgaggcagctgaattccgtttcaaatggggctacgagatgcccgtagacgtatagcaaaatggtatcatgtctcatccttaagttctctatttgtgaaaatagggttgtggttgaatatatgatctttgcatttcttataacaaagtgatagctaacttttctggtttatgtttcaggatagcagacaaagcacaagtctacacgcagcatgcctacatgaggccccttggagtaggttcgtatcatcaagtgacctattgttccattggcttctgttctatagttaatgttaaaccaatcagcttggatcttatttgccctccatattcattttcttttggtatattccacagttgctatggtcttgggctatgacgaagagaaaaacgctcaactattcaaatgtgacccgcgaggtcacttctttggacataaggtatacacagtttctgtatgcttcattagag

SEQ ID NO: 25097 - DNA, 661 bp, Oryza sativa
cagcccccagccctcattcttctctcctcaattccagtgaaaaaaaaagaagagaggggaggagaagagaagaaggggcgaagccctgccggattcagacgccgatttcaggtaatattcatagatcctatatgtgactattgagttaaatagtgtgtattctttaaaaatttgtttgaataaatgcattatatttttagggttttattgtactaatctagaagtgcgtattgtagatatcggtaactacgtagatctgctagtttggaattaatacattaccgttgcattggcttacacaagaagatattacgttgtagatgtttattgcatgaaagagtaatatgatctagttatttcgttgacagatatgtcgaacaaacaaatattccaagtttaccatggaccaggaaacgtccgttacgggccaactggggtagatctgttagattttattgtatcagaaaggggaattgatagaccggctgagaggagtgtaccttctataaaaggatggttaatgaggggcttgagagttgatccacagacaagtgacataacaatcaatgttatagtaagtcgggcaactgagggtttttattgggaactaatgccagttcaaaacttttgagtgtggaaatggtatttggaaaaagccatg

SEQ ID NO: 25098 - DNA, 39209 bp, Oryza sativa
ccctctctcccctcggcccgcggccgaagtctcccattcctccctctctttctctccctctccttctctccctcctcttgggcccccttcccctcggcccagcaccctcctccctctctctcccgggctgtctctccccccccctcccggcctgcccggcccaagccgcacccccccctccaggccgagccgccctcccgcccgtgcacagcagccaaagaaatcaagtacaagatgaagaacccgagcgtaagaaagttattgtctgttacaaactgtagtacctgttaaggaagcagacatgccaatcgccaagtggtcactggagcaaatacagtacctgataagcctagcgctagtcagaagcaaccataatactcttatatcagtgttcaaatacttttgttttatagttgttccccgtcaatcatgtaataacagagaaacatgagataatgaatgagtttgataagcttatgaaggatccatgttaagagtgcaagtgctgtgagttgtgcacattttgttgttgattagggagacctagggtctcatttccgtaaacccataatctgttaggaatcaaatagcctagcgattgatggcgaagaaaatcaagtgatcaaccaaagaggcatttgtttggactaagagtttcagatgtgtctcttcggatcaaaggcaacaatcgtcagtctagcttttgacgaactacttcaaggtttctctgaaagacagcacgcccaagcacctcattgccccagaagcatcctcaacacccggagtgaagagtacctggttgagaaaggtcgaaaggtgattaatggaagagatcggaaaagatgtttggttactgggaaaagaagtaggtcgaaaggtgattgataaaggataacgagaaccatgatttgtgtcactcaaggaagactcccgatagcaaacaaccctacaacagttgccctgtcattaaaataggtgaattcacgagtaagagagatgaccacaggtagaagtacttctatggggacaaggatggaaacttttgtgacatgaccaagaagtcaataagtaaaacctgaacagtggaatctaaagctcggttcaaccttgggctttgtatcagatgctactagaatgaaagcacttgcactagtatcgctcaacgcactttcctaccaatcgatccatcgagaaagaacacatcaaggcggaaggtgcaaaggaatatgttgaatgctaaatgatgacaacatgaagagaatagtgggaagtgaaccaaatgtaaagaaagtgaatccgagttgcttgttcgtgagagctattcccagttatgaaccaagtgatatgttcgaagataatctacagaggtcagattaaaatcgcatctaacaacgaagcctcagatttggcaggataatgattagacaacaacaaatccagcagtaaagccatttgggaagacgtcaaagtatgtcaagtgggataagttggttctcttgggaaacataattcaaaggcaaagttatcgacccttgcatcaaatagcagaagtagttatcacccggagactaggaaagctaatatgaggcagttggtggcaggttagaagtaaatgacaagcatgatatgctcatgatgacaagcatggtatcctagtaatgacgagctgatctcgacgcataacgtgaaatgggtaacttctatgaggttgacgccaaaaatatgaactatgcgaagttctggaactgaagcaccatcttcaagtgccgcaacccagtcgaagtcagctaaaggttcaaccagggacaagtcaggtgaagagaagattccatctgcaacaggagattgagccaagcagtccagagtagagaagttttgctaggcaagttgttataaaagacgcgacggaagaagtcagacaagaagagaagaccgcccaacctatcttcttgctagcctcctcgaatctcggggacgagattcttgtaaggggggtggatttgtcacgtcctgataaattcatcccgaaattaaaattcattttctaaaaggaataatagaattaattaaaattcggaaagaaattggcaaacactaaaatacgtacaagaaaaattcaaatgtggcccggagaatttttgttaaattctccttggtctaaaaggagccctcaaattttagtggaattttcagagcacaaataataattattaagaaataaacaaagttaaaaaggttttataaaaagaaaaaccctaaaagaagtcttctttcccccccttcccttcttgggccggctcggcccaattctctccctccctctctctcctctcccccgcggcccatcggctcctccccgcgcgcgcgccgctgacaggcgggcccgcccgccaccctcgctgacgggtggggcccacctgtcatcgccttcctcccgccgctcccgccgctcgcccgtgccctagcgccgccgccgccgcggattccgccgcatcccgccgtccccgcgcaccataatgaggggggaatcattccccgcgattccctctcccgattcccccactttcccctctctctctccctcggattcgtccgattttgtgcccgcgatcctcgccggcgcaatcaatggcggccgagatctccgcgccggtttccatctcctccggccgctttccctctctcccgacgctatttaattgttccccgtgcctctctcctccgtttccgccgttcgccgctcgctctcaccgtcggaatcgcgctcgcgccgctttcctctctctccgccgtcgccgacgagttccggttcgccgccgccgtcgctccggacttcctcccctctcggcgtcgcctccttcggcttcgccgcgtcgtcgtcgaccccgtccgctcctccgtttcgctcgccgaccgtcggagcgccgtcgtcctcgtcgtcccgaaccgcgccgccgccttcctccgtttcggccgccgttcccgtcgtcgccgtcgaccggggtgagccgaaggccgctccattcgcttcccccttccctcctctctctcgggtgccgctccgccgcgccggtggtcgccggcggtgaccatcggggcgcgggcgcgtccccctcctgtcggccgtgccggcgaggctgcttttcgggcgcgccctcgcggctgccaagtgggcccggccgtcagccgcccgcgcccgcgggtgcggctgacgcgtgggtacccacggcgccggccgccgccagccgcgtgctcccggtccaccgtggaccgagaggctgacgcgtgggccccactcccgtggacccggtccgcgcgccctctccctcggctgacgcaataaacccgatttttaattaaaatttaaatgaagaaattcgcaaatatccatttaaagagcatataaacttcaaatggccataacttggccatttgaactcggaattggaccgttcaagtctctaatttttccttaagaagtcaagaacccatttttgtgctttgtttctgctgttatgtggagtttagtagagtaaaagccttttctttttcgttagtcgtgtagacgctgcagcttcggaagatccgctcttcgtggaagttgaagccggtgtttgggaaagcgagcaaggcaagtcacatcatccttgagcatattgaaccccagtttataaaattattttgatttaaattattgcattaccgctttatttaaattcccgcgttatcactgttttatttagccatgcctatttatcgttgttaagacattattattgctattgttattattaccttgttcaccctaggaaaataaaaccccaactagtgggtactctatttatggttccactagtatgaacttaggtagatgcttcgctggttaattaggcaacattaggtgattttataactttagactttgggaattctcatatcatttggacactatggaattgttggtttatggtggaattggacatacacctctcttcccctttcaaaacccctaaaacctgttttcggtggggtttgggtgcatgccagttgtgggaagtagcaccccggccactataaggattaagctcgggcctctgttgcaaagcactaccgtacttccacatgtctagtgggtaaggcttagtttgtggctcagtctggttttaaacaaaagtacacggattggagatggatgaagtcgggggtcgatggacattctccagggcaaatgaaggctacacgagctgcggcccggtagtcgagatgtcgtggcagagggttggtgcgctgctgcttggggctcagtcctgcctgcctgtcccgggggttccggccgtaggcaggattgggtcggtactcttgtctatggctaggatgggttggaaactatgtcacgtcttccgtccgtataccgtggtggtatgtggcacgtggttacacgtgaggaacacctctgatcagagtataatctattcgaatagccgcgccctcggttatgggcaagccgagcaatgtacccaagtcagtgttctaattcttaaaatttgctcaacaactaaaatgtggaatggttggcctgggttggcttgggacgagctgggacccagggtcgggttgccagttcggtctgaatcatcgtaggccttgggttaaggcaggttcgtgtgggttcacggccttgattaataaaactgtgtagctctaggatcgtctttataaaatggctttgggcaactaagtgacttttaaatgctgtttactgcaaaacttaacccctatcttattatccccttgtactcccttgcattaattatgcatctccggtgtggcttgctgagtactgtggttgtactcattcttgctctatctttctccccccttcagtaagagaagctttggagaagatgtcttaggtggagtcctggcttataccccagttgagcgcctgtgaagatggagccgtaggcccgctagtccgctgctgtttatttttgattgtcaggccttaagtgcctttgtaataatgtaaatattatcgatataataaagaagtgtctcttatatcatgtttgtgtggtgtaccccggcttttcctgggacggggattaatacactagcgttcgggaaaaggcaattttcccggtcgcgacaccgcccttcctccccgtcagaatcgagcccgcgccgtcgcactctctctccgccgtcgccgccgagctccggtccgccgccgtcgtcgccccggaccatctcccgccccggcgccgcctccttcggcttcgccgcatcctcgccgacctcgtccacccctccgcttcgctcgccgaccgccggaacgccgtcgaccccgtcgacccgagccgcgccgccgccttcctccgctccggccgccgttttcgtcgtcgccgtcgactcggggtgagccgtggaccgccgtttcgtttccccctttccctcccctctctcggccgctgctccgccgtgccggtggtcgccggcggcgaccatcggggcgagggcgctgcctcccgccggccgcgccgccgtggctgccttcgggcgcaccgagcggctgccgcgtggggcccggccgtcagccgcccgcgccctcgggtgcggctgacgcgtggggcccgcggcgccggtcggagtaagccgcgtgcacccggtccaccgtggaccgtgaggctgccgcgtgggccccactcccgtggacccggtccgcgtgcccctcccctcggctgacgcaataaatccaattttaaattaaaatttaaatgaagaaattcgcaaatattcatttaaagagcatataaacttcaaatggctataacttggccatttgaactcggaattggaccgttcaagtctctaatttttccttaagaagtcaagaacccatttttgtgctttgttaatgctttttatatggagtttgttagagtaaaagccttttcttttccgttggtcgtgtagacgctgcagcttcggaggatccgctcttcgtggaagttgaagccggcatttgggaaagcgagcaaggcaagacacatcatccttgaacatattgaatcccaatttatgaaattattttgatttaaattattgcatcatcgctttatttaaattcccgcgttatcactgttttatttagccatgcctatttacctttgttatgaccttattattattgttattgttattattaccttgttcaccctaggataaacaaaacccccaactagtggacactctactcgtggtatcactagtatgattttaggtagatgcttcgctgattaattaggtaacattaggtggttttaaaactctagattgtggtaatattcatatcacttggacacattggatttgttggattgttgtggaattggattcataccgccccctctattcaaaatccccaaaatggttttaggctgggctcggggtgcatggttttgatagtagcacctcggccatataaggaccggtcttcgggcctctgttgcaaagcactaccgtacttccacatgtctagtgggtaaggcttagtttgtggctcagtctggttataaacaaaagtacacggatggagatggacgaagtcgggggttcgatggacatctccagggcaaatgaaggctacacgagctgcggcccggtagtcgagatgtcatgacacagggccggtgtcctgctgctagggggctcagtcctgcctgcctgtcccgggggttccggccgtaggtgggattgggtcggtactcttgtctatggctaggatgggttgggaactatgtcacgtcttccgcctgtataccgtggtggtatgtggcacgtgattacacgtgaggaagatgtgtcttatgggtaaagatgtacacctctgatcagagtataatctattcgaatagccgcgccctcggttatgggcaagccgagcaatgtacccaagttagtgttttaattcttaaaacctgcttaacaactaaaatgtggaatggttggcctgggttggcctgggacgagctgggacccagggtcgggttgccagttcggtctgaatcatcgtaggccttgggttaaggcaggttcgtgtgggttcacggccttgattaataatattaaatagttctaggatcgtgttttaaatttagctttgagcaactaagggtcttttaaatgctgtttattgcaaaacctaacccctatattataactccattgtactcctttgcaattatgctgcacttgtgggtgtgtcttgttgagtacggtggttgtactcagtcttgttcaatttttcccaaacccagaagaggagcccctggaggatgaaggctttggtgtctagctcgtgcctgccgtcaagcgcctgtggtcgtcgccttagtcttccgctgtttttcgttgtctttgagtgtgctgggccatcgctgcccatgtaataaataactatttacgcttccgcttgttacactctgaattgtatcaacttttggtgtaccttgcctcctaggacaaggaataatacacgcacgtaaggaacgcccgttgggttatttccggtcgtgacaataatgatctaattataattgttaagtgcttttcttgtttaaaatccttaaattataaattgttgtttaaaaggaattattagaaatgattttaaaagcctaaaagagaagatctaattttaatttgttaaatctcaatataaaattgggctagataaaattttgttaaatactttgcttaattctataattactagatttttctgggatttatttgagctaaggaagtgtttttaataaatggaattgcatttcatgaataatttaaattgaaaaaggttttttttttttggctttgggccgaaagccggcccaaaaccctccctctctctatctctctccctcctcggcccagtccggcccagtccgccgagccgccactcttctctctcagccgctgacaggtggggcccgtctgtcaggcctgtcttcctcctcgcgccgccgccgccgcccgaaaccctagcgcaagcgccgccgtctccttccaaatccggccgttcctttccgtttctggtgaaattgattgaggggaaacgatctccgggatctcctccaccttttcccctttggaaacatcggctaaatcggtttggaatgtgtttgattcgagttcgaatcggatcggtctctttccttcaaaccccgatctttccttctcgtcgccggcagccgtgggccttcaccgttgcctcttagcccctttataaggatccccggtgtctcctctacccgccgccaccctcgcctttgcctctcgtcgtccgtagcgccctagctccgtgtgccctagcgccgccgtcgccgccgtcgctccagccgtgcgccgccgccgttccagacgtcgccgtcgctcgggaagatcgccatcgtggtcgccgtcgcgtcgccgtcctcgtccaccgcttcaccgccgccgaagaccgtcggagcaccgtcgccgccgtcgacccgatcttctccgccaccttttcctcgacgccgccgccgtccgttggtcttccgccgacgttttggtcatcggtgagttcgccgcgccgtgatctacgtcttggtgccctccgtttgtgccgtagagccgccgttcgccggcgagcatacgcgcccgagccgcccgagtcgccgccggtgctgacgtcatcgctgacgttgtcgctgacgtcatcgggaccgtccgccgtgagccggtcgtggaccgatcgatctcggccgtccgttttggatagggttgatctcggccgttcgttcccatgaaccgttgccgtgcacccggtccaccgcgaaaccctagctgctgacgcaataatcctccttttccttttcaaaaataattcattattgcgtcataattcaattaaaatccatataagtgttttaatccgatttaatctttaaaaattcataactaattcatttgaactcagtttaatgtggttcaagttgcaaaaattatataaaataaagatctacatattaaaattgtccataaatagaattaaatttatttaattctttttaaatgggctttaattagatttaatcttgtaaaattcataataaattcttatgaagtcagaatgaggccgttcaagtctcataattcatctaaaattatgatctacatgtttgtttactttatatgtactgtttatttggtttttattagtctttttcttcgttttgcgtgttagcttgtcgtttccgtcgttgcgaaggttcgtgagtgcgccggaagtgttcaagaagattaattgaagaccgattattgcaaggcaagtcacacagatcctaaacacaatcctttgagcatgttgatcctatatttaaattctctatttatttcaactgtgcatttattttcgaatgtcactgggtggtgtgaacctattcctttgttatggcctgtttgcattgattactttattccttgataccttgggttattataacttgacaagttgagctttatatattggttcagctagatattagatatgattgcttagccatgcttagaaacattagcacactattgggataacttatgactcattatttaatgatggcttaatgatagttcacgatggtcaatcgtgattggttaattaattacttgccaactaaaacttgataatggtgggttgtgagcacatggttttgagagtcgtgctcatgacaattaaggaccggttcgcgagctactattgtgaaacattaatcgtgccaaccacaagccagcgtgggcaacggctttacctttcgtatagcatggttcattgcggggcaccagactgagaagtggcggagataagcccacgggggtcgctggggagtccatgccttatttataagggggtgattatgatccaggaatggtgcactgcggtggattgtgttatgcaaggggtaatgtcacagcccctttccgaggtaccgtggtggtactgaggcacatggtgacatgatgtggggctgtgtcttgtgggtacagtggtacacctctggccagagtaaaactattcgaatagccgtgcccacggttatgggcgggttgagcaatgtttttcgtgattagtcccacacttctcacaataattatggatgttatatctggtaataatttgcttagctcctggattggagattagatctgtacagccgggtatggttgtttcagaatggttgggcctgagcagcatgggcgtgttgttcagtgttgattaaaatttctgattaattactccactgttttacttctcttaaatgttttgctaaatgctgcttttgcaaatgagcctatattatgccaacctttggtatctttgcgcacttgcatatttgctgtgtggcttgctgagtatgtcatatgctcaccttgcaataatcaatcaacctcagttgaagaaaaaggatccagaaggagaagacgtttggcttataccccagttgagctgcctgtgggagtggagccggagcttcgctagatttttttttttccgctgcagttttcttcatggtgaggactaagtgcctctttagtaagtatttatcgttttagatattttgatgaatctgtatattaaattgttagtttgtgtacctcggctgattcctggacgaggattttatgcacaaataagttcggaaattactagtgaattttcgggcgtgacaacttacgccatggagtaatcttaacaaaagataatctgattaaaaggaattggagaggaaacaagtctagttctttctgccacaaagatgaaactattaatcatttgttctttgattgttattttgcccgcgcggtttggtctttaattcagtttgcttcgaatattagttttatctaatagtacaactcatatgtttgggcattggataagaagacaatcacgcaatttgagatctttggtcttattaggtgcaactaccactatttggtctatttggcttttcagaaataatgtggtttttgaaaggaaaaaacatatcttctcctttgcaggttatctttttgattacacattggctccgctcataggctatccttcagaaggtcaatttgcagggtactatcattgcggtttgtcaacaattagagttagtggccatatagtagttttctaccccagcacatgggtgacgttctaggctacggttagcgggctcctaaagttctttttgtttctgctattttggatgatgagtttatcttttgtttctttcttgttggctgtgtgtactctttggtgcagaagccgaatgtgctctcagaataattgtatcacttgatgaaatttactgagattaataaagcttccattatgtaaaaaactggttctgaataggctaaaaaaaacaccattccacaatgctttgctgaaagggaacaagttaataaggtcaaagaattctcctactaatgaccatgaaactgtgttaccagaaccataaacaattacagttgctctcatctaaatctaatactgcttaatcaaaactgtaacataacatatgatgaaatagagacaaacgaggttagctccacaatcatttgggtgttgctccttaatcaaaactgtaattctcttgaaaaaaacaagctatgtgtggcaaatggtttggtcatcactcccaataaagcaacgtacagaacatccacgatctaattactgcaaagttactgcaaagtttccataatgccaaggttaggcttgttgcgcacagtaagaaaagatggcgattgtccaacatgttctagcaatttcttgttttttcccatcggatttgattttttatcattgttcaaatgactttagaatgtgtatctgcacttcattgttcaaaagagagtagtggtggctcgctagatgatcaacagtaacaacgaacaggtaaaaaagagtttaaatatgaacaactgcagatgaaagagtaaaaaacaaaggagttgggacatcacgtcttaccttgggtgatcagatgtagaatacttgtaaatcttggtttgattcttctaatctcttgagttgatccttcaggtcgacgctgcaacgcattgctagtagttttttcagtgaagctgggatgccctcctcgggcaacgatctgatttcaggacatccgacgatgcctaatgtgcagatagaagaaaggagatgcaacccttcgggaagggactgcagacggtggcactcatagaattctagatttcggagggaggtgaggagctgaagtgcctgctcctgctcttttgtgaaatttttcatccacaaatcataagtgaacctcaacctgtagagggtggaagcgaggaggctgcaaatgggggcaacaaacaccgctgagatgctgtccacctcaagcttcttaagctgttggaatgaaccaacaggtattgccttcgtcgttgacaccgctgcgaacaaatgtgctgctacggagcagcgatgattattatcgtctatatctggcttattataaatcaccaattcactgaggctgcctgtcatgacaggatcgaacccaaccactgttaagttatcacagtctactagtcgcagacgagtgagagatgtgaggcttgagagcacagccatcgactgcacgcttgactcgctgtaaatagtgagttccttaaggggagccaggaagggcttgctagtgtgatgagttcctgcctctaccatgaaccacgaagcgaaaatcttgccgcaacgccaaaattcgagttcttggagtgaggagaaatcctggaaactccctccaacctccataggtagaaccaggttctcgtagccaaagatcttgacatagcgcaacagtctgggggacgggaaacgcagttctgcttcctcaacctcttgagcttcaccggacctgttcaactcgaactttgtaagagctgggaaacagtttaatagctttgccaaggatattccggcaagatgacacttatagagattgagctgctcaactgaatggaagataacaccttcgtctacttcactgcacaacaagcttttgcatcctatgatggtaaggcttgatagggagttcagcttctggagatcggtccatgaaatgtgtgacatcttttcaattttcatgttttctactttctgtaggttatggaaggccaaactaccaccataaccatttacactcagtatcttttcttccaaatgcaacacttcttgataatctccttccacaataatatgcgttagagtggaagtatgaggcatggggggcagtgataacttggggcaatttcggatattaagagaacataggttgggaaaacaagtgatatttatatcttgtgcatgagagatacagcgctcagaggatggtggtagtagcatagagagattgggacactcttcacactcaatgcttgcaagctttgaaaacaaatggcaatgagctcccccaacccactccacaagttctggcatggcaacaaatctaactttcttcaggtgtaagaaactcctctgtgtaacaccaccaaaatctggtccgaactgacgaatgccagcaatattgatcaaagtaagttcctctagatatatgaattgcccgaaaggtggaagagtgccccaagagatgccctctagatggagagatctcaatcctttcacacaaatatcatcacataaccaactaggaccagtggaaccaccatgatttcttattccaaatgctctaagattagaaggtggctgaagaccttcaataatctcagatccactattctgctgctctgcaccccaaactagttctagtgtctttagattccttttcaacatcaattcagcaccatttgcttcttccgttgttgctatattttcaagattatttatttgtagtgctcctccaagctctttcaaataccccaattctctaagttcaaacccagtgcgctctttcttaacatggaattcttgcagcctccgtaaatacttcatctttccaatcccacgaatattggaacaaagttcttttttggcaaggaaataatgtaaattggctagacgattaatgtcgtcaggcaaaatataattaccatggcctaggtccaaaaacttcatgtgataaaatctacatattgtggctggcaaagacatttctaagttatgaggtacttcaagctttaggtatcgaaggtgaatcagttttgaaaagttgaaagggaaagatttgatagagtttacaaacataaatagaacacgaaggcattttgttttttttgaatatatttttgaaaaatatagccatattgtcattgtatcgtccaaaaaacatcaaagtccgtaaattttctatgtctatttttctcttcaaattttccatttctctctcaaaactttggccatatttatgatgtacagtgatagatatatgtcgaatagattgtgggatgttatcagatctaaaactttgtggacttatatttagagaacttttacggtacattctactgtaagtatatacttgcagtatatagaaaggtaagtttggtatttgtgaaaaatatagaaagggctgtttagtaatttgaatttgagatttatttgcacccggagttaatctcggacgggttgtttagttggtattagttctggatctcgtagtacgttctgctagagcagcagcgcttcttcggaatacattgtgcgtggcggcgaaccgattgtcgacggacgagcacgcgtggaggcagagcgattccttccaattgaaacagtatttagtacatcgtagttcagatgccgtaagccattaacgacacacatctacctccatcttgcacgctagcctgaactctgaagaatgaccaacactcgttcaactatctcagagacacacagcaactgcagagctgatgttgctgctccagtgctctgtgctgcttccccttcctctctccccatacgtgatagcatgcgagtgtggcggcgtttgatcatggtggctgtcagcggcgagccggggcgcgacgtggtggctgtcggcggcggcagtagcgcatgggacgagtccctttctcactatccagatctgactaaagaatagaatgcgaaaatacaaaaatatcccccgcaaaaaatatagaaagacaaatatacccttcacaatctattatattattaaagaaatagaaaaatgagcctctacgttcgctctcatggcctagaaattctcacattaattggagaaaaagaaaaagcagagtccatataaaaatacaatttagaaatagctgaaattcggaattaaaaaataaagaatattagaagaggagactagagttcatatagaaatataattagaaaatagctgaaattcggaattaaaaataaggaatattagaagatgagtatagagtccatataaaaatataattaggaaataataaaaattcgtaattaaaaataaggaatattagaagtagagtatagtgtccatatagaaatacaattaagaaaaaaaaagaaattcggaattaaaaaataaggaatattagaagtagagtataaagtccatatagaaatacaattagaaaataatagaaattcggaattaaaaataaggaatattagaagtagagtagagtccatatataaatacaattaagaaaaaaaatagaaattcggaattaaaaaaataaggaatattagaagtagagtataaagtccatactaaaattcggaataaacataataaaattaaaagtagtgcttagagtccgtataaaaatataatttacaaataactaaaattcgaaattaagaaaaacatgggaagaagagtttaaagtcaatataggaatacaatttagaagtaactgaaatttaaaattaagtttagagtccacgtagaaatacaattagaaataatgaaaatttagaaattaaaacaataaatattaaaagacgagtctaaagtccatataggaagaatatatataatttacagataactaaaatttaatattaaaaataattaataactaacacgtatgtaaaatacaatatgaatattacacattagtgatttcgtaaagttattgcaaaatttaaaattatgttgtcattttaatatatttgaataatataatgagaaaacatatgtgctattatatgagagaaaatataatgatactagccgcacaatctgtacgggccaccatgctagtttatactgtaaaaagaagattggatgaatccacaccgttagattatttatactgcaagtatatattgcaagtatattgtaccgtaaaactcctctatatttatgcactcttgtgacgaaacattttgtgctagctcatgtagcaaatcatgcattacataatactgactattgcgatcagttaccttcatgaggaaaccattacctattagctcatccaaatacttcaatcctattgcttcagctctatcgttttgatatccagaatctataatgcctattgcttcccaaaaacaagtaatttctaaattattaaaccggtggtcctcagggtaaagggcgcaatacgaaaaacacttttttagatagtaaggaaggtagtcgtagctaatttttagtgctggcataatgtcaacgttactttgcagatttttccactcatccatttccagaacttctgtccaacattcatgggaaaggttgttcttcaataaacgatcaacagtttttgctgctagtggggaacctctcaatttctttgaaatttctttcgcaataccaatcaagtcgcgtttgtaacactcaggtttgtcttgaccaaatatacactcttcaaagaatgtgaagaattcactatcctcgagaccctgcagttgtattgtctcggttgttttcaacatttgtgctatagatggaaatcgagttgtgacaagaataacgctgcctttggcttccccttttgtgaatggagctactagatttttccactctgcctcactaccgcatttccacatatcatccaagacaagtaaaaacatttgtgatttcaatctttctgcaatagctttttggagctgatccaaattggaagagttatgcaccgcttcgcttcccgcgcttttatcgtgaggtatgcactttaggatctcctgagtgagcctaagcacatcgaaattagtagacacacaaacccagaccttgatagggaagtaggcatctgttcttttgtcattgtagaggtgttgggcgaaagttgtttttccaattcctccagggccaactatgggcaaaaccgatagtgttccactcggaatattgcagttagtcaagtcatgaagagtttgtctaaagattatttccctcccaaacaatttatcctgcgtaatcgttgagctagtgggaggccgctccagggatgtatcccattctcctgcagtttggttaatttggagcaatctagatatacacgtacacaagtcatgtatgccctttaccactgacttgattttattggacatgtctactcgattgaatggcaagttgccaacctggtcaatgacgtcaccatgggagttggctgtatcttgcgagtcgtcggcatcatgtcgtgctcgtgcagaagaacaaaaaaagcatgaaaaccagttaccggcagtatgacgaagagcatggcggccgtggagggcatgacctcggaggccaccatctgcctccggtatgacctcatgggtgccatcaatctgatcctggatgatgaagtagtggatctcgtccaatgcatcctcggcctcgtcggctttcttgcttagatcctgcagaaggccctgtaagccaatgttgtccctgatgtccttcctcccctgggccatgtgcaatagcccttgtgtgtacttgaggtcccttttgatctcctccacgttaaggcctagctcggtgctggcaacgtacgccgccaccaagtcactggacaattgcgtcaacaccttaccgaggagccagctcgccacgccgacggccgcctccatggaccagctcgtccgatggcccggaaagttgctggggttgattgggtttgtgtattgatgggtataatgctgcctgcaggagcccggacttcagacgaggtccggatgactccttttctactagcttgggctcattcacaatgcaacaaaagaaaattgatcagttttgtctgcctcatcaaccgcccggcgcccatagattgagatgccatcccatccctctcatgggtaaggtgtaggatggtgggtttagctggcaagaatcaggagaaaattaattaacaagtcccattagagccaaattggccattaatgacttaattatgaaatccttcgcttggatgcaaccaccgtggttgcgtctggggctggttatacgtgacagagttttttaaactgcccgcgcaattgcgcggctagcacccatataaaattatatattttttaatatgattttacttaagatttattaaaaatttatctcgatatcttgagattttgaaagaccaaatcttatcatcctcgtgtttgtaattttatagttcttaaaagtcacataagttgctaccacttacttctgtcatattattctttattagcttgcttgatctaccaccgtttctattcattcttcttagaacctttaaaaattagatcttaaaaacttatagtttttagagtttatcgtcctattagggttcttttgtataatttttagaagtcccattaaatgctgccattatactcctctacaaccgtccactgcatcttctctttattgccattgctattttaaaaatcaaacataattatcgttggtttttttatattttttagaagttccaaacctttaaaaattggaccttatagtttttagagtttattattaatttttagaagtcccgtcaaacgatgcaactatactcctctacggcccgtcaaatttcggattttttaattaatctactattgggttcttatatttactcttatcaatattgcttatatttaattccaaatttaagttaattttaaattgtatttgtcgacgtttgatgtcacgactacggtatttgcatagtatggggatcgttggtaccaggatatatgcgagacttaggtaaaagagatggggacgaggatttttatataggttcgggcccctgaattgtcaggtaataaccctactcctgttggccgaagccggtcgttgctcttattcaccaaaatcgcaccagtacaatatttggggtagcctatataactgttgtcgacttggcggtctgaagtgctgactcgtagtcgacaacagagtagccttcctcctcgaatctgcatccggcgagatcaaagacatcgttatgtctctcctgatagtatccgtagacaccgtaggggactagctatgcttatctctgaagtcgatatccggcgtcttgtcttggcgcatgttggcttgtatgttgatcttgtgtcttgatctattgttctgtgtcccctctccttctaggggaccttgtatttatacccataggtgtccctttgtctaagtagaactagggaaaccaatatagatacaatccgagtagtccttgtcgttttcatgtagaactctattcatccttccttatacggaactcctcctatatccgaaggttttttccgtataagacatggtatgtggtgggccctgccaagatttagtcaactactattaggtatgtggtatcaataaccctgacagtattcctacttgaactcttcttttcttttctttcttctaatttcggtgttttttatttttttattcggaaatttaattaatcttgtattggattcctgtatggacttttttaattctgaatttaagatatttttaaattgtattccttctcgaactcttgtttttttttctttttctaatttcaaaatttattttatttttattccgagttttaattaatcatgtattgggttgctatatggactcctctttcaataatgcatatttttaattccgaatgttagctatttttatatttgtatttctatttggattcttcttttctttttctatgattaatgtgggaatttttagcctccacagcgaacgtggtgcctcctttcaaggctgttttaataatataatagatctcagtccactgccattagctgtcggatcaacctcgcgcatgtaaggggggctaacgagccgattcggcttagctcggctcgtgaaaactagtctatctatctattatatactagaaatccattaaacttcctacaaataatcctaaaccgccatatgacactcctacaaacgctcctaacttaccacatggtactttaataaatactagaaatctattaacttaataaattaatagaaaaagaagcctccacgtttagtactctcattgtctagaaaatcctacattaatagtagaaaattgaggaaaatataaaaatcgaactatagtctatctaccctataattcaccaactcactcttacacctacattactcattcatcaaatctaacggtccaaatcatccaacgcttctagatccaacggtaccggcgcacgcggggtcacactgtgggagagagattgcgcgcacgcggggtgaccggccgaaaatcacgcatgcgagcaaatcaatcgctgcctcttcccacaccttccctctgcacattgccatggagcgcgcccgcgcccccgtcccgtccgtcgcccagatcggtgccgcccctaacctgacgctcgcgctgccgcactccgccaccgcctccccctctgattcatcgccatcctcatcttccccctcggcccaccacggcgccttatcctatgtcacgccctgaagtttccccttttccttgctttaaaaattgtttaataaattgcccgaagaaattgtttaatgaacctagagctaatccctaattaataaatgcaattaataatcagaaatggcgtggtggaatttttcttgagttccccatgccctaatgcattaacaagatttttagtggaattttcagagccttggaaataattttaaccaatttaaaatcaccaaggtgcaatataaatcccaggaaaaatcctttttcttttttttcttcctcctttttctcttgatgggccgttggcccatctctctcctgcgcccctccctcttgctgggccggcccaagccgcctcctctcctcccttggggcgccgacaggtggggcccaccagtcgggtcgtccctaacctctcgccgcccgtgcctcggcagcaaccgccgctgccgcccacgccgctcctccacgcccatcccgcgcctctcccgcgctcgtgcccacgtcgccgcccactcctccacctcccccgcacgcgcgcgcgccccacaccgactgggattcaaatttgaatcccctctctctctcccttcccatcttcccacgtcgccggcgcagtagggtggtttcccggcctcgtccgctccctctcacacctataaatcgctcccccgagccccctctctcgtttcccactctcgccaccctttcccgtgcctcctaccaccgccgcgccgcgttcgccgagctttgccgctgccgctcatctccggccacataccgtcgccgctagggccgccgccgcgccaagccgccgccgccgttagcttcgccgccgcaagagctttcccggccgccgcctcacgttgctggaatcccaccggagcgcctatctcctcgcacaccggtgagtcgcgctgtcctccccatcttcggccggggtttaaagcgccgtggtcgtcgtctcctctcctaacgcctctccatcttctcctagggtgtcgccgccgcccgtccgttcctccgcatcgccggtcgtcgccgccgccttcatccttcgcgccggtcgccgtgctcgccggtgaggaaccccctctcttcctcccacctctctctcccgcatgcgccgcctccccgcacgctcgccgccgcttcgcccgtgcgctgccgccgcttccgcgccggtcgccactgcctcctgcgccgccgctcctcccctcccgcaccggtcgctgtcgccccttcggtgaggacccccttttcctccccttcctctcctctctcgtgcgcgccgccgctccccgcatgcgtgccgtcgcaccgcgccgccgtccgcgtcgccggccgttgccgccggccggtcgccggtcgccaccgtgcgccatgcccgggctggcctcggtgccgcccgtccccaaccgcccgatcggccctcgcccgatcgtggccgtccatcccatggcccgcgtggccagccacgtggtgccacgtcgacgccacgtgatacaccaccaccccggccccgtggacctggtccacggtggaccaccccctttgagccgctgccagtgaggcccgcatgtcggcgcccccctgctgacatcatctgggaatatatattgcgcaataaaccaataaggcttttctttttatagtaaaaacacagtttatcttctgaaaatcataactaattcatccgagctctgtttaaatccattcaagtctcagtaaatttataaaaatccctagaatccattaaaaatggttttgtttcctgtttcagtagtcttatagcatgttttgcttgtgtgctttgtttgtcgcgtagactggccgtttcgtcgatccgcggtttctcgaagacgttgctgaggtctcatcagtgcgagagcaaggcaagtcatgcattacaattgatcatattgtacccaatttacaaatatcccgcatttctattaaatgttgcatccttttacaatgtcatgtgggatgggtcctattactcagccatttattgtttaccttatgccattgataacttgggtatcaaaatgactagatgttggtttaggaaaatgcttagccatgcttagttcaactagtacacaaatgggtatcacattattacatagactttgtctattagcatagctttggattggtgccaccgcaatggtgttagttaattaaaatacactgaatggcgggctgcgagtgcatggttttgctggtcgcacccatggcaattaaggaccggttcacgggaaaccctgggagacttaccgtgcttaccacaagcgggagtgggtaactgcttgatctgaagtatagctcgaccctttcctaggcaccggtggcgtgggtgggcgtgatggagttgggtcggccggggtgtccggttgtccagctgccggattcaccgcggcgcacgaggggactgcccactgcccgttaggggtgggggtgaaaccttagcgtggtgtggatggttaggggagggttatgtggagggtcttgtcacgatttccccctttgcagtatcatggtgatacttcggggcatggcgacatgtgtggaatcgtgtcttgtgggtacagttgtacacctctggccagagtaaaactattcgaaaagcccgcggttatgggcgatcaaccagattcaccgtgattagtctcacccctaggttagcttaatgaactagtgtagttcaggtggctggttgggcctgttgcaacgtggtgtagcgttgaacactgattggttaatattgattaattactacaattgtctttactgttttcaactactgcttttaaatgcctgctttattgcaaatgaacccctagcttcctttggttatatcctgcatcatactcctcttccggtatgacttgctgagtacagtgggtagtactcagtcttgctctcttttcccccacaccagagctgaagatcttcctagttggagctgtcttgttgaggttggtttcgtcgctgccgtcaaggattgcctgtggagtggagtcgccccgctgctgaagtcaagcttccaagtctagctcgttttattttttccgctgcatttgtaatcttttatatttttgtaagacgtggatctgtatgtcaacaattgtcgattgtgtaccctgtctggtcctggacaggggtttaatgcacattcagcttagaaattctggttcatgaatttctaggcgagacatcctagcttcctccacgcccggaatccccgcctcatcccctctcgcaggcgatcgatcctccaccctcccgtacgcggtaggcctcccgcctccgccaatcaacgccgtcgtcctctcccgtctcgccgatgggatattgacccggcaccaacgtctttctcgctttcgtctccccgcgccgacgagagtggcgtcccgaccgtattcccactttctcagttccccacgagaaaatggacatttcgccatgttcaaaacgcggtttcgctagaatgccatcccgaagacgtgattcgataaactgccaatatgaagcgtgcgtctaccgccactttgccattttcgctattttattcattttcgaaaagattttctctcctctactaggtgttgagacaaaatttccccttatcaactcagagaacacggtgagagaggagacagagaaggggcgccgacgccgctgctgccggccggcgccgcctctccgcatcatgcgcggcaacatcgtgtgcgtccgccgcggcggcctttgcatgctctgcccggcggcggagcgggtgaccgacgaggagatgatgaggggcaccaacgccgccgccgccgccggtgccgggaacgggatcgatcatcgacgaggccctctgcctgatgaagctccgcgagaacgtcgtcgactcgatgaaggccgacctctacacccccgtcgtcgccgccacccgcgatggtgtagcagaggcgaggggcgggcgccggcatgttttcggcgacgtcctcgtccatgaggtcgtcgtcatcagggtcgaagtcgaccgcctccacatcagcgtcccggcagagctcctggcgcaccgccagcgtccgcgccgacctccactcggtcttcgccttcctatggttacagatgtgatcctcaagcgcacggatataccattgtagcatttcactcgggagtattctaaggtactgtatttgtttaatcccaagggaagatatgataagagagtactatgctaatagttatatattacttatatacatcaaggtctatgcaggggtaagttaagcttaagggtagagtgacacacaactaaggatttatctaactcctacatctcctaattatagctaagtggcagtagtttagatatgttccattcctgtacttctagtatacaacatcttagtatattataactagtatacactatgtagtataacccctttaacaatgcagcatagctaagcctaagcatagctatgccctcccgatgcatcgcaaagttaccccgggttgccgagtttcttacgataacctgtcataaccctccaaccgaagtaggatacggaggtgtatccaaccccaggaaattgtatgtaggaatataaactgcgggggagacgcccatactgagctgtcaccatcagcggcctacaaatcacccagagaatatacccccaaataatgataagcggtaacctaagctccatgcttaaattactacttattactctatagccttgcaatcggtgtagagcacctgagtccccggaccatagctctcggcctagccagagcagacttatgacccggtaatcagacactataccagaatcaatgcaaatcccagaaggtttaactacacatattatactacttattgataaactaagactggtactcatactctatgattggaataaagtactgaacttgtataaagaagaatataatattgataaatggaagtcttacagagaagaaaggaaaagctatagaacctttaccaaactccccgaagcctccgcggacttggaaactattctaacactactccactagcactaatactactttgtagagagctttgatccttgcttgagtgtgtgagggaatgaatgagaggaggggtatttataggtggagaggtgccttgggagtgtggagatgctccaagcatcctaggagcatctttgctctcctcttgacatgtggcatgatgaagcatccaaagagcatctttctccctccttgtgacaagtgtccatgacggttgcttcaggtagaaacggtcataaccgccattggatgtcgataactactggcctgtggaatttctgggccatctgggctgcttttggttcggccgaaccctggtctggtccatttggcccagaacttggcaggtgtactcctcgtttattccttagcccaatggtgtgaattatgggcttgtttactcatattaattctgtattatcagcctatctatccacaagtctacttctcgacaacgtctgattgatcgttcatctattttctgtcgattctcctccatttatatgtgcttctcctgcatacatgttactagcatagtatatagtggaagtagatattttatttggaatttatgcattgcaagcatagctagtcttcatacattgggtaatattgacggtcgaaactggtcgataacgatcgtcaacagcggtggccgttggccagcagcatccaacggctagtgctaacgccggagggccgggcgaagttaaaattgatattattatactgtaagaatttgctacataatttaaaattagtagactaagccaccgcataaacattaataaccttgtaaaaaaaattacatggttttttagtcacatgatttcatatccgtggagcattcttaagccgccatgtgacacttcaagaaattatggatatttctacgaatatttatactacttaaaaaatacgcaggagggatggtgaaccaatctagacgtactgacaccgcaccccgcgcctccccctctcacgaccccaccagcgcctcctctcacgcccgcacccgtgccctaaaaacggcccgcccctgccgccacgcccacaccgccgcccctatcatgcctgccgctgccgctccgccgcccctctcacgcctgctgccgctgctccgccgcccctctcacgccgccgcccttcgtgccgctcgggaggagttgcggcggggtcgagcccctcatcgccgactacccttctccgctcgcagccgccgtcgtagcgtgcgtcgtcgtcaccagacaccagcgatcaccattccctctgtgtcgcctcgccgtccgtccatactacacctctgccgccgagcagccgccgtcgtagcgtgcgtcgtcgtcaccagcgatcactattccttcagtgccgcctcgccgtccgtctgtactccacctctgccgccgggactcagggccgctggccaccatctcattgtcaactcccccgaacagatctccccagccgcggtcgctggttcttttgctgcaaaactaaaatggtcgggagaacaccgatgcactttattttttatgacctatacttgcctgctcttttctgctcactggggatcaataggaaatgaatttcagaccgatactagcctactgttttaagtctctgcatatgctgaatctgaaagtaccagcctgctcttttctgctcgttggggatcaataggaaatggatttcagaccgatactagcctactgttaaaagtctctgcatatgctgaatctgaaagtaccacttatagtcattatagaaccaaacaggttggagcttgcatgctcagttgtgaacagatgtatttaggtgccagtcttgcccctggctgtgatgcacaatagcagggttaatcttgctaaaaagtaattttcttgaattgtatatctgttcagattaatgagccgagcaaatttctgttgcagatttggcctggtgaaccttatgcagttttctgttgcagtgttgctgcaatctgacactaggtgagttgtatctgctattccttttcctggctatttccaagttgcagtattgcaagatgataactttgttttaccatgttttctttgccacttaacaaacctaaactggtgagtctgttaatagcaaggtattctacacaatttggtccaatatggttctgtagcccttcatatatatgaagatttctaaggatgtaattatgacctaattaatttacttgtagatatagaaatttactgtcatcagatgcatacccattttaagatgtttgaacttatctcaatgtttgcctgccgctgttttttccaataaactgttgcatacaagtatattacaacatacaccagtgaaaatacacagtaaatgacatacaagtaatagtgatgacttatgagcataaataaagcgtgattcatgtgtcacaattcacatccaccagcacagaacatggcaacatgcatgcaacaaaacaacgaagcaacaacattacatcaactccatgatttcaaagcaaccacatactttactcagtaactttctcgttaaattttggaagagataaaatgttacaaaaagcacgaacgcactcagagagttgctcctgggcttttgattatttgcctaacagtttcacctcgagtttacttaattagctaaggtgtttatcatggccttgcatatcaaagataccaaaagatagcaatgtggcgatgctccattccgtgcgtcgccgatcaatcagagctgctgatgatcagctctgcttagttatatggcggatcggcactgaaataagatggcaagggcgccattgccaaattcactgaatgaggagacggcggtgggaacttcctgtggccatgcggtgggggtgcggcagctttgccgtgaggcggtggcgatggatacttgtgcaccggaggaggtggagaatgcggcgagtaacgggacggcggcggcggcggcaggtggtgagcagccgggggcggtggcgaggcttgagcagagggcagcaggtgatgaggcggcggcgaggcatgagccggggacggcggcgaggggtgagaaaggggaggtggcggactgggccgtgttggactttggacttcgaatgactggagagggccatccgaaggaatgttggagcaccaactgcgccgtgttgcagtgagctccaaattctagatggcgtcgcttataatatgggatgaagcctccatgtcaaagaggcaagcggttgaggccctcgatatgagcatgagagatataatgggttgtccgtgttctccgtttggagggaagacgattgtgtttggaggggacttcaggcaggtgctcccggtcattaggaagggcgctaggtctcagataacagatgccactctgcgcaggtcctatctttgggattgtatggttcaattgaagcttgttcgcaatatgagggtgcagagcgacgtgtggtttgcggactacctccttcgagttgggaatggcaccgaggaggtgaaacggatatttgcatgtcgtgcaaagagaatgaaacggacctcgaaaggctcatcgatactgtgttccccaacctaaacgataatcttacgaacccaaactacatcacatgtaggaccataatgtccacccggaatgagttcgtggatcgaattaacatgaaaatgattgggcggtttagaggagaggtggtgacatatcatagctttgatcgaccagaggatgacccttataactattacccgcctgaattcttgaactctctaactctaaatgggctacctccgcatgtgcttaagctgaagattaactgccccatcatgctattgaggaacattgacccagccaacggactttgcaatgggacaaggctggtggttcgtgagttcggaagaaatgctattgacgtagagattgtggtagggcagcatgctggtaagagagttttccttcctcggatacctcaatgtccttcggatgatgagatgttcccctttcgcttcaagaggaagcaatttctggttagattgagctttgcattgaccatcaataaggcgcagggacaaacaattccaaatgcaggcgtctatttaccagagtctgtcttctctcatggtcaactatacgtcacgttgtctagagcaacctctagaacaaacataaaaatactatcgatgccggtagaagacaagaaacaaaagaaaaagtctaagcgtactggcgtgaaggacaatgagaagaaaggaaagaaattgtctaaacagacagcagcatacacaaaaaatattgtgtatagagaggtcctcacagattagaaaaggtatattatgtgactattaaccatccataatatgcttgcttaaattccattctttctgtaatttttatattccaagtctaacatttcgtgtgtttttttcttggacagcagtaaacattactttcggtgggattttggcacggactatatgcaccattacgggtattgtgatactactttttttctggatgatattgatctggagcccttgcctcgcctgtaatccatctcctagggtggtcagcaaggaagagcaaaagagggtgcagtggccaagtgtagcagctttgctgctctcccctgctgtcgaccatccatctataccaggccactattagattcacatggacaaaaaaaaataggcaaattttgctacaggacatcgcgacttcgtggttttagctgtaggacactgcacaaagtcacttttggggaaagacactctcaaaatgtggttatttgccaggggacaccgcagccaataaaatattaatttctggttcaataggagagataaacagtgtaaaaggtcaaaaatgccctcgggcccacttgtcatattcttcccccaccccaaacctccctccttgcctcctctacctccaccggcgatgacgtcctcaccccacccacggccacgagcaacgagctcggcgctgggatgggcggccaacttggcgcagggggaggcggcacgcaccaacagcgcccacggcggcggcctcgccggagctccgccacgaatcaaacttgcagggttgtgatgaagaagcggaagaggcgcggcggtgacacctccgccgccttcgaccggagcgtcttccccatcctgctcgccgtcatcaccgccggacggcgctaacccacgaccccgagcagcctctgccatctcccgtcgccatcccgctgccccaagttgcgtccgcccctggtgctgtccaacgccctcctcggcgccgtccgccgccggcgcatcacgtggcgccctcgtcggcgccgcccgtccccgcgcgccgccgcccacgcccgtcgccatcctgccccccaagctgcgtccgcccccggcactgtccaacgccctcctcagcgccgcccgccgccgccgcatcacgcgactccctcgtcggcgccgcctgtccccgcgcgccgccgcccacgcccatccccacgcgccgatgtcttccgcgtgtacccgcacgctgccgcccatcgcccacgcgccgccgcccacgcccatccccacgcgccgctgcaacgccgcgcccatcgccatgcaccgccgcccacgcccgtccccacacaccgttgcaatgcctcagtagcggcctcgctgttaaaggaggaagagagaggaagagaaagagatgagggcaatttggtcatgccatgtaaaaaagtaggccccttctcgcttagtcagcacaaaaatattaatttaatgaatgaagtgtcccctagcaaataaccacattttgagagtgtctttccccaaaagtgacttcgtgcggtgccctacagctaaaaccacaaagtcgtgatatcttgtagcaaaatttgccaaaaaaataattaatctaaacatataagttggccatagctgtatacagtatacgtaacatgtaacttgtttttgtttgtctgcaaatttaaatggcaaagtttcataattagttggagttgaaaattatattttgtatagctgatttgattaccttaggaacattacaaatggttgtccacaagcacgagcagggaaagtctcctactacagcatatctgacttaatcaattccctggaagaaacaatgcttttgatctgttcttcacacgtcttcctgaccaatttgttaaacaattcaataaaaataccttctttacctatatgcacactctttttctgctaaatattaattgctattgtatactagtagtgcactatacttactttatactccatcatgcagataacccatgagccagtactggtgttttactactctgatctaccagctatttggttccttgatgtgaatgtaaactggaaggagcaatgcaagaagcttccttttcattgccaatggcactggttgaacatgctcttgtcttcctgtagaagtgttgctggcatttgtgatttctgtacttgattttactgataaaaagtgtggatcatgcaatttattgataggggcaatgtttgccggttgaaaaaaatgagatgtgatttgttaattgtgatcgttcgggattacaatttaaacagataatatgctttcagagaggagatcgggtaggttacatcaaaaggaattattctcttgtcatgaaaattggaattaaaatgtacgtagaatcgtgtgttcagctggtagaaaatgctaccagataactgatgcaacagaaacagtagagtttcaagagctattagtctaagaataattgatattgtgcaagaaacgtgattgtccctgatgaatttcaaaaaagaatttttaaagcacctccagagcttcacactgccaagaagctctctctgtatcagatgtggcacatctagcttgattagaaactagaaaggttaactccaagcagcagatctgcaacacccgccaaggaatattttgatggaatattttgcttgcttatttgcactcttggaattaattgataaaggaaacaagctatgggcctaatcggcccatataacatctgactattacggtccaacgccagaaataggaataagttcatctgaggtcccttaactttacaccgaatccgattttcgtccctcgatcggaaaaccagacacaacggatcccttaactattaaaaccagtgcagattaggtccctcggcggttttgagagcggttttggctgacgtggcgcctacgtggctaatttgactcggtcttcgtccgacgtggcattgacgtgacgcttacgtggcaattcaacctgtgggacccacatgtcagtctcacatagaaaataataaaaaaatcatgggacccacgtgggtcccacatgtcaatccaactcacccctcttcttcctcctctctccccatctccctctcttcatctccctatctctgctctctccagccgccacggaagacaacggcgcgcggcggcaggcggccggcagcaggagaggagggagcaacgcgcaaagaccggcgaggcgggcagggagggaggacgcagggaggccggcgatggccgagcgccgtgggcgggggcttgatggcgacggacggagggagaggtgcgcagccggcggtggccagcgggagagggagcggcgaccgccctccgccgcaacccgcctccaccaccgagctcgtcagcgaccgcccaccggagcgaggaggacgacagccggcgacgggtgaagaggacgaaggcagcggtctagagcagaggtcagaggagggcccccagccgccaagatgggcgctcgatccgtcgcgtttcaccaccaccgagctcgtcagcggcagcccaccgaagcgaggagctttcgcttcccttccccccattgacgccaccgttgcagcagctgaggcgccactccccatgccgccgcttctgtggtgcacgccggatgcggacaggaacgccatggccgtggccgcggacgacgtcgacgtcgacctcggcgactcccaggacccccgtgccgccgccgctaccgaggggagcagcgcacggcggacgtcctcctcctctggctgccaccgccatgcctccccgcatgtctgcatctcctcctcctccggcggccatcgctgcacgtcgccccttctccccatcggccaccgcccttctcccggccgccactgccggatctcgattgccggcgctgctccggggggagctgccgctgccccgggtcgatctgttccgcccaccgccgtcgttgatccccttttatcgccccggcttcctcctccagctcgctgctctcgccggtgggcgccggtctcgctgccccctccagctcgccgctctcgccggaagaggagcagagaggggagagagatgaagagagggagatggggagagaggaggaagaagaggaagggtgagtttgactgacatgtggggcccacgatttttttattattttctatgtgagactgacatgtgggtcccacgggttttattatttttcagggtcgaattgccacgtaagcgccgcgtcaatgccatgtcgaacgaagactgagtcaaattagccacgtatgcgccacattagccaaaaccgcccttaaaaccgccgagggacctgatctgcatcggttgtgatagttgagggacccgttgtgtctggttttccgatcgagggacgaaaatcggatttggtgtaaagtcaagggacctcagatgaacttattccccagaaatataatatctgactgttacggtccaacgccagaaatagccaaggaaacaagctatgggcctaatcggcccatataacatctgactgttacggtccaatgccagaaacataacatctgactgttacggtccaacgccagaaacaaccaggcaacgaattttttgttcttttttcgcttttgacggcatggcaagatcacgctaatcgtgattagttacaatcatcatataagttgcgccagcagcaaccgaagctcttgttgccagccctagccaccatttccacattctttgccaccatttccacgttctttccgaactatccacccgttcttacggacgtctcttccgaacggctgattagcacacaatatggagaatgcgtagccgtgcaaccatggaggtcactcttccttcattctattgtttcttgtattgatggattgtgtaaagctatcatgttgtgtatattgtcttccccatgcagaatttgatgaaccctgagttcctctcgacactcaaggctgttgttggcccgatctttcggtgagttgtgataactacgatttgggagaaacgttgacgatccgactacaaccgtacgagacgttgtgttgcgccttagcgatcgatacacctctccgtgggttgctgatcttgccggtgcagatcaaccatattcctgcaagcaaatcgaagaaacaagcaagaacaagataaaagcaatctgatattgcaaataggaatttaatacaaatgataagttggggttccgaagaacaagcagacggacggtctagccgacacgcgcgctgcaagcaagtagcaatggctaaactttaatctaacaaaacccgagaaaccctgaaggggtaactagctatatataggggtgggaggacgacctaggggtgcctagggtcgtgctccaccagcttggggcgcaccccacatgggccccacctgggccgggttcccaaatgaagttacaagcccataggcccattataggtgatgcaacaccttgttcctgtgattctggccacacgagatagaattcagagaagaggctggatccgttagaaagagggctccgagagctttccatcaagtactcccgggccgaaaacggaggtcgtatgcagattcggtggccgtttgaaatcagcagtgtagtaggtggccgaatcggattccagcacttggagtacttgatctcgatatcttcttgttcatccatgatgtgagcaatggttgcatccgtggtagccatggtcacatcatcctccccttcttcacggaaaaccgtcctcggtttttccatatggtgctctttgcgtagtccatttacaacaacctgtttcttccaatcaaaactaggcaaactcgagacaatttggttagcaataacatttttctctagcttgcatattttatccacatgtacaggaggttctaaatccgagcagatgtaaactctatgcacaaaatatattccaagatcattatattcaccaaagatgtgaaatataacattggttggatatggcaaatcagacttagcaaataatttctccttgaaattatcgagctcacaaaaatcatcaaactgaacataacccaaagtatttaaagaagatctcaattcacgctcctctattttattagcaatgtgaacaacatgcttaaaatcagtgcagtatgaattaacagtaggaatagcatgttcattcacaagttgtggcatggatataagtgaagcattatcgcataactcttctttatcacaaggaacagcaaacaaatcaatttgtgacaaaggaatctcagcagttggttccactaatggttgctctgctatagcatgaaaagtggacaaattcaattcattaacaacacactcacctttattaatttcagcaccattaagtttacctttgatgccctcttcagataatggaggtgcctcgactttgagtgtgatcaatgggactggcggctctttcatgtctctctcctccttttcatgattatgcacttcctgcaaatggttagtaatagaagacaaaaacatagcatgttgcttcttcatgtcctcctctattttactttcagcattgcaagcaagttgtaacaaatgagaaagagatgtatatctttgacaatcaagcatgtcctgaatttctttgttaagcccacataaaaacctcaattctttagcttcttcgcattcatctaaaccacaacgtaataaacaagcttgcatatcatgatagtatgaagtaacagctctggtatcttgttttaaacattgcagtttgttgaacaaaatgtcagcataatacatgggaacataaatatctctgaaatatcgtttcaggtctttccaagattgtggtattttgttatgcctacaaagatgtttccaatcattagaagcatgtttaattaaaacactagaggcacacataaccttttgtttctccgacaagacatgcttttgaaattcactatcaaccgctagctcccaattaatgtaagcacgaggatcatagtttccctcgaaataaggcagtgcagatttgatcttacctagaacatcatcacttaccttataatggtcatgttgatccctcctcgtgtctcgacgaagatgtcgatgttgagcacagctatccccaattatcttgcatatccctgccattgttagtagaaaacaagaaacatacacaaaaatatgcgcgttcctattaactactaggtagtggcagctcaaaaatcgcacacactcaagcttttaaccaagctcttacaagatcttaccaatgcaagtggaatggtgacatacaccgactcaaccaagcaccccaatgaaggttggatgtatcgatgccttggcaaacacttgcggtacggctgtaatcaaatatgtggagctctgggtaggcttaaatatgtagcaaaggaatagcaaatgctcaaatcagataatgcaaagttgaataattgttcaaagtcaagtaccgtgctggtcctaggctagaacgtactagagacgcgagcctagacacaaacaataccacaagatagcactaggaacaactcatgcacaactctgatatatgaagtttagctcaaacataatagtattttctcttttctttctttcttctttcttctttctttttttttccttttcttttctgtttttttttggtgcggctttttttttctctttttttttgcacctttctgccttttttttcacttttttcttgattttttttaacaaaaactgactcaaggaccttaatgtaagattacagggactcaaacataaatataaaatttacagggactcaaatataaaagtctaaacccaaaattaaaattatacaaaaaatggaatgctgaatttatgccggttccgtttttccaaacagatctcgaaaccgacaccaaacaaaaattcgccaaggtgtttgacacaactcggaaccgtggaattgagggagggggtcggactcggccaaaggggcgagtgggactcggcaaggaggtggagtggatggcagccgaatttggtgtatgggataaaaaggaaactgatttttaaccaatccaatctactatatctttccaaaacaaacttgactacttccaaaatcagatatggtaattcaccttcctcctctcgtgcacgacacaggcacggccaaaacaaacacacacaaggatcggcaaactctagatgcaactcaagaactccaaaactaaccgacagaaacttctgaaaactacaaaaatagaaccgtggcagcgagccgattccgttttcgtaggtcctgacaacaacagagacatggtggcagcgacgactgtggtacaaaacgtgaccagaactcgaaactctaaacgaactagacgctaagaccagcaacacgacgtgacgatgcaacacaaaattcaacaaagcaaaaactgaaaagaacaatgcaatggcacaatatggctaggtaaatgatacgaatttttttgtatggctattttctggttataggaagataaaaactcaccgagcaacgaaagctctgataccacctgatgaaccctgagttcctctcgacactcaaggctgttgttggcccgatctttcggtgagttgtgataactacgatttgggagaaacgttgacgatccgactacaaccgtacgagacgttgtgttgcgccttagcgatcgatacacctctccgtgggttgctgatcttgccggtgcagatcaaccctattcctgcaagcaaatcgaagaaacaagcaagaacaagataaaagcaatctgatattgcaaataggaatttaatacaaatgataagttggggttccgaagaacaagcagacggacggtctagccgacacgcgcgctgcaagcaagtagcaatggctaaactttaatctaacaaaacccgag

SEQ ID NO: 25099 - DNA, 1465 bp, Oryza sativa
agaattcagagaagaggctggatccgttagaaagagggctccgagagctttccatcaagtactcccgggccgaaaacggaggtcgtatgcagattcggtggccgtttgaaatcagcagtgtagtaggtggccgaatcggattccagcacttggagtacttgatctcgatatcttcttgttcatccatgatgtgagcaatggttgcatccgtggtagccatggtcacatcagaattgttcggttccacgaggtacaaatggatcacatacactgaaaatggtggattgtccgtgcgagggtcatcaagaaagcgtacctggagattagctgtcttctatttatgttgctttttataatttaataaacgccatgagattgttttatgcgccaaaaaggttatactacgcttctgtaattataacatatatcttgcttttaaattaatcttagaacaactatgacttgtagtttcttttggattgccagattttgttttcccgtgatcaacaaaattcccgtagcaacgcacgagcactctactagtaataagcagaaagtaagaccaagagcgggacattctacaatactatactagtttcagtccaaaaagaaaaaaatagcaaaacgacataagcatatttactaaccagcacggcctggctgtgtatctattttggatgtagaggccggtttaatctattttctaaaaaaaaccagcacggctgattggcaaaatgtcgctattggatctgtacagatcatacaagtgcaggtggatttcgatatcacgcagctgcaacctgccaaaattcaccatgcagtttgagatggaaagaagtgtaatgacagagaacgtaagttaccaaaattgtaatgatcaatataacattgattggataatagacaaaggacatccattatgtctgaaagccaaagtggctgctctgccatccagagctctttatcttcatgtgttgtcgtgtaattcgcatttacattgtcagctatacgatgatggaagaactctgaaaggttccagatgaggcaatggtgctggatagctacatcattaacaacaaacaataaaaaacgagttttagttagttcgaaaggttagagacgaaatggggaaaaaagatgtaggagttgggagagcaccttgttttaccttgggtggtaagtttgctagtggagccgtatatgtaaatctgggtttgatgcttctaattccttgacttgaaccattaaatcgatgctgcagtctcgtattcttagacgttccaatgagaccgggaagccgtccttgggcagcgacatgatttccggacatccagcgatatttagtttatagagagaataaaggcaatgcaacccttcggggagggactgcagacgaaggcacttccggaatttcaggcattggagggaggtgaggagctgaagtgcctcttcctgttcttctgtg

SEQ ID NO: 25100 - DNA, 6131 bp, Oryza sativa
accacatgggaatactgggatgctgacaatccttctcttacagttcttcatccgattatgctcactttcgagttgtatggctttgtccacaagtttctcaaaatcttcatattcctctaggagtagttgcactgtgatctcatcttttaacccctggagatacttctcttgtttgtcttcatcattttccacatcttctggtgcatagtgagccaaacgatggaactcgtgcaggtactctgtgacggtcaaatcttcttgcttcaggtagcggaactctcgttttctcagtgtgatcattcctgcgggaacatgggatctcttgaatacagatgaaaactcgtcccaggtgatggtgtgtccttctggccgtgatgcttcgtagctatcccaccattctgaagccagtccaaccaactgatgagttgcgaagacaacccgctcctggtctgtgcactgaatcaaccccagcttcttctcgactgtgcgcaaccaatcactggcttccataggttcgacggcaatggcaaaggttggagtctcagttttgagaaattctgataacttgcactgttgctggactgtaggtacttgaacgttggttgcccctgctgggttgttccaattctgtaatagttgaaaggctgttgccaacatgttggttcggttaaccacaatttggattagctctggtgaggtttcgttgatgcttttctcattcccattggcttgggttcttcatcttgtacttgatttcttggctgctgtgctggaacatccaaaggtaaaatgccgatactggcctctgtcttgtcaactggtggctggggctgaaattgagcattgacaccttgtggtaatgcactcgctggagttggagctgttgcaacgcgggctataggactgcttcgggatgcatggatgacaattcgctgaggagcaagcttctgattgcagggagttgcgtggactgacgtgctggcagctatgtctctcggttttgggtacttgtcggcgaaatgacccattccttgacaattgaagcaacatatatcttcccggactcggcattttcttttctcattttgattcctctgtcctggcactggagttaggctgaaactgtaatcttggcgaggatttgtgttgccttgatgcttctctccgttggaactggcgggttggttggccatcttcttcgtcagcagcaaactgaattgacaatcttttggtacatgatcagttccttcacaaaagaaacaagtgatcctgctcgttggacacctgtcgggtggatggtcttcctcacaatgaacgcatgtagtggcacacgagctggcaacatgaccgatttctccacaacgagagcatgccttacgttccattttattctggttgaaaccttggggagacttctcatcttcatcatctgaggagacttgatctgaatcttcactatcagacactctacctccattagctaaaagatgctctgtcaactgtggtgcacctcggaaggtatttcttctctgacgttttgtcattcctggtggaggccattctgtgctggtaatgatcatcttacggacttcatcttcagttcgcattggtgtttttcttttctgctgaggaccctcctgtcacgtcctgataaattcatcccgaattaaaaatcattcgctaaaaggaataatagaattaattaaaattcgaaaagaaattggcaaacactaaaatacgtgcaagaaaaattcaaatgtggcccggagaatttttgttaaattctccttggtctaaaaggagccctcaaattttacttgaatttttatagcaccggaaataattattaagcaacaaaaacaattaacaaagtttattaaaaagaaaaacctaaaaataaccctccttcctcctttgggccaagtctggcccaaagtcctccctctctcccctcggcccgcggccgaagtctcccattcctccctctctttctctccctctccttctctccctcctcttgggcccccttcccctcggcccagcaccctcctccctctctctcccgggctgtctctccccccccctcccggcctgcccggcccaagccgcacccccccctccaggccgagccgccctcccgcccgtgccgcgcgcgtgcgcgcgctgacgacgccgcctgaccgcgtggggcccacgcgccaggtcgtcatcgtcttcctcccccagccggccttctctctctctctctccccggaaaccaagcgccgttcctcccttaaatccacgcgaatcaatgcccttctttccaaattgattaggggaaattaaaccccattgaatcctcttcaattccccccaatttccctcttgaatggcgcccccaatcgtcgggaacggccgcgcttttcccggccaccaaccatggccgccggccgccattcccgtcgccgttccgccctcccccgtggccggctccctcttttctcatataaaatgggatcctcatcccccgttctctcgttttagccccctcccgagcctccccgtggtccctagccatctccccgccgccctcctctctctcccacgccgccggccgcctccagccgcctgtgccgcctcgcccgcgcaccggccggccgtgccgtcgcctcctccagcgtcgcagccgcctcctcttccccggcgccacctccgatttgtggggaaatcgccggaacggtgcccccgccggcaaccagtggcattggtgccactgtactccctccagccggctcctgtacgtcgccggtgcgccgatcgacgccgccgtctcctccttcgacaccgcggcatcgcctccttccccggcatcacctcctcctcgcccgaagctcgccggagtggcctcgtcgtcggcgtccagtacctcccggtctccggtcggctcctgtacgtcgccggtacgccgatcgacgtcgccatctcctccgtcgacgtcgcagcgttgtcctcacctccagctgctcctcggtttcgccggaacaccgccgtgtcgccaccaacccctccacccgcctcgccggagtcctccggccgcccgttcctcctcgcttgtttaccggtcagccgcggcaccaccacctccggcatcgcagcggcaaggtcgccctcggcctcgcctccccttcgaccgaacccctccgcggtccatcgtcgttgtctccgttcgttctcgtcgtcgacgtcccgtcggtcgcccggctcgtcgtctcgcggtgccgcctccgtcatcgtcatcgcagcggcgtgttccacgtcgtcccgtctccgtgcagccactgctggctgtccctcatcgccccctcgccggccccggtcgtcgtcgtcctcgtcctctcgtcgttcccgatcgtcgtggcgttcgtccctccgtcgagccgttctcgtccgtcgtccgcgttcgtcaagcgagccgctgcagccccgtcctcgtcttcgtcctcggctccgcgtcgtcaagccttgtgccggccgcgtctcgccttcgtccaaggatcgccgccgaagccgtcccctcgccgttcgtctccgttgtgcccgtctgtctccgccgcgcccgttcgtcgttgtcgttcccgcgcctcgtcgcgtggtggtaaggatccgtcctctcgcttccccgtcctcgtcctttcggtgtcgcccgtgctcgttgtgcggttgtcggccccggtacccgtgtaccggtgtcggtagtcgttcacgcgtgcgggtggtgaccgtgtagtgtccgtgttagtgtgcccgctcggtagccgcgtgatttccacgtgtgcaggccgtgtggtgtttagtggagtccgtttgtcggccactcgcctcggttgacacacggggtctgcttccgtcgacccgaggaccgtctctgtgtacccggtctaccgcggtcctttaggttgacatgtggggtccgcatgtcaacggcgcagccttcctgtcttttccaggctagcgcttacacctgttttatagttgcaaagcttaattataataatccgcaaatctccatataacagcattaaacttcggatgatcatatcttggtcatgcgagctccgaatcgacccgttcaagtctcttaatgtttgatataacctaaagaaccctgtgctttctttttatgtattgttattgcttctttataggcttgtagctttgcttgtgtgcttcgcgtagctttcgtcgttccggaggttcccgaagcgtggttcgtggttgtcgccgaaggttcggaaggccgttctctctgagcaaggcaagtcacatcatccttgagcatattgaatcccagtttataaaattattttgatttaaattaatgcatgatcgctttatttaaattcccgcgttatcactgttttatttagccatgcctatttacctttgttaagacattattattgctactgttattattaccttgttcaccctaggataaacaaaaccccaactagtgggtactctattcatggttccactagtatgaatttaggtagatgcttcgctgattaataggacaacattaggtggttttataattttagactttgggaatattcatatcatttggacactatggaattgttggtttatggtggaattggacatacacctctcttcctctttcaaaacccctaaaacatgttttcggtggggtttgggtgcatgccagttgtgggaagtagcaccccggccactataaggattaagctcgggcctctgttgcaaagcactaccgtacttccacatgtctagtgggtaaggcttagtttgtggctcagtctggttataaacaaaagtacacggattggagatggatgaagtcgggggtcgatggacattctccagggcaaatgaaggctacacgagctgcggcccggtagtcgagatgtcatggcagagggttggtgccctgctgctaggggctcagtcctgcctgcctgtcccggaggttccggctgtaggcgggattgggtcggtactcttgtctatggctaggatgggttggaaactatgtcacgtcttccgtctgtataccgtggtggtatgtggcacgtggttgcacgtgaggaagatgtgtcttgtgggtaaagatgtacacctctgatcagagtataatctattcgaatagccgcgccctcggttatgggcaagccgagcaatgtacccaagtcagtgttttaattcttaaaatttgctcaacaactaaaatgtggaatggttggcctgggttggcttgggacgagctgggacccagggtcgggttgccagttcggtctgaatcatcataggccttgggttaaggcaggttcgtgagggttcacggccttgtttaataatactgtgtagctctaggatcgtctttataaaatggctttgggcaactaagtgacttttaaatgctgtttactgcaaaacttaacccctatattattatccccttgtactcccttgcattaatcatgcatctgccggtgtggcttgctgagtactgtggttgtactcattcttgctcaatctttcccctcttcagtaagagaagctttggagaagatgtcttaggtggagtcctggcttataccccagttgagcgcctgtgaagatggagccgtaggcccgctagtccgctgctgtttatttttgattgtcaggcctgaagcgcctttgtaataatgtaaatattatcgatataataaagatgtgtcttttatatcatgtttgtgtggtgtaccccggcttttcctgggacggggattattacactatcgttcgggaaaaggcaattttcttggtcgcgacaactcccttgcatagtgcccttgctcatcacacataaaacaaatgatacttgcttcttttgagtcaacatgtggcacgtcaccatgggtccttcgggatgctggcggcatgctgactcgtggtgtgagtgcttggactgcctccaactgcacttgaggttgtatctgactcaggttcagaattggcgtctgatgctgctgtagtatctctataagcaatcggttctggttaatcaggtgttggaccagtgtcacacaactggtgtctggtgcttcattcactcgggagct

SEQ ID NO: 25101 - DNA, 15301 bp, Oryza sativa
gaaaaagagagggaatcacggggaatatttccccccactttattgtgcgcgtggacgccggaaggcggcgggattcccggcggcggcggcgctagggcacgggcgagcggcggggagcggcgggaggacagggatgacaggtgggccccacccgtcagcgagggtggcgggcgggcccacccgtcagcggcgcgcgcgcggggaggaggccggatgggccgcggggaagaggagagagagataaagggatgggccgagccggcccaagaggggaaaagggggggaaagactttttagggtttttctttttataaaatcattttaactttgtttatttcttaataattattatttgtgctctgagaattccactaaaatttgagggctccttttagaccaaggagaatttaacaaaaattctccgggtcacatttgaatttttcttgtacgtattttaatgtttgccaatttcttttcaaattttaattaattctattattccttttagagaatgatttttatttcgggatgaatttatcaggacgtgacaaatccaccccccttacaagaatctcgtccccgagattcgaggaggctagcatgaagataggttgggcagtcttctcttcttgtctgacttcttccgctccgtcttctataaccaacttgcctaacaaaacttctccactctggaacgcttggctcgatctcctgttgcagatggaatcttctcttcacccgacttgtccctggttgaacttctaactgacccagactaggctgcggtggttgaggatggggcttcggttctagaacttcttatcattcatatctttggcgtcaacctcatacaagttacccgcttcatgtcatgcgtcgagatcagctcgtcattactaagataccatgcttgtcatcatgagaataccatgcttgtcatttacttctaactcgccaccaactgcctcatattagctttcctggtctccgggtgatagctacttctgctatttgatgcaagggtcgataactttgcctttgaattatgcttcccaagagaaccaacttatcccacttgatatgctttgacgtcttcccaaatggctttactgctggatttgttattgtctaatcattatcctgtcaaatctgaggcttcgttgttagatgtgattttaatctgacctctgtagattatcttcgaacatatcacttgattcataactgggaatagtctcacgaacaagcaactcggattcactttctttacattcagtttacttcccattatcatcttcaggttgtcctcagttagtattcaacgtattcctttacacctttaaccttgatgtgttctttcccattggatcatctcccaagaaatggcattgcctggtaaccggtgcttgcacttttcactccgtgtagcatctgataccgagttgaagatttcactctttgccttcctagaaacacttttacctaggtcatcttgcttacttaatgacaaggtgactgttgcgtggcaattacaatcaagggtcttccttgagcgatgcagagcatgtttctgtttatcaatcacctttcggcctacttctttcatgctagagaacatctttgccaatctcttttatcaatcatctttcggcttacctctaacaggtggtattctttaatgtggattgcggacgcttctggggacgatgagatcctttggcttgctgcctttcagtgaaaccttgatgtggttcgtcaaaaagctgcactgactaccttcagggaaatacattgcttgctatctgtatctatgccactagggtttaattgccgatgatcatctttagtgcttcctcgagatggggagcatccaaattgttcttctgccatatcacctttgacccttttctgatacctgatagattaattaccaaccatcgactactatgttctcaaatattgatgtctcctggatcttcttaactgcttgcaggtatatccgaacttatcaatgtagaggcatggcgggtacccttatgggtttcatccaacaatccttatcttgatctgtaaaaggcgtatccaaactcctatccccaactactgtctcattggctttttaacccaacacagtttaattggttttcttttccatcaacaggttggttattaactcgaggttagaacatagttcgtctgaaatgagaccctaggtctcctttatcagtaagcaattatacacataatcacatatccacatcttccaaaagaaccctcatagaacttgtctgtattacacatttctccctcattacatgaatactaagcactgcctaaaaggaaaggtgcttagcatcggcacattgtttctgctatgggttctgattaacacgaggcctcacgggtacggcgtttgctccagtgaccacaatacgattgggatgtctgcttcgtgtaaattggcggtaatgtggagatcgactttgccttggttgcaggcagtccctcgagtaatgccctggtcctttgcaattgtagcaaatcaacgtcttctttgctgagctatccgtctggggacgatcattctgacttggagttggaattggtggttggaaatccttgctaacattggcatcagtggtaccatagttgctatcaccattggagtctttctcagagtcacaattgctagggttgtcattttgggtgccatcattgatactatcgtcgacaccttggtgaatgatgttgacattgcacgcttgatttgagtggtcactaatggggcaagaagcatggttgttggtggtatcatcatcattagtattgctaatgttgttgtctgcattgtgtccatcttcttggggcggaaactcttgatgcgcaacagaagatccggtgatctgaagtggctccgtgcgctgtctttggttaccacatgggaatactgggatgctgacaatccttctcttacagttcttcatccgattatgctcactttcgagttgtatggctttgtccacaagtttctcaaaatcttcatattcctctaggagtagttgcactgtgatctcatcttttaacccctggagatacttctcttgtttgtcttcatcattttccacatcttctggtgcatagtgagccaaacgatggaactcgtgcaggtactctgtgacggtcaaatcttcttgcttcaggtagcggaactctcgttttctcagtgtgatcattcctgcgggaacatgggatctcttgaatacagatgaaaactcgtcccaggtgatggtgtgtcacgaccggaaataacccaacgggcattccttacgtgcgtgcattaatccttgtcccaggaggcaaggtacagcaaaagttgatacaaatcagagtttaacaagcggaagcgtaaatagttaatttattacatgggcagcgaaggcccagcacacacaaagacaaacgagaaacagcggaagactagggcgacgaccacaggcacttgacggcaggcacgagctagacaccaaagccttcatcttcaaggagctcctcttctgggcttgggaaaaattgagcaagactgagtacaaccaccgtactcaacaagacacacccacaagtgcagaataaatgcaagggagtacaagggaattataacatagaggggttagggttgaagtaaacagcatttaaagacatttagttgctcaagctattttgtaaacacgatcctagagctatacaatgttattaatcaaggccgtgaacccacacgaacctgccttaacccaaggcctacgatgattcagaccgaactggcaacccgaccctgggtcccagctcgtcccaagccaacccaggccaaccattccatattttagttgttaagcaagttttaagaattaaaacactaacttgggtacattgctcggcttgcccataaccgagggcgcggctattcgaataggttttactctgatcagaggtgtacatctttacccacaagacacatcttcctcacgtgtaaccacgtgccacataccaccacggtatacagacgaaagacgtgacatagtttccaacccatcctagccatagacaagagtaccgacccaatccccctacggccgggacacccgggacaggcaggcaggactgagcaccctagcagcagggcaccaaccctctgccatgacatctcgactaccgggccgcagctcgtgtagccttcatttgccctggagaatgtccatcgacccccgacttcatccatcttgatgcttctctccgttggaactggcgggttggttggccatcttcttcgtcagcagcaaactgaattgacaatcttttggtacatgatcagttccttcacaaaagaaacaagtgatcctgctcgttggacacctgtcgggtggatggtcttcctcacaatgaacgcatgtagtggcacacgagctggcaacatgaccgatttctccacaacgagagcatgccttaagttctattttattctggttaaaaccttggggagacttctcatcttcatcatctgaggagacttgatctgaatcttcactaccagacactctacctccattagctaaaagatgctctgtcaactgttgtgcacctcgggaggaatttcttctctgacattttgtcattcctggtggaggccattctgtgctggtaatgatcatcttacggacttcatcttcggttcgcattggtgcttttcttttctgctgaggacagttccttgcatagtgcccttgctcatcacacataaaacagatgatacttgcttcttttgggtcaacatgtggcatggcatgaggggccttctgggatgttggcggtgcgctgacttgtggtgtgagtgcttggactgcctccaactgcacttgaggttgtatctgactcgggttcaaaattggcatccgatgctgctgtagtatctctataagcaatttgttctggttaatcaggtgttggaccactgccacacaactggtgtctggtgcttcattcactcgagagcttgaggtaccaatgtcctgacttctgaccttattgcctttctcattgtcagccatctgttgcaaaggtttggatagggagagagggaaaacaaaggggagagacagattagaaactaaggataggaccttaacagatctaagtcttttgctgttatgatgtatgttaggcttattctgcaagttgattaagcaaacaacctagcatggttacatcacaccccactgatgcaaaccacgcgctacacacacaagcaaggaaacacacgactaacaactctaccctagagggtggcttaggttctgtgacgggttctcaagatcttcactcctgcttcacagctggcttcagtgcttcctccacttcgctagcggatcctgcagtcttccggagcttcggcaaacaactgacgatgtcttcttcttcactgacctgaccatctagtactagttgaaatccgaagaaggaagaagggagtaaaccttttgcaaatagcattaggggaaggagaaaaaaggaactttcgcaaatagttttatttagaaaatatgtccttaggttttatccacttggcttatcctacagtcgagatggctctgataccagcttgtcgcgaccgagaaaattaccttttcccgaacgctagtgtattaatccccgtcccaggaaaagccggggtacaccgaacaaacatgatacaaaaggcacatctttattatatcgataatatttacattattacaaaggcacttaaggcctgacaatcaaaaataaacagcagcggactagcgggcctacggctacatcttcacaggcgctcaactggggtataagccaggactccacctaagacttcttctccaaagcttctcttactgaagagggaaaagattgagcaagaatgagtacatccacagtactcagcgagccacaccggcagatgcatgattaatgcaaagggggtacaaggggtaataatataggggttaagctttgtagaaaacagcatttaaaagtcacttagttgcccaaagccattttataagacgatcctagagctacacaatattattaatcaaggccgtgaaccctcacgaacctgccttaacccaagacctacgatgattcagaccgaactagcaacccgaccctgagtcccagctcgtcccaagccaacccaggccaaccattccacattttagttgttgagcaaattttaagaattaaaacactaacttgggtacattgctttgcttgcccataacagagggcgcggctattcgaatagattatactctgatcagaggtgtacatctttacccacaagacacatcttcctcacatgtgtcacgcccggaatttctatccaaaattccaaacgcttacatgtgtgtgaaccctcgtccaggaatcagccgaggcacacaataacaaattgataatagagtacaaatattactctaattaataagcgaataaaatgtcattacagaggtagatagttcctctcaatcaataaagttctaagcagcggaaaataaataaacggcgcagacggctccactccacaggcagcttgaccaaggctacacctaatcctccacaccatcagcctcattgtagaactcttcctctgatgaatgattgcaaggtgagtatatgacatactcagcaagccacgcagcaaatatgcaagtgcacaggataacaaaggatggcataatagggttgcatttgcaaaagcagcatttagcaaacatttgagaatttaataaaacagttaagtaattaaacaatattaatccaacgctatacaacataccctgttgtataggcccaaccattctgaacaaccaccccggctgcacagttctatctccaaaccaggaatgtaccattccaaaccaggagctaatcaaattattaccagttatagcatcttttactatgatgagaggtgtgagactaatcacgaaagacattgttagacccgcccataaccgcgggcacggctattcgaatagttttactctgatcagaggtgtaccactgtacccacaagacacaaccccacatcatgtcaccatgtgcctcaataccaccacggtatctcggaaaggagttgtgacaatacccctcgcataacacaatccactgcagcgcaccttcctggatcataatcacccccttataaaacaaggcatggactccccagcgacccccgtgggcttatctccgccacttctcagtctggtgccccgcaatgaaccatgctatacaaaagataaagccgttgcccatgctggcttgtggttggcacgataaatgtttcacaaccgaaactcgtgaaccggtccttaattgtcatgagcacgaccatcaaaaccatgtgctcacaacccaccattaccaggttttagttggcacattaattaattaactaatcacgatcgaccatcgtgaactatcattaagccatcatgaaataatagtaaatcattagttatcccataagtgtactaatgtttctaagcagggctaagcaattatatctaatatctagttgaaccaatataaataaagctcaactagtcaaattaatataacccaaggtatcaaggaataaggtaatcaatgtacaaaagggccataacaaagaataggtcaattccacccaatgacattcgaaaatagatgcaatagttgaatagaaacaatagctttaaataggatcaacatgctcaaagggttgtttgggatctgtgtgacttgccttgctggccttggaactcttcaaactcttctttcgcgaaaacggactctccggaaacgacggaatctaagcaaaaagaagcaaaatcaccaaaacagcacataaacaagcatgaacagtacatgtggatatttttaatgtgtagatcttaattttagaaaaatttagagacttgaaccaactaaatcggagctaagatgaattagttatgaatttttaaagattaaatcggattaaaacacttaaatcgattaaaattgaattatgacgcaataatgaattatttttgaaaaggaaaaagggattattgcgtcagcgggctagggtttggtggaccgggcgcacgggcggcggttcacacgaacggacggccgagattgatccgatccaaatcggacggccgagatcgatcgggtccacggcggttcacggcggacggccttgatgacgccagcaatgacgtcaccgacggcggcggcggctcggcgaggcagacggctcgggcggcgcacgctcaccggcgaacggcggcaccacggcaccaacggagggcaccagcacgtagaggacaacacggcgaacacaccggtgaccaaaacggcggcggagaaggaacggacgacgacggcgacgagaaggaagcggcggctaccttcgggttgtcgacggcgacgaagctccggcgggttccgacggctgcgaaggggcggacggggacggcggcgacttggcgatgacgacggcggtcttcccgagcgacggcgacggctggaacgacggcggcgcacggctgaagcggcggcggcgaaggcaaagctagggcacacggcgctagggctactccggcgacgagaggcgaaggcgagggtggcggcgagtagaggagacaccgggggtccttttaaaggggctcggaggcgacggcggaggcccacggcgacggcaacggcgaaggaaactcgcggcttggagagaggaaagccgatccgattcgaactcgaatccatcgatttccaaaccgatttagccgaagtttccaaaggagaaaaggtagaggagatcccgaagatcatttcccctctatcaattcagccggaaacggaaaggagcggccggattggaaagcggctgtcgcgaccgggaaaattgccttttcccgaacgctagtgtattaatccccgtcccaggaaaagccggggtacaccacacaaacatgatataaaagacacatctttattatatcgacaatatttacattattacaaaggcacttaaggcctgacaatcaaaaataaacagcagcggactagcgggcctacggctccatcttcacaggcgctcaactggggtataagccaggactccccctaagacatcttctccaaagcttctcttactgaagaggggaaggattgagcaagaatgagtacaaccacagtactcagcaagccacaccggcagatgcatgattaatgcaagggaggtacaagggaataataatatagggattaagttttgcagtaaacagcatttaaaagtcacttagttgcccaaagccattttgtaaagacgatcctagagctacacagtattattaaacaaggccgtgaaccctcacgaacctgccttaacccaaggcctacgatgattcggaccgaactggcaacccgacctgggtcccagctcgtcccaagccaacccaggccaaccattccatattttagttgttgagcaaattttaagaattaaaacactgacttgggtacattgctcggcttgcccatatccgagggctcggctattcgaatagatttactctgatcagaggtgtacatctttacccacaagacacatctttactccgcattccatggccttggaacccgtcgtaaagatgtgacataacccttcacccatcctagccgtgaacaaaagtaccgacccaaccctgcctacggccggtatcccgggacaggcaggccagggttgagcccctagcaacaagatctagaccgggtgcgccacacacataggggtgagaccacccgcgtactagtccagtgccatggcatctcgactaacgggcaccgacccgtgtagtcttcatttgcctagacatctcgattaccgagccgcagctcgcgtagccttcatttgcctcagagatatccatcgtcgcaacgacttcatccatctctatccgtgtccttttgttcaggactagcctgagcaccgagttaagccttacccattagacatgtggttagtacggtagtgctttgcaacagaggcccgagcttaatccttatagtggccggggtgctacttcccacaactggcatgcacccaaaccccaccgaaaacaggttttaggggttttgaaagaggaagagaggtgtatgtccaattccaccataatcaaacaattccatagtgtccaaatgatatgagaattcccaaagtctaaagtcataaaaccacctaatgttgcctaattaatcagcgaagcatctacctaaattcatactagtggaaccaggaatagagtacccactagttggggtttttattttcctagggtgaacaaggtaataataacaataacaataataatgtattaacaaaggtaaataggcatggctaaataaaacagtgataacgcgggaatttaaataaagcaataatgcagtaatttaaatcaaaataatttgataaactgggattcaatatgttcaagtatgatgtgacttgccttgctcgctttcccaaacgccggcttcaactttcacgaagagcggatcttccgaagctgcagcgtctacacgaccaacggaaaagaaaagacttttactctaataaactccatacaacaagcaggaacaaagcacaaaaatgggttcttgacttcttaaggaaaaattagagacttgaacggtccaattccgagttcaaatggccaagatatggccatttgaagtttatatgctctttaaatggatatttgcgaatttcttcatttaaattttaattaaaaaatcgggtttattgcgtcagccgagggagagggcgcgcggaccgggtccacgggagtggggcccacgcgtcagcctctcggtccacggtggaccgggagcacgcggctggcggcggtcggcgccgtgggtcccacgcgtcagccgcacccgcgggcgcgggcggctgacggccgggcccacttggcagccgcgagggcgcgcccgaaggcagcctcgccggcacggccgacgggaggcggacacgcccgcgccccgatggtcaccgccggcgaccaccggcgcggcggagcggcgcccgagagagcggagaggagagggaagcgaaagggcggtcttcggctcaccccgggtcgacggcgacgacgggaacggcggccgaagcggaggaaggcgtcggcgcggttcgggacggcgagggcgacggtgctccggcggtcggcgagcgaagcggaggggtggccgaggtcgacggggacgcggcgaagccgatggaggtgacgccgagtggggaggaggtccggagcgacgacggcggcgaaccggagctcggcggcgacggcggagagaaggtgcgacggtgcgggctcgattccgacggggaggagagacggcgagtggcggaaacggagggggagagcacggggaacgcttatatagcgtcgggaggggtagagcgcggccggagagggaggaaacgggcgcggagatctcggccgccattgatggcgccggcgaggtttgcgggagcgattccggacgaatccgagggagagagagagggaaaaacggggggggaaagagagagggaatcgcggggaatgattcccccctcattatggcgcgcggggacggcgggatgcggcggaatccgcggcggcggcggcgctagggcacgggcgagcggcgggagcggcgggaggaaggcgatgacaggtgggccccacccgtcagcgagggcggcgggcgggcccgcctgtcagcggcgcgcgcgctggggaggaggccgatgggccgcgggggagaggagagagagggagggagagttgggccgagccggcccaaaagaggaaggggggggaaaagaagacttttagggatttttctttttataaaaccttttcaactttgtttatttcttaataattattattcgtgctctgaaaattccactaaaatttgagggctccttttagaccaaggagaatttaacaaaaattctctgggccacatttgaatttttcttgtacgtattttagggtttgccaatttcttttcgaatttttaattaattctattattccttttagaaaatgatttttatttcgggatgaatttatcaggacgtgacaaatccaccccccttacaagaatctcgtccccgagattcgaggaggctagcatgaagataggttgggcggtcttctcttcttgtctgacttcttccgctccgctttctataacaaacttgcctaacaaagcttctccactctggactgcttggctcgatctcctgttgcaggtggaatcttcttttcacctgactcgaaccagggttgaacctttagctgacttcgactgggttgcggcacttgaagatggggcttcagttccagaacttcgcatagttcatatctttggagtcaacctcatacaagttacccgcttcatgtcatgtgtcgagatcagctcgtcattactaagataccatgcttgtcatttgcttctaactcgccaccaactgcctcatattagcttccctggtctccgggtgatagctacttctgctatttgatgcaagggtcgataactttacctttgaattatgcttcccaagagagccaacttatcctacttgatatactttgacgtcttcccaaatggctttactgctggatttgttattgtctaatcattatcctgccaaatctgaggcttcgctgttacatgtgattttaaactgacctctgtagactatcttcgaacatatcacttggttcataactgggaatagctcccacgaacaagcaactcagattcactttctttatgttcagtttactttccgctattctcttcatgttgtcatcagttagcactcaacgtattcctttacacctttaaccttgatgagttctttcccgttggatcatctcccaggacgtggcgttgcctggtaaccggtgcttgcatttttcactccgtgtagcatctgataccgagtggaagatttcactctttgccttcatagaaacacttttacctaggtcatcttgcttacttaatgacaaggtgactgttgcggggcaattacaatcaggggtcttccgtgagcgatgcagagcatgtttctgtttatcaatcacctttcggcctacttctttcatgctagagaacatctttgccaatctcttttatcaatcttctttcggcttatctctaacaggtggtattctttaatgtggattgcggacgcttctggggatgatgaggtcctttggcttgctgcctttccgtggaaccttgatgtggttcgtcaaaagctgcactgactaccttcagggaaatacattgcctgctatctgtatctataccactagggtttaattgccgatggtcatctttagtgcttcctcgagatggggagcatccaaattgttcttctgccacatcacctttgacctttttctgattccggataaactaattaccaaccaacgactattatgttctcaaatattgatgtctcctggatctccttaactgttggcaggtatatccgatcttatcaatgtagaggcatggcgggtacccttaggggtttcctccaacaatccttatcttgatctgtaaaaggcgtatccaaactcctatcctcaactactgtctcgttggctttttaacccaacacagtttaattgtttttcttttccatccacaggttggttattaactcgaggttagaatatagttcctctgacacgagaccctaggtctcctttgtcagtaaacaattatacacatgatcatatatccgcatctttcaaacgaatcctcctggaacttgtctgtattacacatttctccctcattacatgaatacgaggcactgccttaaacaaaaagggacggtgcttaacatcggtacattgtattctcaacgtgaatcatccacaagcatagcaagctcactgtttatagacatgaatatatttatgtattacatggttgctgcaaactttcgattacaccatgataagtagcgaactgaaaaccacaaacatggctgctcattttgattctggagagatatagctggcattgttctagtgactgcatccttgattggttctgtgatgatgtgacaggactacataatgctatcattcacaggagaagcttccttctgattgctggttgaagcggatgacggtcttctgcttggtatcgccctccggaggttgattgctcttggctcggcctggagtaggtcggggagagacacaacttcttccatctacgacaattctttgctgaggctgtcgatgcagagaatggttgctatgatttattgccgagtcaggtgcagcaggaggagcattggtgcattgtttctgctatgggttctgattaacacgaggccttacgggtacggcgtttgctccagtgaccacaatacgattggaatgtctgcttcgtgtaaattggcggtaatgtggaggtcgattttgccttggttggggacagtttttggagtaatgcccttcttcagtgcagttgtaacaaacaataactttcttacactcgggttcttcatcttgtacttgatttctcagctgctgtattggaacttccaaaggtacaacgcagatactggcctctgtcttgtcagctggtggctggggctgaaattgagcattgacaccttgtggtagtgcactcattggaattggagctgttgcaacgcgggctataggactgcttcgggatgcatggatgacaattcgttgaggagcaagcttctgattgcgggggtttgcgtggactgacgtgctggcagctacgtttctcggttttgggcacttgtcggcgaaatgacccattccttgacaattgaagcaacagatatcttcccggactcggcattttcttttctcattttgtttcctctgtcctggcactggagttaggctgaaactgtaatcttggcgaggatttgtgtttccttgatgcttctctccgttggaactgacgggttggttggccatcttcttcgtcagcagaaaactgaatcgacaatcttttggtacatgatcagttccttcacaaaagaaacaagtgatcctgctcgttggacacctatcgggtggatggtcttcctcacaatgaacgcatgtagaggcacacgagctggcaacatgaccgatttcttcacaacgagagcatgccttaa

SEQ ID NO: 25102 - DNA, 761 bp, Oryza sativa
ctctttccgctccggtcgccgttcccgtcgtcgccatcgatccggggtgagccatggaccgcccatttcgtttcccccttcccacccctctttcggccgccgctccgccgtgcctatggccgccgccggcgaccataggggcgcgggcgcgccgcctcccgtcggccgtgccggcgaggccgccttcgggcgcgccccgcggctgccaagtgggcccggccgtcagccgcccgcgcccgcgggtgcggctgacgcgtgggacccacggcgccgaccgccgccagccgcgtgctcccggtccaccgtggaccgagaggctgacgcgtgggccccactcccgtggacccggtccgcgcgccctctccctcggctgacgcaataaacccgattttttaattaaaatttaaatgaagaaattcgcaaatatccatttaaagagcatataaacttcaaatggccatatcttggccatttgaactcggaattggaccgttcaagtctctaatttttccttaagaagtcaagaacccatttttgtgctttgttcctgcttgttgtatggagtttattagagtaaaagccttttcttttccgttggtcgtgtagacgctgcagcttcggaagatccgctcttcgtggaagttgaagccggcgtttgggaaagcgagcaaggcaagtcacatcatacttgaacatattgaatcccagtttatcaaattattttgatttaaattactgcattattgctttatttaaattcc

SEQ ID NO: 25103 - DNA, 1950 bp, Oryza sativa
gggccccacgcgtcagccgcacccgagggcgcgggcggctgacggccgggccccacgcggcagccgctcggtgcgcccgaaggcagccacggcggcgcggccggcgggaggcagcgccctcgccccgatggtcgccgccggcgaccaccggcatggcggagcagcggccgagagaggggagggaaagggggaaacgaaacggcggtccacggctcaccctgagtcgacggcgacgacgaaaacggcagccggagcggaggaaggtggcggcgcggctcgggtcgacggggtcgacggcgttccggcggtcggcgagcgaagcggaggggtggacgaggtcggcgaggatgcggcgaagccgaaggaggcggcgccggggcgggagatggtccggggcgacgacggcggcggaccggagctcggcggcgacggcggagagagagtgcgatggcgcgggctcgattccgacggggaggaagggcggcgagtggcggaaacggtggaggggagcacggggatggtttatatagggttgggagtgagggagggcggccggaggagaaggaaaccggcgcggaagatccggccgccattgatggcgccggcgaggtttgcgggagtgaatccaagcgaatccgagggagagagagagggaaaaacggggggaaagggagagagaatcgcggggaatatttccccccactttaatgcgcgcggggatggcgggaggcggcgggattcgcggcggcggcggcgctagggcacgggcgagcggcgggagtgtcgggaggaaggggatgacgggtgggccccacccgtcagcgagggtggtgggcgggcccgcccgtcagcggcgcgcgcgcggggaggagtccgagtgggccgcggggagaggagagggaggggagggagctgggccgagccggcccaagagggggaggggagggaaagggaactttttagggtttttctttttataaaacctttttaactttgtttatttcttcttaattattatttgtgctctgaaaattccactaaaatttatttacgcattttaggcttttaggaaatatacaaaaatcctccaagccttatttgacttttatctttgcacattttaatttttgaaggctttcacatggattttaattattctaatcataatttagaggatgtattttagagtcgatttgggacgcgacaattattgatcaaataattactgaactgttctttgtatcatttaggaattgagctctgaaaaaatccgagaaaatttcagagagttgacttaatcatggagaatttaataaaaattaaatccatccatgctttagatttaagaaattttatttcccacatttaacttcacttgtaaaattaaagaacacttaatataaattctattattaatttattaaataatttataaatcctgaaacgaaaatcaggatgtgacaaactaccccccttacaaagaatctcgtcccgagattcggaacggctagaaagaaaaagggaataggtaaactgcagtctatcttattccataactccgataatcattctaaagctttaaagaaaactactgctgctttgaaactggtggctgagctgtaacacttgaaaacgcaactcttgaagacgcaactggcactgcattggctcctgtgacaacaatgttgttgacctgaccttgcgactgctcactagtagactgtgataacttaacagtggttgggttcgatcctgtcatgacaggcagcctcagtgaattggtgatttataataagccagatatagacgataataatcattgctgctccgtagcagcacatttgttcgcagcggtgtcaacgtcgaaggcaatacctgttggttcattccaacagcttaagaagcttgaggtggacagcatctcagcggtgtttgttgcccccatttgca

SEQ ID NO: 25104 - DNA, 647 bp, Oryza sativa
  unsure (1)..(647): unsure at all n locations
caaaaataagttatctgcaaaatcatctggtggaacaggacatttgaagcggcatgccgaggcttgtgcaaagaagcaaggaatccaactacgacagcaacaactactactaaatcctgatggtacggtacgtacgtgggagtatgatcctatggtagctcgagaaaatcttgcccgtttaattgctagacaagatttacccttgaactttggtgagagtcctgcatttgaaaattacataaaaaattctcataatcctaggtttcaagctgttagtagacaaaccacaacccgtgatttgaaaaatgtctatgacaaaggttatgaatcactgaaggaattatttagtacatgcaccttttctgtcagtgtcacctcaacatatggagtntagggctaaagagataccttagtgtattgacatttattgagatgattggcaatgcaaaaaagagtcttggctaaggtaattgatgttcacatactgggaaaatatagcagagagaatcgagaaggtattgatgagtttaaccttgcagataaaatttttgctgtaacaatggataatgcatctgcaaattctagggccatggaaattctacaaccattattttgtatttatgctcaatcatttcttctgcatcagc

SEQ ID NO: 25105 - DNA, 1706 bp, Oryza sativa
  unsure (1)..(1706): unsure at all n locations
tcaccaatgccataaaacatattgtgtcagtggttatgaaggaacatgctgaactttctcatggtcttaccaatctaggatcagtatttgacacaactggctcagccttatcctcatttaagagcttcatgcattctccattatttagtctgtggagagttaataacaaaactagttctgtgcttggtgtcaccgaattacttgatgaactcttagaggcaatttctgagctatttgctcagttctctagtttgatgaacaattttgatggagacaatcctagtaaaatgttgccagtgccttttgtcagtttgtcagaggacctacatcctgacaacagaagtagttttgttgatatggatcttgatatgactggctctggtgaagtagatcctgtcacagcaggtggaagtggaagtatgggtatctcaccacggcctttggagtgcaagctagaactagtctgtattatttcaacttttttctctgttgtgccgcttcatacctgggaagtcttgtacaacttagctgacaaagaggtcaatatcaaggtacgaagttgcagtagtatccactaaaatatccctcttgtcctttgcttcaattgtattcttggtttattatttccatttgcaggttggccaggctatcttgcttgaacttgcacanatatctctgcctcatcaagtagtttatcttctgtggtactgtcttgacttccattaaatcgtacttcaatctgtggttgtgctggtggtcttgtgagttttatccactcaggcatttatctgattttatccttttgcttcggtcatgcagctcaatcttgtagttgatatgtgggaaagaagtgcttgtacactacttagctctgcagattgtttagcacatgtccatgccttgctaaggaatttgacagctaattgtgatgttgggcataatactgatggaaggtcacaaggatgtaaagtggcatccaatgaggttgctatttgacatatgatacaatttagcatgtttctgttagccttcgctaaatatttctcttaactttataacttttgttctgtgacaacataccttcagttataggttttcatgagtgaacaccagttttactagttttatacagttggtgtctttttttaataactagctaaatacatgtgctttgctacggatgcatgcactcgtccctgtagattttagagattgactagataaccacaatatatagaaatactatcttgtagtaatatggaagtacataaggagtagttggtaagaaaatataaaatagagttggtggggtggcaaattcactgcctctaccaatctaccattgccttcttttagaagagtatagagtatagctatagatataattaaattactcaaaattaagtactatttgcagacctggcaatcacagtcaatcatgttattggatggactgctagttcttttgcacttaaatacatgctgaacaagaaatacagttagaagaaatatctaaggtgtaatttaaacaaaatcattttctgctgatgttcacttggtcagtatactccatatattatgatttttcatcatgtagtgatgtattaaagcgccatttcagagcatatacacctttcttgaacaacagcatatttatcaatattttttttttgtgtaactggatcctttctccaatatctagtagt

SEQ ID NO: 25106 - DNA, 644 bp, Oryza sativa
ggtccatttgcagctggtaatggacaaaatcagagtaaggatggggggctggaaaaacaagctagtttatcaaagcaggtggaaggttcttgtgcaatcagttctcagtgccattccaacctacttgctgaccgttcttaaaccaccaaaaggattcctagatgatgttgacaaagcgcgacgaaaatttctttgggccggagactaagaaagcttgggcaggaaatgtaaagtgaattggcagcaagtatgttctctgacaatacatggtggattgggcataccttgtttggagaagttctcacgatcgctgaggctacgttggctctggtatgagtggacaagcccgaaaaaaccatggataggaaccccgccgccctgtgatgacactgatcgtgctctgtttgctgctgccaccaaagtatcggtcggagatggacgaaaggcgaaattttgggaatccaactggataggagaccagccgctgaaatacttagccccaaacctcttcaagcactccaaaaggaaaaacaggtcggttcttgaggcaataaccaatgatgcttggatcgaagacatccgcggaggggtgacaatacaactccttcaggaatatatatgcgtatgggaagtgctccacaacg

SEQ ID NO: 25107 - DNA, 1852 bp, Oryza sativa
aagttcctagactctcctcttctttgatctagcctcagagcctctaaccatgtaatagtgacgcagatggttacatgaggttcctaccctctgttctcatatcatacattcgtacccaacaaattaagtactagtagtactggttttaaatgatcagtccatgtagcctttccagtacacatttagttcttaatcggccttgtctttttaatatttgttgataagtcatcttttaatattagtgtcccgttggggacaaaagagctctatagttctagagaatttgccctgtttcctataaaatccatgtaaaacaaataggactaaagttgcccatagaattgttatcatagctttgaaactgggaatcgctcgaaccagcaagcccactggttcactggtttcgattggtggttcctatataataatattatagtggtttggaaaaataaaacctaaagtaagctgcctttgttgataatattacacatattggtttatatatattgcttatatgttgtgaattatctgtgatccatgaagttcatgtcctgcctttacactccagcttgaagaagctaaactgctgagagctcaagggcagcatgatatggctataaatcttgggaaatacattctaaagaaccatcctgataagaagaatgtatcagatgtctatcgattagtcggcaagtggttggctgaaacaagatcgagcaagtaaccatttatttttactttgtgctttgcacttgtttcatgtattgagaactgttctctattttctgtttgtgatatatgtatatatatattgtagttcaagaactatcattgatgactacctaaggcattccgtagattttactgaattgcacaagtgcccagacaaaaagtacaagtctaggcagtgccgaacatatttccatctagcgcattacacagatggcttattcaaaagctatgaggaaagactttcatccaacgaatggcaagcagctctgcgattaagaaaatacaaggtaaggaactaagtttgacagtggcatcatatcgatatcgaacttgaaactgtatatctcaatacattttctatttaatgcagtctaaggagctggatacactgatgaaaagacttaaaagttcatcaaaggtaagcactgcattttttcatggtgtctgaaaatgtcaaggagcatgggcactgttggctactgcatactaatccttaaaattttcagagtgaaaagactgattactcagtgaaaatccaagagttacagaaacaacttgcacttgacgaagaagaggcagggaagattcaggtgtgcatgtgtagtttaaagtatataaaatatgcctctcatgatgcattcagtcaaattttcaatacgcctatctggtcacagacctatccaacatcgaggtcctgactccaacttaaatatagcatttgctgctatcacaaattcatcacgcactatatcaatagtactaaccagatcaataaccatatatccacaaatattgtgcttctggccacagcaaccacactgttcatttttctatgtgtgcatgatgcggtgttctaaaaaaatttctaacaaaaacacctggatgatattttatgccttcacagtgcacacatgccaaatttagcgctaaaattcaaaaaagcagcaaggtaacaaacattattgccactatcatgcatcattctcctgtactactcttttcagttatccagaacctgcatcatgtgctattgtcttgtactactccctttttttttgtcatcacaagtatttaatatcgacaagttggaccttgaaattatgcatgtgcatagaattac

SEQ ID NO: 25108 - DNA, 2024 bp, Oryza sativa
gtatttggatttagatctttatagacataagaattttgagattagctattgttgaagctacacctggtcgtgtggttgatgtcgtcgtagacttgtagttctatggtacttaaggggagtcagtttgatgtatgttctggtactggcagggcaatctagatatgaccctgtgacaggctaaattctaatgttcaatgtttgataacaataccagtttctaggtttcgttaatcattgatatttgtttggagtaaattccccaggcatatactacaagtaacaagtatgtaatgactctctagacctaggcccttgatattataatctgccttcataattgaataataaaactctgtaaattatccaaacatactctgttagccatgaaccaaatatcactgcaagaaatgtatatgtggattaattttttaaaaaaaacattcaaagaatttatgcatagctgatgtattctttaccttttctgatggtgcttgatttcatccctgatttattcttggttttcctgtatatgatatttgcttggttgaattggtgagtcttaagctttactggatctaacatgatttgctttcgtgtacaccaggtgtctgtaatcatgcttttcacttccattgcatcaacaggtggctcaagactcgccaagtgtgcccgttaagtaattgcagttcctgtgtatgatttccttctggagttaagtatggtgggtgtgtgctgatcaatagcccttgttccatcttgcagataacagtgaatgggaatttcagaaatatgggcactagacaccaactgctgtctgcgcttgtttgttgccacggctgcgctacaaacacaagccgtatcatctgccgaacagctccatcgttagcttcttttgatgccttacatctatcgctggacgtttatcgtgcgtacttgtcccatacagggattgtgtttggatgatttgtagagagggtactgtatggcataagatccttcatattaatgttctgtgggtcacatatcaacttgctattattgtattcagcggttctctctctattttgccttaagctgtggtaccattttaagtccagtgcttgcttttgattgcttttctgagctttccaggacatggaatcgagcctgtgaatgtcgtcggccggtttatcctttcgactaataatttaaattgtccagtgttggttaggaatggagtatcagattctggcggtttgcatgctgtttggtcggcgacgtgccttatcctgaagatttatatatagtactttgattgatgtcaagaaggaaatttctttaagaaactttttacaaatagcgattggtagaactgattaacaacatccacggctcagaaaaggaacgcaaacatatttgattcttccctaaattaatttgccattgttatttttacttgaccatccgtcaaaatttacatgaatacacaacgcacggacgaacgatttattcatgtgaaggcatgatttacatccttaaaattctctcgcatctagatatagctagagagtggccagctgctgactatgcatggagctggcacggcagtagtgtacaatgctactgtaattttgtattgctacaagtactagacaggtacagggctgaggccagtggatggctgtaggctggcagcatactccctcgcccacagatcataatgtatgatctcctccagtgatggccttgttactagctcattccgatgagcgtcgcatgtcagctccaccaccttgaagatgtccaggtacccgatcctgcaaaaacataaccacaatcatctattcatttgcttatatatatgtaaagtttatctgacgggaaaatgtctacttgcaaagaaatagccgcggaaacattaattcaccagattaaataacttgcaatgaagttttgtcagccattcaccatttagaaaacaattcgcccttcgacaaaaacaaaccttttattatgcaccaatggataccattttggtacttacc

SEQ ID NO: 25109 - DNA, 727 bp, Oryza sativa
ataagattggtatccgcatatctggccatcccagttgagccaacacagatgaatcttgaagaaacagaacttcatgaatacttgaaaaaaaatattaagccaaacgtaaacatgaaaatacggttgccatatcaggattaagtgtgcatgcattaacagtttaaaatccactgcagttgagcataaccgctaaacattttccatagctgtgctgtaggactcacctgggtttcaatcatagagtgtatgatagattgtgggtggatcacaatttcaatgtcatcgtattcagcaccaaataaataatgtgcttcaataacttctaaaccctgtatgaatcaagtgatcattttagtgcaaatactgccaacatgacctcagtaaaattctgaaagtttactgcaaacaccttgttgaataatgtagcagaatctacagtaatcttcttccccatattccagttggggtgctttaaagcatcagcaacttttacttctttcaacttgtcaactgggccagttccttacattcatccatggatataagatggagtccaatgtccagtagaaaaacatatataacatgtatgtcagtagatttacctgaaagcaccccctgatgcagtcaaaataatgcggcgaagtgctccttcgggcaagccttgtatacactatgatagtagagggaaactgcaaatcagcatataatagaacaacagtaaactata

SEQ ID NO: 25110 - DNA, 883 bp, Oryza sativa
ccacaagataggccattgctgaaaaaaatttctccacgcaattcatttcaattgaccttagcagacagtgaccaaaaaatactgacagaactacaatggtagctggttgctatgtttacttcctgttgctaactcatcagtttggtgatagtctaaaaatgtgagataataacactgtaaagcactatgacaagagataaaagtatactgcaggcattattccaaaccatgtctcctttgtcccactaaacagaattgcttacggtaggtaacagatagtgttctacgatatggtcaaatgccagtagcccaactgttttagtcatactttgcactagctgttactagcaattgggtacacactagttgctatgcaaatacatgtactaatcatttccctgaaatacatatgtagtcttgctaatgaagacaaacatctagggcacttatgtggatcacaaattaacacacagatagacatcccatgatgcaagtttaaatgagcagattcatagtacataggctaggagaaaaagataaaataagaaagctagaactttgttggtacttgaaagctctcaaacaatacatggtaaatgcattcttgtaaaactttctcatgcttaaaatgtaggaataagaacatacagcatcttgtcgcaggtcatcatttccagattttgcgagttggcgatatttgttaccatcagagccaatacattcaataaccttcggagcattaattccattcattaccctaccacaatggaagagtcccaacagttaataaagatcaaaaggtaaatcttcagtcacaagtaatgggtaaattgcagaccaacttacataatagaatctgctagcccattaaaatgtggaaagg

SEQ ID NO: 25111 - DNA, 685 bp, Oryza sativa
ttcatctacaagatgtgcaaatgaacataataaagagtacactttaaccataaatgcattttgacttccatctgagatgactgaataagaatatatagatatttgaaaagagtagcaaacctgacgaatcaaagctccatgagaagaagataaatcctttaacagattttcagcagcaagtttcttgtccatgtctacaataaaagaacttctactcctttgcttgtctttgacgcggtcaccatttgctagagccaaaagctgagtaccaaacaacatgcttaaaatggcaaaagagatgactcttaattctagagaatgattaaaatgcactgcagctgccttcaaatacataaagtacacgtaaatgagctaattgcagagtcatgtaagtgaacaaactgagaatgtgtgccattttaagcacatatgtaagtgcactaaaatatatttcattttcaagtttagaacttatgaattatatttttagatcagttgtaatgcaaaggtatttttattgccattaaaaaaacttagaaggaataagggtagagtcaagtatagatgtaataacactaaaaatgtattttattttcaagtttgacacgtttgactctaatcttattccaagtatttttttaataacaataaaaatacctgtgcattatagcagatctaaaaacat

SEQ ID NO: 25112 - DNA, 10885 bp, Oryza sativa
tagccagccaaggcgaggcccacgcgcgtgcaaggatattcagaacaagttcagttaactttttatgttttcgtctgaattcagatccgcgcgacggaatcagaatttctcggtcaccccgcatgtgtatcatatggttgggcgacgcgagcacgcagatctaatgacattctctgttgcattatcttattcgttcaaagagacattgcaagactgacactattaaagaaagagagaaaagaataggaggaaatggaaaaggaggaagaggtggagagtaactaaatgttaaccatatatcccctctatgatacgatgtctgtggcatgcaggctaatactataatcaagcgtgattaattaattagtagtattgctcgccttgataatttttggttgttaatctgatcgtctcacgatttcctcgatcggcttgcttttggacgcagggatgaggaggcccggaacagccaaggaaagctcgtaattccacatgcgcgacacgcatgcatatcgatcagtggtggaggcccaggcgaggagcgaccagagcagcatgtgggtggtgcatgatgtatgcatggtccatgcatgcacggattatgatagatgatggtatctgcatgttcgtcgttacgactggaacactcgatcgatatacgctttataatacatgaaactcgcacttcactgtcttgtgcggttcgtttttttttaaaaaaaaaagtatatgtgtcctcctatccgctgatgggttgttgctcgtttgtgctacaaagcgtacactcgtacatacttattcttttctaaagaaaggtctatatatgtacatatatacagcaggggttgcatgaaaatgggatattattgtacatgagaataactgtaggatccgagcccacatatcaacatatgatggtttttttaagtccgtcaattttacggtgttaccaagcaaaatgatctggatatatgatatttgatattatttttttgacggtgtttgagatgcaactttaataacaagtttttattagaattaaggataaaaatctgataatttcatgagattgtggaaacccatttcaagatagatctgcagaacacttacaagttttaaattttaaattcattaacagtttaagtgaatattgttaaaggcttgctcaattgtctagtcttcaatttacatgtcgtagctaaaatttaaattttaaaacttattccctctattcaattttaaatgcaatcatgattttccgtgcacaacttttaaccatccgtgcacaacgagacagagggagtataatgatcagatagcagcttagtgctagagtactacttgtagtatcatatatatgtcgcccagtttgatttcatttttccagtgagtctttgtctgatctgaaatggctcatacattttgtgatgctcgtggtcacagaaattttatacttccacgtctcggtagggaaaaacaactttactcaaattttgatgtaatcacggacgttacagaaaaacagcacacactcatatgcactcctggagttacaaaaggaacccagtgacaaaaaaaatcatcaaatttaattacaacgcgaagaggaataaagtactcgcacacatcaaatttaattactactacttcgtattagaaaatcaccaaggcaaagcaacggcatcatatcatttcagtgcagcgttgattagttgttcggtggcttttctcctccagacacattaggatctcttgatctaatctcgacgcgctgcaaaagtaacggaattaatcctgtgagatgagcacaatggtgccagtggatttgcactacgactgtaaaattaatcaggcagtctgagaaattaacaggggcatcctacctgcacagttgacagcttggtgggttccttgacgcccttgtctccggcgccgcggccgcagccggcgacgcgctcgacgaggccgagaaacctgtccttgagctgagcagcgaacttggccatgggagttagcttgcttgcttgcttcgatctggagctcgcaaaattcagtgtttgctgagctagctagctgctgctgatcagtagctggctcgctgcttgctttgcctgcttgctggatgcctggatcgattgccgagcgtcctatttatacagagaacggtcgtgtgtgtcccggtcaccaaacgcgtcagctttcacaggaagaatcgcgtattcagattacgttgctgcgcttggtctgcatttttctgatccacatcattccgatctatgcatgcggtctgctaattctatggtctcatcatgcaaaaatcaaaaatcgattgcatgggatcacaattagttggcgaaatcgcattgttaatttgttgcagcagtagtactcatgtctccccggatctttggggtcacatgagcaacgtcgtattgccgttgttcacagctgcctcgaaacagctaggaatcttcgcgattcctcacgtgtgacacatgcgtacatgcgtttcgcattttcgcccgctgtaaaaaaacacagcccatggacttgtccgaaaagttcggggaggattaggccggggcccacgtactgttccttttcctcccgaactctcaatctgagttagaacacagttttttattcaagaattggggaaattttagaaaagaaactgtgagcttctagatcgaaaatggactttttttttggctaatgatgcgtgttcctttcctaaacaaaggtggatgggttataaggtcaggtcaccctcgaccgacccggccggagtgcttttttttttttgggatccaataaaagtacaataataatttgaaaaagaaagcattgtaattatgtttttcttgcacaattatgaaaagtgcggctgctagctctcttttgtaccagcacagatcgatccaggctattaaaagttaaaacgactggaataattgtatgagatgatgattaattgtttaagatgttgtgtctgtatgaaaaacgagaccattcaacatctttttatagattgtcattatgcaaaatttatttggagagcagttcagttctcatttggtttataccttcctggaaccatatctaatatgtttgatggttggcttttgagggttgacaagaagaagagtaaactcatacttgtaggagcatctgccatatgttggactctgtggttgagtaggaatgatataatatttgacaaatcaccatctatctcatatttgcaggtaattttcagggcaacatattggctccggtgttaggcacagctgcaaaagtatgaagatgatggagagcttatgaaggttgcatgtcgcaggcttgagacgacagttatgcaactttttgcaaactatggatggagatttacaaatagacttgaataaatgtgtactccttatctctgtttggtcttttattttgttgggtgtgtttaatttcattatgaactacactcttcgtttgagtgatacattataataattggctgtagttttgatgagcaaaggccgaaatgttcattccattatctaaaaaaaatgtactagtcactctgccaaaaaagagaggaaataaacaaaaaccccgatcaccgcataggtggcgacggcgaagttaatgggcagaaatcctccaggcccacggctgagacatctatgggctacggcccaatagcccatgtagcgtaggcttgatcggctaagatctggaccgtcaggccatctgatgggccgaataaaaaaaatctgataggctactatactttttctgaaaaaaaaaacgcatggtacacagctcatttcatgtcagtacgtatacagattgggtatctgaatcgatcatgtacgtaccacggagtacacgtactgtacatggtttttctactccacgaaagaaaaatcaaatcagttgctctgaccgtaaggcagttgttgtacatgaagcggcgtcacatcaagtgacattgcactatgagattcattgccgtgcattcggcttttcaagaaaaaaaaacatttatgtggatggagatgcaatatcttctcgatctagaatgtgatgcatacacacatttataattaagaactggctctaccaatttcgttagctttacagcttgcaactactagtaatacatttgggggaaccatgcattcatatgcgttgtgttattattcggtgtgtactaaaagatctagagacataagcgtatgcatgctctcatagatcgagtaatctgatcaagaaagaaacaatacacacaataaatatccaactgagataagaaactttctgaatgacatcagacacagatcagttatgaagctcggctcgtaaacgaagttccatagatttcaacaccgcagagtacgtagttaatgcctgcaactacgtaaggagctgggtacaaccgtacaaattaagtagagaacaatcaaacagcatgaacaaacgaaaaataaataaacagaagctgcttgccacatgacccattttttgttcttctatcctagcttggttcaccgcgtgaaggccagcctctctccagccggcaacaatgccgctcgccggcctctatcagcaatgtacatggctccagccgacactgctagctacctgcccgagcagtagtgagcacttcatctcctgaaacctatatacatcatttgcgcacgcgtgcatgaagtgaaagacataacctgaaaaccataagccgaagtaaattcagaagtacatgcatgtttgctagacaagaacaacaatcgcaggaactgaataattaatcaagaactgtgtgagatcgagattattaccagttgttcaaaacatcaatcaggattgacgaggatgccatgcatgcacctactaattaacaccaatgcatgcagtaatagagctagatatccatgcttgcgcatgaactcacatgatacaagcaagcatgcatatatctctggccttctcaaacttggatagaagagaggagaccaggaggtagcaggccggaacctctccctctctggtcgcccaagggctctcgcactggagttgcaagtgattttatagccggctttgcacagcacacacgcaggcagaagagtgatggggttagtttaatcaggtgaagatgcatgcatggctagctagctatctcgtcgttttctctctagctagccccctgcaggagcatgggcgctgccatgccatattgccatgccctgagctctgactcgtagggagatatcatggatgcatagcagcatagggcttgtccttttgacgcccagaaaagacccaagaatctctccagcgcttgttcaattccatgcaaaaacctcaacttcagtgcaagatgcggcacatcatatactccatatattaataattaatctctcctcgcccaatgtatgtgattagttacacagcaaaaccgcggcagctgatacatgtgcgtatgtgatgctacaaaagtgcgttggcggtatagggttgtgtcgtataggtccctaaactctcaaaatatatatccaggtcccagaagttgtcaaagtgtatcgtctactccagaatcctacgtggcgctgatgtggcaacgccacatggacgtaacatgtccttttctttttctttcttcttttctttttcttttccgttttcttctcattcttcttttttttttctttcttctgtacggatcacagagaaaggagaagaaaggggacaaaagagaagaaaaaaagaaaaagaaaaaaattaaatgtcccatttgtcagttaaaataatgccacgtcatgttcgtgtggcatgccacatcagcgccacgtagaattctgaaggggttgtggcgatttgggatctagatgacacactatgacaagttttaggatttaaatatgcattttgagagtttagagatctaaatgacacctttacaagtttaagaaccgtccgtacactttactcttttgcaaattaagatgccttcatgtgcaggtaatttgtctgcatgatgcacgtagtatatatgcacgtactccacgagagatgtgagatcgatgtcttccaagtacactactttaccgtcagcatcatatcacgaaggaaaatctggagaagcttttgacatttcattttagctgcatcgatcatgcacccgtgtgagtcctgcatggatggatggatggatgggatgctagctgcttgcactttgcagggtacggccggcccagcagacaggcagggagacaggggcagcggccggcaacttaactttgccgtagctagtgcatcgcacgtcgcgtttagtaggctttaatttctgaatctaattaagctttgcataatccaatccagtcaagcacagaaacactaacaaatcgcagtacccaaaagccttcgccgctaactgcgcagtcgtcgagacgaagcgctgtttctctcgttattttcaacccaagctgtatgtgctcatgtgtcccgtctggttgtgttattgctggggatattctagtttatggaactgcgtgacgctgtagaagtaaattaaagagagtggattttaaactcaggaaagaatgttcctttggtgtttacatgtcgctaaaataaatacaaaaatagaaagtgtatgtattaacacgtgacatatcatctcacgaacaaataagttagaattcaacttttacatgttataaaaagaaaaacaaatttaatcacatgttaatatacttttttataagtgtcatataaataacgagtgaacatctccttcagagttttagaatagtttccccgagtaaaatgtaagtaaagcactgaccaaaagcgcgcggcactgtacaccagccagtattatgtgtgcgccagtcaccgtatcagtattcagtatacgccatgcatgcatgcatgcgacctactcctaggtagctagcccatgcgtcatttgcagcagatgagcaggggcagctatagctgctgtcttttggcctctgcatctgcagatgtagctagagcctgcaggttacgtgtcaacggcgaacgatgtggggagccatgcgcggggctcatatgagttgacgcctaggtgttgttagtttctgtactaagatgaaaatgaagttaactcatggaaaacaataaaattattagggtataatcaattattacaaatttaagagaaatggatttatactacaatatgatataacattgtgtggattcagaaaattggttcgatgataacataatataaatatcggcgtcataatatactatttatgcttagctagatatagtgttatcctagtcccttcgtcccataatataagtgattttgatattttgcttgtattgtttgaccactcgtcttatttaattaatttatgcaaatataaaaaataaaaagttgtgcttaaagtactttggataataaagtaagtaaaataataataataattttaaaattttttgaataagacgaatggtcaaacagtgcaagcaaaatgttaaaatcccttatattagaggacggagggagtatataaataaacaggttaatcataagtttttgtccaaaaatgatcggtgtcgcggcgacacctaaacattgtagatctaccctttgtgtctgtggctctgttgcatgcaaaaggataaaattttgaacagttgaaatatctgaattcatacttgacatgtaagagaataccaaaagaatattggatagctttaaaattcgtgtattacccaccaacccaaaccctttctctctttcctcctctgtctcaacattatcacttctccaccgccccctctgctagacccccttctccaccaccatcacttaatcgcgctattggctggcctcatgtcacgccccgaactagtgccgaccggaactagcccgtgacgctccaaattaacctgttaatcgataccagtcccaggaaacagtgctggtatcacagggagacagaatatcacagcaacagaggtctctttattatagagtaaaagtacagtcatgttgggctgcggacagatcccgagctcacaactgcattacaaaagggaaacggaagccacggcttggaccaaacatcacaggcgcgacttgggaactaggccgaaaccctaaaactcttcgtagccggcttgctcctagaagaactcctcatcagccggatccgcttcatcttcttcagcaactgggggggattatttatatagagcaagggtgagtacgggagtactcagcaagccaggggaaataaggtgtttaatgcaggcttcaaagaaaggctggtgtttttgcaattgattttattcgaactcttttctgaaacaactaagtgagtgcttctcaaacgacatggatgagacagtgcgtctcgtccgaacggagtatgtgcaatgtatcagtctttagaattgaaacaaggttggcacccggccaatagcttttcaacggccacccgggccaacaacttttcaaacggccacccgggcctagctgatcccatcagctacagatttttcaaacatcgaacctcttttctcaacagcaatttcacaagcagtagtcaaacaaaactacgctaggaatcacctcacatccgcccatgaccgtgggcacggctgttcgaacagttagttaacctctgcagagggggtacactttacccacacgacattactaacccggatcacccagcccgtggggatcagccacgtcgggagacctccaagctttcatgacaaggcatttccaaagccgacacaggtttaccatatgccgacgagaggggtcccagaccaacaacaggttaggtcccagaccatactgtgccaggaagcccaggggtcctccccgacaccaccccggcgaatccatatgtctctcggcatcaaggctcccctgataagctagttactcagccaggggtgtcccattccacccatgtggtcgtacttgtcttatgtttggatgaaattccaaggaaacggtccttaagtgcaagagcgggaaaccgtacacccggtacgttccccggtccgcggttttggaaattcatttagttcacaagcaccgacctaggtgtcgggttttccaagtcttttgtaaaacccaagttttacccaagttgtttttcagattttaagtttgaaggcgtccgtcgatactcgcactgggtgcacgaatatcgagacgcaactagatggttgcaagggggcatggtatcacaattaacaaaggaaggatcaaatgcaacaaattaggtagatctgccaatctgccttgcagacgggacaacagattaagtgcgatcctatcaatgcataataattttcaagcaacataattaaatttcaaatataggctcaagatgttcaaaggtggcttgccttgctcgagatctggagcttgatcctcgtaatcctcgcactgcgggtcttcgggctccggaactacacgcgaaacgggacaactcaacaaacggcgaaaataaagacctattaatgacctctaagcgtgccattagatagatctcgagatttgaggaattttggaagttgaacggagtcaaacggacttacggttaggaagatattgaatttctaagattattggatttttggtctaaaggaaaaggatttaattaaatcctttttggaaaagaaaagaaaaggaaggagggagggattatagacttttcctcgggcggctagggcgcggcccaagggaaaaaggagcggaccggccgagctaaatgggccggccggcccaaggcggcccaagtgcgcgcgcgcgggaggggaggagagagagggccggtggactgggctcaccacgcgcggtcccgggtgggacccgcttgtcagcggctcggctcaccgtgcggagggagcacgcggcgcacgcgcgcgggcgggggagggacgcggtgcacgcgcgcggtctgcggaggaacggatgcggcgggcccacgcgcagcctcatggctcgcagtggaacgcgcgcacgggaggggctgaccggggtcggcccttcccgtcctcggctgagctggcgacgacgtggcgcctgcgtggctgccacgtgggctggcgggaggtagacgacgacgccggccggaacggacggcggacaacagcggcgagcggcggagcgaaccacggcgatacgggcaatagcgagcacaccgggtggttgcacaggacgagaggagacgagccaacggctcggattcgccggagggagttcgtcggcggcggattgcggcggcgacaaccggcggcggaagaagggggaaacggcggtgaggtcacgaggggctaattcccggcggcgagagcatctacgcggctacgggaatccgatgctagcgtcggattgggcggagctacgccgagcgaggccggcgacgagcgggtgctacggagctcgagcggcggcggcggcgagcactcggcgagcgacggcaagggtcggggcggcaccggctagctacggggaggctactcgtgctaccaccgaaaactaagggggggagatggagcgaggaggaagaacggagagaggcactaccgtgcgggtcggggcgctgtgacgagaggccgacggcgcgggagtaatctctccggcctcgggccggggaagaggaaggagagggcgcgcccggagtccccttccgcgtcctcgaacgcaccggctcacccggcgcttggcgaaggacggcggaggcgagacagagcttggaagacggcggcaatggcgcggacgagaaacggggaggaatgggggaaaagggaagggagggcgcccggggcttatagggggcggcaatgtcggtttggaaaccga

SEQ ID NO: 25113 - DNA, 16060 bp, Oryza sativa
cagcacggcgatgtcgtcgtcggtcgggtctcgccgcaccgcgtaccccaccttcttgccgttgcaggacatggtccacatggactcctcgagcacccacccgtcctgctgctcgcgctcgcgcctcgagctggcgccggcgccggcgccgtcgccgccgtccgccgcgcgcttctcgctctccagcacgatgcgcgcgccggcggtggtgccgaggtcgcggagcagcgcgtgcgtcgggagcgccagctccaccaccagcgtcggctggcaccgcgggttgtcctgcagggacagcgcgatgcgggcgtcgcggtagccgaacagcgtccccgtcatgcgccggcgcgacgccccggcggcgccggtggaggccgacgccacgagcttcgacatcagggaggcggaaggggacagccgcgacggcgccgcgatccggcacgccgccccggccggctgcagccgcccgcaccccggcgtcagcaccgggagcgaccggcacatggtgtggaacatcctcaccggccgcgacggcctccccggcctccgccgcacgggcggcgccgcctccagcgctcgtcccgccgcccgcaggaactgcttcttgctgccggcgtcgtcgtcttcggcgtccgacgacgacgacagggacgccggcctcatccttcgtgaaccgccgtcgtccaccaccacggcgtgatcggccatatcttccggccgggccggggaagcgagcgagctaccggagttgccgccggcgctgctcgctccctcggcgtcgcgatcgatggatggatcgtcgcgggggcttcgtgatgcgctgcgtgcccatcgggagaaggcgaggggagaggcgcttttgatgcgggcgaagctggagctcgcggcgaggcgaggctggtttgggcagtttggcgagtttggttggcgtggttggcgggcagcaactggcgccaaaacagccggcacggagaccggttcggcggggcagttgcgcgcgcgtgcggtgggagttgctgtttttgcggttcagatctgcattctgcttgagtctgatgggctttagagttagagcccatcatggtttgtgtgtgtacgtgtgcgtgcgtgcgtgcgtgtgtatcagcccaaacgatatcgctgtatcagcccaatccgaagggaaataagcgattcggcggcctaactttcacaatctttaatttgcttcaaattgcagtttgcagagggcaacgtgatcattattaattcgtgactttggcaggacaggacgaggttagtactgtctctggtgcagctgcagtgctatcttaatgtcttatcaaatcagtgatgagcttgaattaatagggaaaaagatttgagaggtcgtattcgtggtagggtcttccgagttaagggggtgtttagatataagggtgtatagttttgacgcgtcacgttgtatgaggtgttcggacattaataaaaaaaaccaattacagaatccgtcagtaaacagcgagaagaatttatcaagcctaattaatccgtaattagcaatgtttactgtagcgtcatattatcaaatcatggagtaattaggcttaaaagatttgtctcataaattagtcgcaatatgtgtaattaattatttttaagtctatatttaatactttatgcaagtgttcaaacgttcaatatgacagggtgtaaaatttctgtgtgtgaactaaacatggcctaatattagtcccagtttctaatgtgtagtttcgggctttcgctggagctgttctcggattgaaaaaggaaaaatcattagcatatactactctctccgtcgtaagatataaaaatcggataaaacattttctaatactacgaatctggataggcgtctgtttagatttgtagggctaaaatatcctatccaatcatagattctaatatattagaaaagaagtaattacttatatagtatgaactattataaatctaaagatttcccaaaaaatacttttatataagttttttttaaaataaaacatactactacatgctaataatggataacaagtaccgtttcgagttgttgaaaaaaacttgatcatgtcttcgttttgcatgaactactaatttcgcaaatggccatggttttgttcccgctgatcatccatgtcttcgttcgcgcttgttagacattattgtagccttctttagctgcttctaaatgtaacgatgcatttctctcacctatcaattatcagggcaacaactagataatttgctgacaacattctcgatcagaaaatcgatttcaggtagctagcatgcttacatcgatcttgtagacctgtactccagattcctcagccagggaactcgacaagtaaacccggacaaactatctgctcggaaggataagaacattacattagattacagaatcccagcagtgttcgttaaacaataattaagaggagatgctgaccgatctgggtaacaaccagaggagagcctgagaccgcataattaagtaggtcatcactcgccagttccctccgggcaaagaggcaaagtcgttcatcatacctccagttcacgttagtctacatggtacataccgctatcaccttcgacgtttttccaaatgaatccatggaagagatcatcgatcgtcggtggcgatagcgatgacaacgagctgtacacgggccattatagctttcgtttaattctttttctcaatgaaactattagattttcttgatgagcatgcatgtgcgctgcagttttcctgtaggaatgttccaatcgagaagaaaattaagtgctccggccggtcatgaaaacataacgttttagatatgctttttaatataaaaaaacgtcaatcttcaaaaaaaaaaaggatgtatgaaaattgtaggggtagattgacaaaaaaaatttcataatactgtatcattttaaaaatatagaatttgggagatgattttaaagattatgccgatgtctgaaatgttctgaaaagcagtatataggccagactagactagaattctagaaaggttatagaaacaaccattacaaaattttcattcatgatttgatcacctcacccaactctgtaaaaacaagaggaaattaattaccggttggtagatgtctgaagaagacgggatcgtcttcgttcaaaaagaagagaacgagatcgtccgtgacgtgggttattgccggccagctgaaatggaatccggctggtaggtgagctggggagatagattcatagatatccttgaatgcctcgcagctgctttggtgcgaccaggcagtcaggcacagagacgctgtgcatgttattaactgctcctgtattcgtccgcatcaacattcctgttcagttttcgcgttgcagtagcaggtgtgccttccagctgcaccggcaaaggtttcattgctcaattgctggttagttacaaggctaaccctagcttttactgataatagcatatatatagctaagtggcagatattactggctcttgtaccttcttcaaaaaccacaacaactgatgagtaatctgcttgcagatatgcagatatgctttgtaaatgatatatttaatgaaattgatttgaaaatatattggatgttggtgtgagtgcatgtgactaatatgggtcaagttgtgatatatgtatctagaaaatttaagctgattcggtaatataatgatatcggtttctctaaaaaaattagttttgtttgattatgtttaggtgacttgagatcaatcttggtcaatagtgatgaggaccgagactaaagctcagaactaaagctcagagagaagctgaggtttgacacggccaggatactatgtgataaaattagactagatttaagataattaaaggtcaacttcgatcaatagtgggatcgaaactagatttagagaaaagttgagatctatttgatgatacatggtgaatagtcatcgcgtgaaaaagttgtttgtgatgggcttcacatgtagatgtgcaagcgccggagaagtcgtggagaaattggttgagaaaaataggagaaagctaagagatgtgcggtgctgcactgctacagtagcttggtgtgcatgcatgggcgtgcggtacaactagttgatttgggggtatgtttagattactgccaaaaccaacctcatcgaaatttggtaatgttaactttttggcaagttagcataattgccaaattttgattggacggaataaatatgctctatcataatttatatgttaccaatatttagtaatataaattaaatacaactatatatttatgaatttaccaaatattgatatggtctagcaccaatctaaacaggcccttggttcggtggcttggctagctgggcctatgcaacgggagcggctgctggccgttcgcaagcgaggcaacaggcaagctcggctcggccaggaagctggtcaggagcgagcgcagcagagcgagtccgaaacggttgtgttggtttccagctttgcagaaagaatttaattttggaaaatgtaatggattttggaaattgagggatagagttaactggaattagaagttctactactactttatatgggagggttttatgtataaataggtgtgaggttgagactcagagcaattaagtagaacacgaagagagaaaagatagggtttactttgaaatttcgattctagtttgtgggttgagagagaggattgcgttcgatacacattgtgttttttttttcggcggtgcggcggcggcacaagcatataatccggcgataaacgtcggacggaccgagggcactagattggacggaccggcatctacattgtatggtcctaacttcattaggtcaaagatttcttttattaatataatggtttttgtgtttttatcattcagcctttctcaatttctctagtaagtttggtttttatatttgtttcttttgatataatagatgaaaacgcccccaatattcagcagtgtagcattcagcaacctaacactgattctacgaaaatgacgctcctatctcatattactatcctgcagatacgccgttttattcttttatcacattcttcatcaacgaaaatactgtgtccaaatagtaattttcccagcaggatcaatcgcgtcaaattgggggcattcttggcaacattttcatcctcgatctgttccagctccacggcaataaatacggctcatttccgaatgaatcggccgcagagtcacagagaggagtaaataaatactcacgaaagaaagagttcagagaaaaaaaaaagttgaaacgaaagcgaaacagtagctctctcgccgagacgacgccgctgtctccagaagctacgagcatctagagcggcaatggatcgggtcgaggaaaaggaggggaaccgattccaagaaccagcatcggatcggtgcgaagacaacgaagataaggagcaggacaactctgaagaatcatcgtcggtggaccagcgcaaggaggaggaagaagaagaaaaggagggctgtgaggaggccacgccagcggcagcggcggcggcggcggcgccgtcattcttcgcgcacccttgctcgctgctgcagtacatagcccgggtctgcgcctgctgcctcggcctcagcgattctttctgcgacccaaaggcaagctctgttcttgtccctgaacctgaacctgcagctgccgacccgtctcaagaaggagaagaggacatgaagagcagtgtaagtagattgctctgcagtttctgcaaagcatttcgtaatagttcagttaattctaacatatgagatgaaattggtgtagtatttctacatgcaggaggcgaccactcgggtgcgggcagcgcggctaaggccgaagccgccgggcaatccgagagaagggagcggcggcaatggaggacaccatcactaggcagcctgcttcgatcgtcgtcttcagtcttcagttgagctgtgtctacttgttctaagcggcgtgcttgtataaaaatgtggccgaacaagttctactagtttacgtggacttttgaggatctgaactttcagtgaaaacttgttcgagtgtttaattaagtcttttctgtatatcttatgtgttcatcttgccagttaactagtgttcagtctgtgtctcatctctcaactttcaactctcaagtatattgctaatgggtgatgctaagttgttcacggaattgaattggtcgcggtgcagatacgccaggaagaaagaagctaaaagtgatgatgtctgaatttgtgtcatggtatcatggatagatcgaaatgcagtgctgcagcttgcatactcacgccgctctagcatctagcaataacaccgcgcgatgggtttaattagtttgtggaattgctaaagaaaatcccagtccataacgatccactttctatatggtagagtactccgtattttttcgaaactcattttccaagatagcaacgaaatgcagcaaccaaaccgaggttaacttatactactctctccgttccaaaatgttcgacatcgttgactttttagcacgtgtttaaccgttcgtcttattaaaaaaaattgtgaaatatgtaaaactatatatgtacatgaaagtatatttaacaatgaatcaaatgatatgaaaagaacaaataattacttaaattttttaaataagacgaatgatcaagtaaaaagtcaacggtgccaaatattttgatacggagggagggagtaatctttttggcacagatcgagattggataggacaaacaacaccaattctcttccccgtgcactcaggttgaccggcatacgaaggcgcagccctgaactattcaaaactggaggacgatccgttcgatccatacttcccgttgcacttgcacagagaattaaactcacctggccaccaccgcgactccgcgaccgtttgccgtacgggaagtcatggctcctgcggctgcctaacctgcgaatgcttcccagatcggcatgcaggccgcccgccgccgccacgacggggagacgttcgtctcccgcatgcaaatatgcaatgagattattatgggctatactcagtatcaatcaagaagtggccccagtcggagagattatgctgcaggggatcggaagccttttttttttaagcaattttacggtaattgaggaggtaccatgaggtaccactttttttttataaatttggtacctcatgttactttacagtactagttattaaaattttacactaaatttcatggtatctctttaagtaccataaaattgctcttttttttttcgcggatacgattttggacctggcctaacaaccataataggccgaaatttccagccttcacgtcaagagatgtaaggcccgggagccgggacgcgatcgcgaggagcgtgccaccaagtctccggcctcaccagcgtgtggcatctgtcgccgcccggccgggtgcctgggccgctgcgacgcgggatgacgctgcggaaaatttttgttccgcgccactggaatactggattgggcagccacacagctgagagcctgagaacctacgggcttcgactttgtttacagtcagaaaccaaacgatcgacttggtgtgctaccgtcacggataagagccataagtcaccagactcagagtctcacagagcagttgaaaacctgcagggtactgttttgtttactgtcaaaaaccaaacagtcgagccaatgtgctaccaaggacaggatcacagaaaccagaatcaaaatattccaacaactatacgactcggaatctatggagtcgaatgcttagccaattcgccggaccagcgaagaccgccgaccagctttataatgagattgagaagtttataaaacagtaacaacaaacaaatgttgcggtgctactagggaacaaattcccccatcgccacaacctacaacatggtacatgcaaacttcgctgacacgaaacagatgaaatcgaaaaggtgcaggaacaccgactcgaacaccggcatcatggctcgatccaggtgagctggaacaccgactcaaacacctcgcggtcatacagcactggacactggagtgtagtggtcgtcgcgcgtgagctcgtcgatggcggagctgacggcgctcaggtagctgtcgcacgctttggtcttgtccccgtacgacacatccgacaccgtcacgttcctctggatgctctggatgtagctggcgagcggggcgcgatccaggcagacgtacacctcgccggcggggaaccggcggccggcggcgtcgaacggcgtggcgtggccgtagagctcggcgatcgtcttcttcgccacgccgggagagtgttcgtcccggagagacaggaaggagagggagcggagggccgggattacggccgtgtagggcgcccagctgtgcgtgcacgccatgtcgatggacatcctggggctgtagcctgggacgggaggcagcgaggcggaggcggcggctgcggtgcggatgacgcgaaggacgtagcggggaacctcgtcgcggctggcgctcggacgacgaggccgatttgcactggaacggatgggcgaggctggctcagcgacataggcgtcgccgccgtcgctgtagccatccagtgagaagtcactcatttcgcggccgctgagaaagataccaatcgatcgtctggataaatagcgcggcggacacgaagtggagtggacgaccttgcacgccgtccgaagtcaaccgtgttgtgtcgctgacaactgagatgtcaaaacctcgtacgtttcgatggcgcacacgtacggcacaccgattttgtggtgtgttcgataatcgatgcacacactttctagtagaagtatttcttttacgacagagagcgcggattaatacttcaacatagtgattacaatcctgacgaacgtacaaggtcataaatctccaaactgcacagtgctgtgcctaggaggactggagtgatggagaggaattcagcgaagagagagaaggggatctcaagttcatgacatattgacatggactgcatcgccgggagtgatcccttcctcgacagcacacgaggagaacaacgaatcaggccagctcgtgagctaaacgggccgccaatatgggccaccttggatgtttcggtacggcccggatttggacgattcgcaacgcggttcacctctatgctagtcaagcacccgcctgccactcgtcgcggttttactcggattttctaatttcatttcgagagatactgcagaacttccaacgaaatagttataatattagcatgatatcatgggtaccggatctgatatttctggtactaaacatgatacaccataggtactagaccagatctgttacctatactgatattatgatttgacattagtgatacccgtttttaaaaggaaaaaaagatgctaagaagaaacttagcatcaattattaagagagaagaaataatgagaaaacccagcgtcgaggggactagaacgtgggccaacgagagcacctggtagctccggatcgagatccggtgcggtcgcagtaacaactgcaactttagcagttgcggttcggtggatggatcaaaaaccaacggctcagatagctgcaaaatactgttcacaaattactgtaggggaatctttactgtagcgattgctgtagcgtcagaggtgcaacagggttgcaagcagatctgagcctttcacttcatcaatccaacgatcaaaacgtacaacgacagctaaagttgcggtagtaatatcaactgcaccggatctcaatccggtagctccctaccaccgggctacaacctcgttctctaatgatacccgtatgtcagttatctcgttggaatgatatatcgttttgtactattatttttttttatgatgtcaatactaaatagttgaattgataaatatgtacagttattgatcggtcgaccatcgttttcgaaaagatgttagcgattccaattgtttccactgtttacaagtccccgtctagataatttcatctgtacccaaaaggtccgaaagtctaaagcattactacctctgtctcaaaatacaataacttttgactatgattctaaacaaaattgttcagatttatagctaaaatgcttacattttgagtgtgagggagtatctatcatcccgccaccgatgggcagtttaagcacacgtgcactaatcaggattcgaagaaatatcacacacgcaaccgcattctcgccacagataaacctgtgctccacgattaattcggagacgaacctaggattcgtcgcactgtccagtagccactgtgtttccaggattcacaagccaacgcatcaaagctcaccgtttgctcagccaaaggcctcatgtcactgatgtcagcagtgaatattgtcgacgtcagctacgtcgctgtgccggcgacggccgcgctgccgccggagccaatcaaactcacggcgatggaagcgctgtggctccctttcccggtgctgcagcacgtcctgttctacgaggccgccggcttgacgccgttcgacagcgtcgtcgattcgctccggtcatccctcggcgcgacgctggcgaccttcgcccctctcgccggcaagctcgtccacctcgaggacaccggcgacgtcgccattgcctgctcggcctcggacgcggtgaggttcgtggaggcggagtgcgacgccgacgtccgccgcgtcgcgggcgacgaggcgcacgacctgcggacgttcgagcagcttgtgccggagctcgacatgagcaagctgccgacgtcggtgctggccgtgcaggccacgcgtctccagggaggcctcgcggtcggcgtgacgttgcaccacggcgtcgccgatgggaagtcgttctggacgttcgtggaggcgtgggcgtcggcatgccggtgccggggcgaggcgccggccgcgacaccgtgcttcgaccgctcggttatcaagtggccaggtggtgaggagatcgccaggagcgtgttgcgtaagtacgcgccaaacttgcctgaggtatgttacttcatgccggaaattattttgatctcgaggtaacgttcttgtcacttaaatagttgaatttttttaaaaaagatatatataaacatgtgatatatcactccacaaatatacaagatcaaatttaacttttacatctcgaaaaaaaaaccaattaaactataactagttgatatatatttatagtcaaatttgttttttttagatgtagaagttgatatcttgttgtttgcatggcacttaagtagttataaaaaaaattaagaagatgtattaatatgtgatatatcacttcacaaaaataattaagaagatgtattaatatgtgatatatcacttcacaaaaatacaaggttaaattcaacttctatatcttgcaacgaaaaaacaagttaaacttgattatttggttaaatttgttttttggtaagttgtagaagttgaatttgagcttgtatatttatggagtgatatattacatattaatatatatatatatatatatatatatatatatatatatatatatatatatatatatatatatattataaccatttaagtgacatgcaagtaaccctttcgtggggggaggttgctcactttttttttcttttcgatgggaaagtcataatgcattggttagcttaaaattaagaacacgtgcaatggcgtcgcaggtgtccgagctggacttgcttgtagaggaacgcaagcgtttcacccgccggacattcaccgtggacgcgcagcaactcgaacgcctaaagcagcgcgcatcacccgcgacggcgaagtccacggcaaaaccctgcatcggcctccatccagcttcgtcgccgtcgtcgcgatggcctcggcattcttcgcccgatgcaagaccaccgccgcggacgaggacgccggcggcgacgtgttccttttcttcttcgccgacgtccgcgagcgcctcgacgacccacccgtcgacgcgggatactacttcggcgcttgtttgacagggtgtctcgcgagactcccggcgcgcgacgtccacggcgacggggcactggcggccgccgcgtcggcgatacaggaagagatcctcgagttggcggaggacccgctcgccgggtggaatttcatgagcctggcgggcaagatcccctcggacagggtgatgaacgtgtccggctcgccgggattccgcccgtacgacgtcggcgacttcgggtgggggaagccgaggcggacggagccgatcaggatgaaccacgacgggcaggtggcgctcgtgcgcgccgccgacggccatggggtgcaggtctcggtctccttgctccaatcggcacacatggaggctttcaagtcacaaatgcgcctgctcgagttaaagtgatcagacagacagatggtacatgcgacaaactacagcgatgaaaaaatagggcattttactggaaaaaagtattaaacaccacatctaaaagtgggagatagttaaatatctaaaaaaaattaagtagttaaatatctgaaaattttaagctgtagaaatcaagtactatcctattccatccaaaatataagtagtacagtttttcaaggggcttttaactatttgccactcttacgagtggtgcttaacgatttgccactaggcccacacgttatagacacggtgtggcaaatcgttaattgccatatcacaagagtggcaaatagttaaatttcccgtttttcaaataatatatctagatatatgatttttaaatatatatgtgtatatttataggagtgagtgtgcatgttttctcaaaaagatatctagatacaatttaaaaaacacgcagaattagaacgaacggattaccttcgtttttggtttttaaatataaagtaaattgtattggtggtaaacaaactcataaggtgggtgtgattcagtatacaaatttgtagagtaattattatggtacacgaacttgtctggtggtgtttttttattttaatcccttcgtttttctaaccggataaggttcaacacatatgtttagcccagattgcattagagccacggcaacttaatttttttgtctatttggaggagcttctgtcagctgcagcttctcttagaatctctggctgatagaagatctatcaaacagtctagattttcacttagattttaaagagttttagtcgtagaacccagaaaataaattagaaatcaaatgatgggttctccagcacctccagattgtcagcggctgcttatcataacttccccgagcaggacctccgtcggcttgctgggactactcgctttcgtgggcctacttttccaggccgaagaacacgcgcccaagtttgctctagggcccaaaatgggacgagacgagccagagtgccacccgtgcttggagaactgcgcatgtctccagtctccgacaatctgcgttcatgcttcatggtatagccgctcgaccggcggtagcagtagctgagctgagtagagagtactctactactatatcttttataactctaatatacagtcaccagtgttttctttcaaacatgtaataccgagactttccctccaaagactggtctgactgatcggtcagactgaacgatgaactgctgtcaaaccacaagcatccggacggcctgaccatcaacaaatagtcagaaaccaatttagagatttcttggatttccttacttagacgagattttagactataattagttttttacacccaattggacatgggaaaaatcctaggaaacaagtccgcatttttataaatataaggggatcacgaccgactaaaagaacaaccaatcaatcgtcaaaatcaatttattaccatagcctctatattccacaccttccttctccttcctatctatgacaacatctattctccttcaattctaaattgctttatcatctctggtctctaggtctctacggcgttaaatgacgtcctagctgatttgtcgagtctaggacaaaccagcatcgcgttccctctaatagggcttttccgtttgttggttcgatattatcttacaacttcttacggtagcatatctcagggtactaccgtgagattgcacataacgtgttcaacgtgtagacacgtgatttggtgccgacagatgccattttcctacatttcgccttcgacaaggacaccccttgcacggagctagtaacgctcgcattaatatttaattccgcaattagccaacgattcacgtatggctaattattgccggctgctagctgctcctccgtggctccagttgctgctgtgtttacacgcaaaaaacagcggaagtgtcgcaggcgggagagaggatcgctgctaccatctcgcatgtgaaaatagaacatttttgcagtcgcctccttggcccgcctgcgaaaataatctcagaaaaattaaaaaaaaccacggggcaccgccgccagcctcaccacgagcgctgccggcttgggctcccctccgtccgttgccgttggcgccgccatcgtcgtcgtcgtcgcgtcgatgaggagagccggcagccggatgcgagccgtcgtcgtcgcccgtcgtggccagtggcggaggtagcgaggaggaaagccgacggtggaggaggcgagccgtcgtcgtcgttcgtcgtggccggcggcggagggggcgaggagggaagacggcggcgcgcggatctggagagccgtcgtcgtcgctcgtcgtggccggcggcggagggagcgaggaggggaagcggctggcgcaggcggcgaggaggaagccggcggcgcgcggatctggagtgccgtcatcgtcgctcgtcgtggccggcggcggagggagccggcggcgcgcggacgtgggagaggagggagccgtcggcgaggagcgagccggcggcgtcgcggtcgtcgtcgtcgtcgtggccggcggcggagggagccggcggtgcgcggacgtgggagaggagggagccgtcggcggagggagccggcggcgtcgtggtcgtcgtcggcgtcgaggagggagccggcggcgcgcggatgtgagagaggagggagccgacgagtttttctaagtgtgtgtgagagagaggagggggagggaaatgagtggtggagaggagaggataaggatgattagattattttagtaggtaggcggaccacatcgcaggcgccacttaagtgatttgcagttcacctcgatttatattttttaggtgattatttggctcaaagagtcatgtgactggaaaaataaaacccacatcggggaaaatgcctttttctagtagtgtgcgataaaccagcgcctgcgtagtgcagagtccaaagcctcatgtctgcagtgagcatcgtcgacgtcagctatgtcgctgtgccggcgactgccgcgctgccgccggagccgatcaagctcacggcgatggaagcactgtggctccctttccccgtgcttcaacacgtcctgttctacgaggtcgccggctcgccgccgttcgacagcgtcgtccggtccctccggtcctccctcggcgccacgctggcgagcttcgcgccgctcgccggcaagctcgtctacctcgagggcaccggcgacgtcgccatcgcctgctccgcgtcggacgcggtcaagttcgtcgctgcggaatccgacgccgacgtccgccgcctcgccggagacgagctgcacgacctggcgacgtttcagaagcttgtgccggagctcgacatgggcaagctgccgacgtcggtgctggccgtgcaggccacgcgcctggagggagggctggcggtcggcgtcacggtgcatcacggcgtcgccgatgggaagtctctctggatgttcctggaggcgtgggcggcggcgtgccgcggcgaggcgacgccggtcgcgacaccgtgcttcgaccgctccgct

SEQ ID NO: 25114 - DNA, 13961 bp, Oryza sativa
atttaagaacacgtcgaccaccatttgcgtcgtctcaggtagccgagctggaaattttcgtcgaacaacggaatcggttcacccgccggacgttcaccgtggacgcgcagcaaatcgagcgcctcaagcagcgcatcgcccgcgacggtgaagcccgcggcgcgccactgcgtcggcctccgtccaccttcgtcgccgtcgtcgcgacggcatggacgtgcttcgcccgatgcaagaccaccgccgcggacgacggagaagtgttccttgtgttcatcgccgacgtccgcgagcgcctcgaccctcccgtcggcgcgggatacttcggcagttgcctgaccgtgcgcgtcgcgaggctcccggtgcgcgacatccacggcgacggcgcgctggcggccgcggcgtcggcgatccaggaggagatcgccaaggtggccgaagacccgctcgccgggtgggatttcttgaggctgatggagacgctggtccccgtcacggagagggcgatgaacgtgtctggctcgccggcgttccggccgtacgacgtcggcgactttggttgggggaagccgaggcggacggagccgatcaggatgaaccacgacggacaggtggcgctggtgcgcgccaaggacggccgcgcggtgcaggtctcggtctccttgctccgatctgcacacatgcaaggtttcaagtcacaattacttgagttattgggatgacagatacattcgattaattatacttcctactcctcattttaagtgcaactatgagtttctgtacccaactttgacagtccgtcttattcaaaaaaaatttataattagtatttttattgttatgagatgataaaatataaatagtactttatacgtgacttattttttttatttttttttcaaaaaagacgtgcgttcaaagtttggcacggaaaatcatggttgcacttaaatggaacggagggagtagtaattttcgctgccatatggacgagagagagagagagagcatgtttaatgaacagtgctaaatgatgtgtttcgtaaaaatgtaagaagtactccttccgttttaggttataatacgttttgactttggtcaaagttaaactgttttaaatttaactaagtttatagacaaatatagtactagtttcaaatttataatacgttttgactttggtcaaagtcaaactgttttaaatttataatattaaactagtttcatcaaatcgataattgaatatattttcataataaatttgtcttaggttaaaaatgttactacttttctctacaaatttggtcaaagttaaagtaatttgactttgaccaaagtcaacatgtcttataacctgaaatggaggaagtataaaagttttttttaaaaaaaatctattttttcaagtttacaatagttgatagttaatatatactgtatagtaacccactaactttaaagcttaacatacaaacatgccatatcatcacccactagcaataattatatattcaacctcatacaagcatgcaacatcaggtacaatttatttaattatacgaatcaacgtcatgcaaacatatccaattatcactcccttacatcatttccacaacatttttataaatctatctatcatttttataatatttaaattaaattaacttatcaatatgttccatattaaagcgggttttatttgtttgtttcaagataaatattaataagctctgttatttcatgtattttctttttacccctagcttgattgtaacaagaaaatatatattgaaaattacttagtaatttccgtagtaaagcgcggggaatcatctagttgattactactgtgttaatgacccgtcatgttttcaatgctccaataagctcaagcccaacctcgcaattaaacggtggaaaactgcgctaagcttttgcagagatgttctcaatgataggaaactatcttaatcttttgatggaatgtcccctagcccatttgtttaaataccatctaaatagtttgaaaaaactcaataaattgacaatattcatacgacacagtacgtatatcactttataaaatctaaagtttagacttgacccacacatccagaaatcagagtatgaaacagtacagatagtatttacatctggattatcttttatgtttctttggaatgagtttggtttaactttttttttcgaggtggtttaactttttttaagcgatagatgtcgctatatatagactctacattataaagaaaaagagtttcacaaccatttgtgttaagtttaattgaaaaaagtaaataagtgattagaatccatttccgctgaacttacggccgaaagcatgtttgtttgtgcgcgtcacgttttattctgttcgatcacgcgcgccaatcacaaacattctttcgcattatagtacaaaattctgagacttaatagtattgaattctctttaggacgaagtagtttaggagttgttgagtttagggatggcaattgcccatgggtacgggtatccgcggataccgacccagtgggcaggggtggagccaggtgtggggcagcttgggtctgggccctacacctgatagaaaaaataccaaggaatttgctaattttcctattaaaattcgttcaagaagttcatactatagtgattaagccctactcttgacatgatcttggctctgcccctgggcgtaggtgtgattttttacccatgggcacgcccgcccgaaacccgtagacatgtgggcaacagccaggtttcatttttgcttgtgggtaacccatgcccgacccgatacatatgtattagctaatttcgacttatctcttaattcttatacccatttctcttggttcatttgtgatactaactaataataagttgtgatgtaattcaaattattgttgataactaataatttggtaaattgttgattttatttctctttgttaaattatatatctttcgagttattattcatgtgagatccattgggtacccgccaggtatatccatgcccgtcgggcatgggtacgggtatagagttttgcccactaaccttagtgggtagggtttgggcgggcaacgacgggcatgggttcgagcatggttttgctctacccatgcccgacccgacccgttgccttccctagttgagttgcagggacctaatcacaaacacgtcgtcccaaaataatttgtcgaggtttgttggtaggattgaattcttttcagaacgagtagttcagttgcaggggcctaatcacaaacacgtcgcccctactctcgctgtcgtctcgcccattgattttctgatacgcttcagcatcgtgaacgtacctgctgagtgttactacttcttaaaatatatataaaaaacctggttgaacaataaatataaatttcttttggttgaaaaagacacgttccagcattataaatctaaacataaaaatcttaatagtataaatctaaacagattttctacgcagagattagcagtactatatgttcctaatatctcttatattttgattaatcgctctcgcggcagctgatacagccctgctcactcaccaccattgtccattgtgctagtacagcaggggagaggacggatgtcggctgctgtgactgtgcgtgtcgtgggagtcagccatgtcgctgtaccggcgaaggctgcgctgccgacggagccgatgaagctcaccgcgacggaggcgctgtggctacgcatcccgctcctgcaacacgtcctattctacgagagcgccggcagcagctggccgccgttcgacggcatcgtcgactcgctccggtcctccctcggcgcgacgctggcgaccttcgccccgctcgccggcaggctcgtccacctcgaggacaccggcgacgtcgccatcgtctgctcggcctcggacgcggtgaggttcgtggaggcggagtgcgacgccgacgtccgcagcgtcgcgggcggcggcggcgacgcgcccgacgacgacctgcggttgctggagcagctcgccccggagctcgacatgggcgagctgccgacgtcggtgatggccgtgcagtccacgcctctggtgggaggggtggcggttcgcgtgacggtgcaccacggcgtcgccgacgggaagtccttctagatgttcgtgaaggcgtgggcggcgtcgtgccgcggcgagacgccggccgcgacgccgtgcttcgaccgctcggttatcaagttgccggatggagaggcgttggccaggagcgtcttaaggaagtacacgccgaacttgcctgtggtatgtcgggaaatcattttacggatttgctaaataacatgcgagaaatttgaggatgaaatctcgtagattttagatcgtcggattcatgccaagatttgtaaatggacttctttatttctaatcttggtgagcttttttttgtttttttttttgggtaccggcgacatcccaactctttagacgacatacagataacgggttgggttgtgataagatgaggagagaggagggggatgatgatgaacatctaaccgtgcgtgggtgtacccgtggagtcgtcccctccacacacccttccccacgtcctcctatatacgtgcatgtatgtatacgcatatatatatatatgtacaaagtttatacgtatatatataaactttaaagaaaaaatatttcgtgtgtccggaaactgatcgcccatgcccttccctgtgtggctgatcaccacttagcagtttcagaggggaggaggaagacagggtttacatgcgtttaaaggaattgttgtgggtaacagaagatcgattggaaatatacaggaaaatgaaaaatatagaaagagtggcatggctattccaattctacaggaaataaaaacacataaatttaaaagaggtataggtgtttggctactccataagaaaatcacaagaattaattgtgaagaaaacgtttggctataatagataaataggcatttgccttgggcttaaggggattgtaaataggcatttgccttgggcttaagggaattggaaaacatgatcttttatcaaatgttttcagttttccaaaaaaaaataaataaaggaagtaggaattttggaatccatttcttaccatcaaaaggctccaaagaaaaaaaaatgggatttcaattatttcaaattcgttaaaaaaattctttgccttcaaaggagcctaatctgaacgatcattgcacattagtccgaagattttggaatgtttaaatggcaatatcagttgttaacaatctattgtttcgctgcttatacttattagctaaaatttaattttagatttgtttttcaatcactcaagatacttaaatagttttactaataaattgttttattattctttggttgctatttgctagtaagttataaggataagcataacaaagtataagcgaaccaataaagttgttaaagtctactaataccaattattgcatcccaataagatatgcgaatggggtgctaccgttttctagagatttttttaatcctttttattttctaatttcaaaaataaacccattcaaaacttatttacaagatttggaacttattgaccatgccagccggactaacgtagcaaaataatactgacacactggtctaaatagcgtgaagacattgtcttacattgacatgttaggataaaactatcacgctcgttgtagatgatatgtcagtgttgtcttgccatgccaggtaggttgatatggacaaaatgtttaactttaaaataaatttttgatgaatttatttttaaaataaaaaaggtttaaaagtgaaaaaaaaatatcgtttttggatgttgccttgataagaatacgtcgacatgacaaagcaggtatcgccgtcggcggcgccgccatcgagtggagaagaaagcaagtggtactcccgccggacgttcactgtgggcgcggagcagctcgaacgcctcaagaaaccactggtggagaaaccatctttggtcggtcgaccaaatctcacaatagtcccggttccactaaaaaccgggactaaaaacgatttttagtcccggttaaaaaatttttgatctttaccaaccgggactaaagatgatttttagtcccggttcatcccctgtcagatgtatgtcatggggtcgaggatttttagtcccggtttatactaccaaccgggactaaagattaccactttagtcccggttggtaatactaaccgggagtaaagatctcttgtcacgccccgaactagtaccgaccggaactagcccgtgacgctccaaattaacctgttaatcgataccagtcccaggaaacagtgctggtatcacagggagacagaatatcacagcaacagaggtctctttattatagagtagaagtacagtcatgttgggctgcggacagatcccgagctcacaactgcattacaaaagggaaacggaagccatgacttggaccaaacatcacaggcgcgacttgggaactaggccgaaaccctaaaactcatcgaagccggcttgctcctggaagaactcctcatcagcgggatccgcttcatcttcttcagcaactgggggggagattatttatatagagcatgtcacaccccaatctgataccgccgtataacggcacctgataggagcgtgtcgtagggaaaacggcgcgaaccgcttcctacgaaaccgcgatctcggtaccagtcccaggacatagtgctggtacccacggtgacaaatatgaatcatagcaaatccttaaaatagatagaggacttatttaccttaacttaggttgcagctcagaacaacccgagaatgcaaccgacgacacggacgaggaaacaccaacaacagcagcagcagcggaaccaacgaactaacacccaacaccacaggcgacggctgggaaccaggacgaaaccctaatcttcacttcaccttatcttctcttcagggcggaggaactatgtatatatttatatagagcaagggtgagtactttcgcactcagcaagtcacgggaacttaggtgtttaatgcaagcttggaagagaggcaaggttgttttgcaaatcttttatttgaagacattttgaaatcactaagtgatttatttctttctatgtttgggcgaaaagagacttgcgtctcgattcgactttaagagatgcttttcaacaactcatttagcaatgtaccgacctcccgggtcagatcattacttctcggctcccagagccattccacttgattaatcggctcccagagcctttttcattttctcggactcccagagtccagctgcccagcagcacaacaatccgcttccactcgggaagcctagtctatgatgcccgcagacatcccgaatcacacagattcgtttctgaccactcaggtcgtccatctgccacataggctgattctggttacgattcccacaccacaacaacttttcacaaagcacaggcaaacaaatctacgcaacgggaaccacctcacatccgcccatgaccgtgggcacggctgttcgaacagttagttaacctctgcagaggggtacactttacccacaagacacgaacttactctagacactggccggtgtcagaggttcgcgacaaagcctttccccagccgacccagggttacctcatgccacatagaaggatcaaatcctctcataaacataggcctttttaggcgtgcacaaatcaaactccaaccaccttgatcggtaagtgagcaagcttctcgttcttgccttaccaggaacccggtttgtccgaccccgccccggcgttcccaactattggcatgcgaggtttccctgaaccgtctagttacttagccagggtgtcccattccaccttgtggttgcacttgattatgttcgatgagtttcccacaggaatcggtccttatatgcgaatacgggacagtgccacataggcacaacccccgcatcgcgagttttcacaattcattttattttcaaacacaccgacaccacatgtcgggttttgaaggcttcacaaacccatttcccaagttttcgacaagcaacggtgtatgtgggatatttggtatacgcgctcagagagcacgaataccgaggtaccacaagggtggagcgacaaggaatcagggtagtacgacctacggaaattagtgtgactactgggtaggtccgtcggtctggcacgcaaaccgaggccaagcaagttaagtgtgtgattccactaatgcaagttgcaaacaaaataataatgacttttcaattataggggcaattgatcaaagggtgacttgccttgctcaaggtcttcacgaagcttcacgaatcttcaagaaaacccgcgatcgacgaaaatccgataaccgcaactatacgcaaacaatcgaaaacctaaacaaaagaccaaaggaaagatcctatttagactaattattagtgccattaaatagatctcaattttacggaattactggaagtggaacggagtcaatcggatgagcggttgggaagatatggattttctaaggtttaaggattttctaatcaaagaagaaaggatttaataatttattaaacccctttctggaaagagaattgaaggagggatgtaaactagacttgtttcggtggcattggcgcggcccaagggtcgaaggaggctcggccaagccattgggccgacgcgggcgcaaacaggcggcccattagggcgcgcgggagggagagggggcggtccggtggaccgagcccaccacgcggggtcccgggtggggcccacttgtcggtgatacggcccacggtgggatgggcgcacgcgagggcggcgctagggttcgggggaaggcggtccacgcgcggcgcgcgggtggacgcggtgtgcggtgggcccacgcgcagcgtgtcggctctccgtggaccgcgcgcgagggtgggggacggagggaggcggctgaccgaggtcagcttttgacccggtcgcgtcgaggtggcgccgacgtggcagccacgtcggatggggaggcagaggaggccgggcaggctgatccgacggcttacggcgtgcggcgggatccggcgaacggcggcgagccggaaggggcggctagcactggcggcaggaggaggagaaggggaactcattccacggctcggatcaggaagaggacgtgcgacgacggccggcggcggcggccaatctcgctggcatgccgacgtggccgcgcgcgaggagagcgaagggtgcgcgggctcgggcttagccgaaccggtacggtgttgcgacgcgcacgcggtgacgcgggacccgatggtcaccggcggcgcacgcacggcggtgttatgcggcggcggaagcggcgacacggcgcggagacaaaggagaaggccgacggccttggggcagccagggggaagtcaaggggatccccgggggcgtggcggcgagaggaatcgacgcgagagaagccgacgatggcggattgcggcggcggcaatcaccggagagcaaaaggggaaaacacgacgagacgacgagggttcgattcaaagggatgggagcatctccggggttcaaggaatccgttcccggcgtcggattggacggagcggcaccgaggttggctggcgacgagagacggcctccgggacagagcatggcggccggcgagctagcgtgcggtgcaagggcgacgagcggcgattcggcggcgagacctggggcagtgtccatgcgtgttcggggggctagccgagctaccacgtgagctagggagggagaggatgagcaagaagggagaacggagggtggcattaccaagccgagacgggcgcagtgacgagcggccgacggctcgggagcgagctctccggcctcgggccgaggaaggggaggaaggagggtgcccggagtcccgcgtcacgcgtcctcgcacgcaccggtctcccggtgctcggcggcggacggcgacggcgagagcagaggaagggcgacaatggcgcggtggagtaggagtgtgaagtgggagggattgagatgggatggtgagctcggcttcgggttttataggcgcggggtgaggcgatgtcggtttggggcggaaagaaccgaccttggtggtcaagcgctcggctggcggcagcggcggtttcgtgggcgatgcgaaagtggcgacggcgtggatgctttgggcggcgaaggcggtggatcggacggccgaatccgaaccacgggagcgcaggctggcgcggtcaaggtgggggcggcgagctggcggtcatcgacgcgtgcggccaagtcggcgacaggtgatgacgccggcggtgtcgggcaaaaggaaaaaggtgggggaaaagggagctctgctccttgctgtttcgggataaaggaaagggagagggagcgaggccgagggctctgcctccctcccttggacgcatgcgcacaggcggggctgggcgacgcgcggtcacgggcggcgtcagggctgacgcggcggcgaccgagcagctggcctcgagagagcgcgcgcgcgcgagaacgagcagcacggccgaaaatcgaatggcggcagcgggaaaaatcggtgatggcggcagcgctggcgttggcggcgaccggccggtcggccacctcgcgaggcgcgcgcgggaaagggcgaaggcggtggaggttttgggcgacgacggcgggaagcggtgtcggcgcgagagagaacagagagggagcgagaaaacgagagagaaagaagagaggcgatgcctctctctctcggcgcgtgcagcgcacgtgcggggaggaggaggagcagctgagaggagatgggccgaggagaaaacggcccacaaaaatccgagggaggcaaaaatagactttttcagaggagattgatttggagagaaatggagagatttagggtttgggttcgaattcaaatttgatattcaaactcgagggtttagggatgtatcaaggggaattcaaggagaagtcatgggaaagattcaaaaggaatacttgggtatttgttctcgggaacataggggagtcaaggaaggaaacaaaacgggggtttggacattttgggatttggaaatgtgtttggcgaggattcaaaggaagggattgactttcggatttagatttcggagacttgaattgggagaggagatttgaggcggaggattttgatttcgatgagagggaacaacaggatttgaattgagatcttggcacaacttagactcgcacacaaagaacgaaaattttcgcaattaggattttgccgaaatagtttttaacgactcacgaaaagcggagcgttacagagcaagggtgagtacgggagtactcagcaagccaggggaaataagtgtttaatgcaggcttcaaagaaaggctggtgtttttgcaattgattttattcgaactcttttctgaaacaactaagtgagtgcttctcaaacgacacggatgagacagtgcgtctcgtccggtcggagtatgtgcaatgtatcagtctttagaattgaaacaaggttggcacccggccaacagcttttcaacggccacccgggccaacaacttttcaaacggccacccgggccaacaacttttcaaacggccacccgggcctagctgatcccatcagctacagatttttcaaacatcgaaccccttttctcaacagcaatttcacaagcagtagtcaaacaaaactacgctaggaatcacctcacatccgcccatgaccgtgggcacggctgttcgaacagtttgttaacctctgcagagggggtacactttacccacacgacattactaacccggatcacccagcccgtggaaatcagccacgtcgggggacctccaagctttcatgacaagacatttcgaaaaccgacacaggtttaccatatgccgacgagaggggtcccagaccaacaacaggttaggtcccagaccatactgtgccaggaagcccaggggtcctccccgacaccaccccggcgaatccacatgtctctcggcatcaaggctcccctggtaaactagttactcagccaggggtgtcccattccacccatgtggtcgtacttgtcttatgtttggatgaaattccaaggaaacggtccttaagtgcaagagcgggaaaccgtacacccggtacgttccccggtccgcggttttggaaatttcatttagttcacaagcaccgacccaggtgtcgggttttccaaatcttttgtaaaacccaagttttacccaagatgtttatcatattttaagtttgagggcgaccgtcgatactcgcacagagtgctcgagtatcgaggcgcaactggatggttacaaggggacatggtataacaattagcaatggaggggtcagatgcaacaagttaggtaggtccgccaaactgtcatgcggacggaacaagcagattaagtgcgatcctatcaatgcataatatttttcaagcaacataattaaattcaaatataggctcaagatgttcaaaggtggcttgccttgctcgagatctggagcttgatcctcgaaatcctcgcactgcgggtcttcgggctccgaaactacacgcaaaacgggacaactcaacaaacggcgaaaataaagccttattaatgacctctaagcgtgccattagatagatctcgggatttgaggaattttgggagttgaacggagtcaatcggatttacggttgggaagatattgaatttctaagattattggatttttggtctaaaggaaaaggatttaattaaatcctttttggaaaagaaaataaaagaaaagaaaggagggagggaatacagacttttctcgggcggctagggcgcagcccgagagaaagagcggctcggccgagcttaacgggccggccggcccaagaaggcggcccagagcggcccaagatgcgcgcacgcggaggaaggagagagagagagccggtggaccgggctcacctcgcgcggtcccgggtgggacccgcttgtcagcggctcggctcaccgtgcggagggagcacgcggcgcggcgctagggtggaggatggacgtgatgcacgcgcgcggttcgcggtggacgtgggtgcggcgggtccacgcgcagcctcacggctcgcggtggaacgcgcgcacggggagggactgaccggggtcggctcgacccggtctaggctgagctggcgccgacgtggcgcctacgtggctgccacgcgggccggcgggaggtagacgacgacgctggccggaacgaacggcggtcgacagcggcgagcgacggagcgaaccacggcgatacgggcaaaagcgagcacaccgggcggttgcacgtgacgaggggagacgaaccaacggctcggatttgccgggggttgctcgacggcggcggcaaccggcggcgggagaagggggaaacggcgacgaggtcactaggggctaattcccggcggcgagagcatctatgcggttacgggaatccgatgctagcgtcggattgggcggaactacgccgagcgaggccggcgacgagcggcgcttccgagctcgggcggcgacggcggcgagcacacggcgagcgacggcaacggtcggggcggcgccggctaacttcggggaggctactcgagctactaccgaaagctaagggggggagatggagcgaggaggaagaacggagggaggcactaccgtgcgggacgggcgcggtgacaagaggccgacggcgcgggagtgatctctccggcctcgggccgaggaagaggaagaagagggcgcgcccggagtccccttccgcgtccacaaacacaccggctctcccggtgcttgccaatggacggcgga

SEQ ID NO: 25115 - DNA, 5668 bp, Oryza sativa
tcggcccatcgaacccgggggaggcaaactaaacttttgcggagggatttgatttggaaggatttggattcggaattgaactcgacgatagatcggggattgagatcttgagatggcacggacactagacaacaagcaaagaaacaaatttcgcaattaggatttttaggagataattttcccgctaggcgccacgacggaacgggcgctacatctttagtcccggttggtattaccaaccgggactaaagatcgatctttagtcccggttggagttatcaaccgggagtaaatatttctctcccacatctgatcggttaagtcccagacagatatttagataagattggaacatccggatcccctctcttcctcttctcagatccaatcctcttcctcctcccatcccctctcttctcctcctccccttcctcttctcctcctcccctctcctccctcccatcagccggcccttcctcttcccctcaactccctcttccatcagccggccggcggcggggaggcgggcggcgggtggcgacggcgcggccgcgcgcggggaggcgggcggcggcacgcgcggccgcgggcgtggaggcgggcggcggcgcggccgcgcgtgtggaggtgggcgcgcgcaggcggccgacgggcggcggctcagtttgcttctttttttttttgtaatttgtgtttcactagatgtatatttttttagattttgtgattcattgcatagatgtataatttgtataatctgtgatgtatttaatttgtgtgtagttttttaggatctgtgatgtatttgatctgtgtgtagaatttgtggtgtatttaatctgtgtatacaagtaacttaatatttgggatgttgatttggggatgtgcatcccatttaattcgggagaaaatatagggattaaccctagccattagcaaatcaacaataaaataaaaaaagtatctcgaggaactgtcgcttcccaccaaccgggactaaagattccctctctttactcctccatcttatcgatttttagtcccggattcgtagtgaggttctaaaccgggagtaaaaaatattttttcaccagtgaacgcatcgtccgagacggcgaagcccacggcgcaccaccgcgtcggccaccgtccagcttcgtcgccctcgtcgcgacggtctggacgctcctcgtccggtccaagtccaagacatccgccgcggacgacgccgaggcgttcctcttcttcttcgccgacttccgcgagcggctcgaccctcccgtcgacgccaggtacttcggcacgtgcctcaccgggtgcttcgtggcgctcccagcgcgcgacctcctccacggcgacggcgcactggcggccgccgcgtcggcgatccaggaggagatccggaggatggcggatgacccgctggccttgtgggatttctttagcctgaacagcagggcggcctaagagaaggtggcgaccgtgtccggatcgccggggttctgcccgtacgacgtcgctgactttgggtgggggaagccgagatggacggtgccggcgaggatgaaccacgacggccagatggcgctggcccgcgccggcgacggccgcggggtgcaggtgtcggtgtcgttgctgcaaccgaaacagatggacgctttcaagtcgcgtttcctcgagctactgggataagatgaccgatagttcatgccatctaggcatctagtactagactcatattatgcatatcttattttcctctactgcatggactcaagacaatatttggctggctggctggctcaccctgtttgttatcctttcatggacgtagtataataatgagataatctcatgtttgccgatgtcttaagtatataatactacgtctgttttttaatatatgatgccgtcgattttttataaacatttggccattcgttttattcaatttttttacaaatataaaattaagtcatgattaaataacatttgacgataaatcaagtaaaaaaaagataattacataatttttttttgggaaattacataaatttttttaataacataaatggtcaaacgtataaaaaaatcaacggtatcatatattaaaaaaatgtaaagaatagtaatcagtaaacctgtttttcccggtgaatataagggcaaactactgtcacggttcgcacttcgcaggctggggaaatgcgaggaacgccgattggaaggccgcgtgaactacttttaataaaggcccacttaaaacaaagttggcacaacactattcatttactctgggtgttggatgcgggccaaagttagcccaaccaaacagcttgaagtggatcttgtacttttgtggataggaataagttcatctgagatcccttaaatcgattcctcaccacggacgtccgtcctggaatccatggcgctgcggcgtttcgccgtcgccggccgcgtcctcctccaccgtgtggaatcccttccacctccgcgcccgccgctcgcgttcctctcctccgaatcccgcggccacctcgtccgccgcttctccaccccctcttccaccccaccgcacttcatggtccagtacctcgtctccaagtgcggcctctcgccggcggccgccgccaaggccgccccgcggttcgcccacctcgactcggcgtccaggcccgacgccgcgctcgccttcctccggtctcagggcctcacccgcgcgcaggtccgcgaggtcgtgtcgtggaagccggagctgctgctcagcgacgtcgacgccaccctcgaccccaagttccgcgccgtccgcgcgctcggcctcggccgcgccgacgtcgcgcgcctcttcgccctctacccgccggcgctcacctacggcatccacaccaacctcctcccgcgcgtcctcttctggatcgacttcctggggtccgccaagttactgatgaaatggctcgccaagacgtggctgctccggtacagcgtcgacgccctcctccgcaacctctccacgctccgatccctcggcgtccagcagagccgcatcaccaccacggtgcggatgcagccgacgctgatcacgcagacgccggccaggttccagaagctggtcggccgcgtcgaggcgtgcggcgtcccgccaagctccgggatgtacatgtgggccttcttcgcgctgcacaacgtcagcgagggcagcttccgtgccaagaaggcggccgtggtgggagccgcgggctgcacggaggaggagttcgacgccatgttccgccgcgcgccgtgcctcgtgttcgtgcccgcggcgctgctgcggcggaaggtggagttcctgatggcggaggccgggtgcgacgcgacgcacatcgtcaccaaccccgtgctgctgacgctgagcctcggcaagcggatggcgccgcggtgccgcgtcgtggaggcgttgcggtccaggggcgtgggcatcgggaagaaggcgaacctggggagcgtgatgagatatccggaggacaagttcgtggagcggtacgtactcaggtacaaggaagaggtacctgaactcctcgagctgtatcctccccgactttgcaagggaagctcgcagacacggtgacatttctgcgaggttgtgttgtgttacatccataggttgagcttgttgttaagggtacattattattgaagaagtgtaaaacattcgattctgaaatatctacccatttcgtgtttcacatattgggtctgtaaaacattcgattctaaaatttctgcccgtttcttcgggttaattctaaaataattaacccttcttcttttgggggagatagcaggtgtgagtgtgtgactgaccagtttcatgtcatttgtttcaaattcatgatcaatcttagataatttaatctttttcatcataggttcattgttaccgtcgcttttacacttttcgatttgaggttgctcttcggactttgtgggccatgtggcatccggccattttaaggatggagttccccctggctatattcaggtattcattcagctaaccacaatatgtccaaataatgtagagtaacaggttgaggaacgttcatcaaacaagctgcggtgtgtagtagcagagtcagacataagcagaattggtcagctaacctaatactacatcagcatgctaaacaaatcttataaacaacgcatgcctagtttttcctacttccctccaagagtccagtctccagattactacacgtgacacaaaaatgacattcctacttggaagaatgtggaagtcaagctattcagcctacattgtacagtgccttcgctgcagactgctcattgccctggttagccgaatggttatgcatgcctcccggacaccagggcaaacctctgttctggcagctcataccagctgagaacatatttcatcgttgagtttgaagcactcccgagatgcaactatgcagccttaggagttaattggggaagagtatggcaacctacttggctgcataccaattctgcgcacacttggcatcaacagccagttcaacattcaagatgttggtgccgtagaagggcttggacatgcattcaaccacaatcgacttggccagatcggcagattccgtaggcccttccagtatcacttcatcgtgcacctgaaagacggagctatcagttctgcaaggtgttacacctaacggataaagggaaaccagataatactgcgaacctatcaagaaacaatttaagatccacaactagccattaatcatgcctaattgttttgtacctgcaagagaagcctccaaccgagttccttaagacgagcattccgatctatctcgagcatagcacacatagcaacatctgctgcgctgccctgtgaagttacaaaacactacaatttcagcatagaagagacactaccaagcacaacttttgagttgtcatagacggtaatgacctgtactggtgcattgatagcagctcgctcaatgtgacccctttgaccagaagttgcatgagccatgttaggaaagcggcgcgaccgcccgagcaaagtgtaaacttcacacttctcctgcgctaattcttttgtttcatttgccaagctaaaacctcttttctatccctgtaccagagtttcagggtatcctttgcttccttgacagagacctgccaagggaagaaattatagatgtgcagtgatctttgaaaacagcgacggaaagtacaggggactgcatctttttacattaataggagagcagttgtacaatgcttcaacagtaaatctaacaagtatgactaatggtcatgtgcaagctgtttatggttcccagatggtcagtcaaagcgggtaacaagtgaagtgcgtacttaagctagtaaagaatcaggtatgttcataacaagttcataccttccaatctcgagcaagcccaacaggtgtttttccatatgcaatggagaaattaagcattttagctttccgcctctcagcaccaaaggcatcctaaatcacaaatagaacatataactttatttgattctgcataaatacatgactcttaaaaatactattggagctgtggtaccttcaacaagggcacaggaggtttctcttggccaggttgaggatgccattcaagaagtactttctttt

SEQ ID NO: 25116 - DNA, 8280 bp, Oryza sativa
cctgtaaatttggtgttcttgctgacagacgccctgtttctgtatttatatttaatgaacagtggatccgcccctcgtcacatgatatatgattcccctatcaaaaagtaataggagataaataacattaagaactggacatatagcttaaggttatggtagttgatggtagccactcaagcctaactgctacagatggggtcagctcactgctcacctgtaagggaagaataaagttggatatcaacgagtcaatagaacaaatctcacagagagccgcaatggcatggcatgcttcctttcctttctttcctcctccaaatgcttcatatgcagttccataagaggcagtgtcgtttagatcatgctcagaaatttctgaatcaccactgtcatcatcctctacatcatctgttgtgtaaacaagatcagttggcagtttaccagccaaacttctcaatgcatctccacttactgaaggccagccacttgcagtaaatagatcagttttcagatcttccacaatgctgaaaagttcaatagtacaatactttggagttttcttgccctctgcaataaggcttccatcatttggtactttaatagttctactctttggcaaagtttcaccaggtttgcatctgcacatatattaagagcatcaaaacttctgtgcaagaaatgtctacaagagataaaaaagaaaaggacagaaggttccatttaactcttttgtttcattgatacatggaaacacatattatacctagttacaatccaagacccaaaacatatgaactacaaaagtttctactttctacaaaagtttctactttctagaatagtaggtgaactgaaatctgctccctttttttttttgttctgcattcagtaaacacaacacagggtactgttttattttaaaatagaaggaattattcatgcaagctcaatatatgaagttgatttgctaagcaaggtcaccttctcaataagacatatttagagtttgctatcataattaccatctaacctagtggatgtcctggataagaatgcatagaattatgtatacaaggaccaaaaacatgtatttagtaagagactgcagcagactgagggttgtacctattctctataccaccaaagaacagttggcgaatctgagtatcactgttcacgttcatgtattttgcatcaggacaatatttagatgcccatttccgaaatttatccgcagctagttttcgctgtgcaacagcaaccttttcaatttctgaaaggtaaccacggtcgactagcattccagctgtttccatcttgacaagaagggcaccaaaaggacgccaatactcctcgtagaaatcatacattgaacctctagggcaaccatcaaaagtccagtgctttttttccagcttgcttttcaaactttcataaagtcgtaaggtactcattgaatctaatgaagaataacagatccacatttctctgtcatccctttgtaatacttcgacaggctccatagagataattttccctgcagatccatcctttttaatctttttccaaccaaagatggttttcattgatctctttccaatcttttgtaattcctttggtacaacacccatgaccctgtgatcatttgtaagtccttcaagtgaatatcctccatcaattcttcttgaagagtcccaaagtcgtgcaagatgcatcgtatcagcatgaaacccagcaactttgattccatagttctctatgacatggctatcaaaactatagttgtgccaaacctacatgagaaaatcaggacatctgtttagaaaacttgcaaagatgctagcggtagtagagatgcaatcctataattcctagaagttcaaagaagtatcaaaactttagtcagggattcagaaaaaaacatagcatcaacctaagctgtagtagaaaattaacatgcaagtctgcattaaatgtgtaatataaacattccactgtattgtaaacaatattctagttcacggttccatttatattgtttgtctgtattagtaacacaaaagaagggaaagcagacaaccctagatagtagattcgctacttcccacataagaaaaacaaggacacaaagccacaccttcctgattgaggggtcctcaaaaaatggagcaaactccatgaggacatctcgcccaccatccagcacgtccacccaaatgcatgtttttccatttccaaaatcagcttctgcatcagagttgccagagtagatgctaaagcaaatgacctctccatggctaactggtgtctcttgtttaacatcaatattagctacctgcataacagtgtgctctcctgaattataataaactaacaagaagtcaattggcacaaaatacagaacattttacataatttgattgccaggtaactattgaatcaagatggtaaaagagatcatcattgcgatttcattatttgtgagacctattttgcccttaagttgtcattgatattgtattcactcataacaaagagtaagagcagcaaaacaaacaggcatgcaacacaatgcttcacagcttaagacctaagattggcaaacttgcagaaaaagcaaaacaaacttgcactaaacagaactagatttctcaaagagaagcataagtagtactatttcaactatgaaagatgggatgtggggtggtggagccatgtgttgatcatctcacagaaaagcgggtagacaggtagatacaggtaaactttttagagttagtgcctaactgaaaatgttagtacacgtcatacgatgacaggtgatgcgaattagccactttatacagacataaaaaaatcaatcaatgaggggttttcattccatacctctgtgtcacatgcatgaataaagtttttgtactttgaagtaagcaattgaacaacactcctagctgacttcacattgtcaaccaccagaactttgtcgtacacagtagcaagtgccttcctcgcatctttagactccttggacatgggtgccttagctggagaatcttgtactgtattcttggctgtgcattcatgttcatctccatcataaccatccctagctttgtcatcaaactgcaggcttgtctcgactttagagatcttcagaacggaagcatcagtcttagaatctggttgccattgagtcttcagttcagagccactagacctgttgagtggtttaatgtcatcgttaacaacactggtcagtgctgacacagcacttgcagcttgattcctcgtgttatgctttgccaactccatgttagcatgcctatttgcaagagaattaggagtcattctttctcttacattgtacaatgaagaatagttggaacttttgtgatcttccaaaggttcgtgatgaagaattcctgttcgtagatgagtagaacctttataaatagtgtttcccacgttattcctggttttgatcgaggatatcctcttgctctcctcaagccattcttgtgcattactttgcacattgaagttggtatacactccaattttgaaagcactgttgtctgtaactccaaggcccgagctactatgcgagtagtcctgcctaacaataagaacattcctaatgtgagagatggaaccagaatgccacatgcttaataaccatttgactactatgaacattttatgaacacactatcatttgacaggaagtagcaaagtttagccaaacactactaggtgcaattgttcaagttcctaaaaggcataggacgttcacagcaaggaatacttactcactcatccctggattagttcattattaatccagaacacagcacaaggtttgaaaaacaaatagtatcaacagcacaacgaccaggagcattgggctgaacctaaaccggcatccaaaccatcgcgcgtgaacctcgaatcgaatgagtagtaccactaccaacactcaaccacgcatccaatacgcacgaaactcaccgaacaaatcacaaaatcagcaaccaaccaacacaggaacacagctaccttccgcctccgatgaacggcgagcggccgcggcggccgccgcagcagcggaagggcgacggcgcggcccagagaggcgcggagcacgggcaccgccgcagctgcgcgggcgccggcgccggggccggagcggccatcgctatggagctcaccagccgcctcagcctcccccctcccctccctcctccccctccccctcccgctagcccaccgcacccacacccgaagccaccgggcgccgtcttgggcgactccgacgcggctaccgctcggagcagcagcaggcggcggcggcggcgcacgcgggcatcagggccactcgactcgacgaggaggaggcgggcggcgcggcgcggcgagaggagggagacgaagcgaggagagctcgggttcgcagagtttggagaggagtgggagggggatagaggaagggtttacggcagcaacggcgcggctggaaagcggaagtggaaggggattttcgttctttttcgctacgcgcacacggtggcggccaccaaaacgtttcacaatcttgttgttttgcgtgtctgtgagtggtacacgtcggcaggcagaggtaggtgcctctgtcactgacatgtgggtccgacgaatcatggacccacttgtcagtgacaaaggcacgatgtcttttaaagcagagagtatctcaatcccggcaagcgtgggcgttactggttttttggtgggcttaacgaaagatgttggagcgttagtttagttttgtggactgtctttcgctggagtcggagtcaagcttagctgattggtcgatcagtttcttcatgtcttcaacatgcatgcatgtgctgaaagattattcaacaacaaagggcgcaaggaattataggagtgtaattttttttggaagcttgtgcttttgttcgtacaccatctgtcccaaaaatacatatggagtctatccacgattcaaggtatgaaccacctaggatattcttttcagcttgacagtttcttatcgaaattcacaaagcttcttatctaaaatgaaatttgatcgatccttcttcagctgcccggaaaagaaaaaaaaaacacgatgcatttttacttggcgatctccaattttataggaagagggtggcatctcaatccctaattcaattcgtacgaagaaagtgacccttgaacaaattgagatgctgattgaaagtaaaataaaattgcaggcttataacttaacctgaacaatccttcgaaagctgatttatccgtgcaatacatgcgtagaagaaaaaggaactcttactaaatcaatctagaagcacacagcttttgttagagcgcgcgcgtctccgatacattcctactgaaaaagaaaaaaaaatctgacctgacatcccaaaattctctagctaatgaaccctgcacttctgcagtacacataagtactagctaagctagctaattaacgacgacgacgacgactcttaatttacaaacacgtagcctagctagctcgtaaataacaccagcgtcacggctttgcatgcaagcgatcgaggtatcagctgaaatgcatcgcacgacactgctcgttggtgtctctcatgagattgatcgaggtagctagctggagggcacagggtagcacttgcccttgcacatgcagcggtacaccatcgggcacggctccgcgatggagcacttgaagctcaccatgacgcggttgcacggcgagcaggcgccgcacgcgtgcgagcagtccggcaggctcgaccccgtcgcgcgcacctcctcctgcaggacgccgcggccgacgttgtccccagctgtggcctgctgcgcatgcacgaggcatggatcaaagagaagatcaatatattggttagtttttatatacatgggtgatatgggcgatcgacgacatgcatatatacctgtggtgagatcacaagtgtcgcagtagcgctgatcttttcgtcttgtgcaccatgcaccggtgttactacatcatctgtggaaactaatttaggagatatcaagcaagcacattcggtaagtgcaaattaaccaattgtgcttataaacatacagtcactgagtcgcatactactagattgagaaatgcccagaggtcttctggctagctccacaaggtggtgggctagacgacctgggttcaaagcctcacccctcctaattatttgatattaggtccttccctaatattctagtttttttttttttttttgcatactactagatatctcaacttacaggggggcgatctgatgccatcgccggtggcagcaagaagcaggacgactgcgagtatgagaaggatgcggtggtgacctcgggcgtcagcaagagtagcgtgcctcctcatctcggcttctcaagcagaagatcgagctagctagcacagctacgcacaaagggcatgcaagctgaaggctcgaaggaatcagaggaggacgcaagaacacacgcatatatatatacacacgaacgaacgcgatcgagtatatgtgtgtgcagccattgatgagcgacgcagcggcggcagcgcgcgtctttgattgtgcttcacatgatccccggcacggatcacatggattcaatgacgggccccctgcgtgagcgtgacgcgcccggccgcctcctgcatatgccccctgccgctgccgggttcgcaggcgactagcggcagctcgaggcctcgagactaattaacaccatcgggttcgcctcgcctgcgcccgctcgctctgcatgcacgggaccagtgcgcgcccactcgcccagcaaaccagatacacgcgcgcgtacggcgccgcgacgtgcgcgacccctcgctagtttatccgcgggcacggcgcatggcggtggggggcgcagcgcgcgggagttcgaatcgcacacctgcgggaccggcggaacggtgacactgcgcgcgcatgcatgcgtatgcgtcgtgcagacaggcggttcgtgatcgagcggatcgggcggtggggcggtgtggagtgcgggggagcgggagcatatgctgttgccatgaatgaagtaggtcatttattctttctacgtactgcatcgtgcgagtacgtgatgcgagctagtgctacagttggtgagttggagtactcactgccgacgcatgagagctccgcctgtcgtgtagctcagctctagtcagctcgtcacggcatgagatcagcgtgagacgcagacgagaccagctgcctgtgcgccgctgcctgcccgctgcgcgcggccgggcggcaaattctgcggcagtcttctgccgtctggtctcgcgctggcttctgcggaggaagtggggggtgactaaagtgtgacgttgtagggccaggatttcggaccattcggtggactgaagtttcgcttttcctaatctattcctaggtgagttggggagctggttccatcgaccgtgacgacccaacgaactcacgtaggcccgagctaatcaattagcaaaggttgttgcttagtattggtttgcgttaatcggaagacctaaaacatattttggcaattgttttgaaccatatcaccattggatccgtggcgcaatggtagcgcgtctgactccagatcagaaggttgcgtgttcgattcacgtcgggttcaatatcccgatccaagcggatttcctttttaattttttttctatatgttcctgcgtttctaaaattttctatatttcgttcctcgtgtaagtttcaaaatttcttttccattttctatatttctatgttccctgcgtttctaaagttttctacatttccttcatcgtattaccctataagtttcaaaatcgtataccctataagtttcaaagtttcttttccattttctatatttctatgttccctgcgtttctaaagttttctacatttccttcatcgcattacactagaagtttcaaaaagagtaaagtccatcaccggtccctaaatttgtaccgctgtgtcatcccggtccctaaactcttaaatcgaccgttcagatcctcaacttattcaactgtgtcatcccggtccctaaacttgtggatcactcgtttagatcctccaaattgttcagttgtgtcaccccggtccctaaacttggatttgaatatcatattggtcaaataggacggtctaaagactttatatatttaaaaataattcataacttttttatgtgaactctaatgaa

SEQ ID NO: 25117 - DNA, 2144 bp, Oryza sativa
cttcattagagttcacatgaaaaaaatatgaattatttttaatataaaatttttagaccgtcctgtttagggaccgaggtgacataactgaacaagttagatgacctaaacgagtgatctgctaagtttagggaccgggatgacacaatcgaacaagtttgagaacatgaacggtcgatttgcgagtttagagaccgggatgacatagcggtacaagtttagggaccggtgatggactttactctttcaaaaatttcattttcattttctatatttccttgtattacctataagtgtgaaacccttatttttattttttctatttccttatattatcctataagtatgaaagtatccttttcattttttatattttcttctatgtactactcccttagtctcaaaatataaatacttttagcaatgaatctgaacaactgtttgtccgaaatcatagctaaaatgcttatattttaagacgggaggggtatatacaaactatctaaaaagataatattagaactaacatgtaccatagtttatcatcacctcaattgtaccatagtttatcatcatctcaattgtttagctatttttaccatcctctctctttttctcactttaccagtattaatataaatctcttggagcacttgcgcaggacaccatgtgttcacccacgcactagtaagccatgctacgtaatacggttagccatgttagcagagaccaaatctcaaggtaagttttgtggtggcagaaactacttcaacttcagcaaaacatcactgcatgtttttctagttctcaagtgaactaatttgttctcccatacaatacaatggcagtatgtcacctatgtctgccgtactagggaggaggaaccgagcaacactagttacagataattacatcacatgtctataaaaccagctgtagaggcctctggcaatgatacccaaaacatgtatatatttacatattatattacatcttctcttgtgcccacatcagaaagaccaaagttaattttggttatttcttcatctcagcaggcgaacatacaccattccttggattgcagttgcagcggcgctgcagaaagtcgatcacgagttgttcttcttcgacgaagcacaggtagaaagatctcttcatccttcactggccattgacctgacactgaagtagcgaactaacacgacgaattgctactgatatctgtagcttctaccgtgaccatattacggtgtttagcttatccctgaatcgcgcgggcgagctgcccatagcgagctcagcgctcggaagcgctggaagtagtcccccagcgcgaggagccccctcgccgcctgccgcgtcgtcaggatcctgtgcatctcctgcagcgtctgctgccggagatgatctgcctgcacacacaagtcccagatgccatgatgaatgagacaatgaggcgatcggagtttttggcggttggttttggtttggtttggttacctgggtaacgaactggacgagggatctgagctgctccacggcgttggccatgtgcaccatgtaggcctcgggggagtcgaacgggtcggccgccgtcagggagtccgcgatcgtctgcttcagcttgtccatgccctgcgagagggcgtcctcgacctgcatcgaggtttgctgcaggccgcccacttccacgacctgcttgtccgtcagaggctccagctgcggtctcaaattctgatagcagaagcaacaacgagagagagagagagagttgccatcatgtcatgtaaaaaaaatcaactggcactagtggttttgaagctctggagtacatgtgtgcagtgcagatcgattagctaccttgagaacctccgatggccggaacccaccgatccacaggaagaaccgctcggtgggggtcttccacatgcccgacatgatgtagaacacgtcggagttggcggcttcctctttcatctcgaagaggcggttgtagttgtcgagcccagcctcgacgagcaacttgagctccaggtcctggtccgtcgtctgcccctgcagcagcgcattcctcagctcaccagtgttgcgattctgctcgtccacccaatggctgtacttaatctcaaaacctaaggcacctg

SEQ ID NO: 25118 - DNA, 23153 bp, Oryza sativa
ggttgcgattctgctcgtccacccaatggctgtacttaatctcaaaacctaaggcacctgcatgtacgtaatatgatgaaaccacataagctggtaattagaatgaacaaaaatgttaaatctgtgctgaacattgtgatcagaaagagcggcacaacaaaaaacctaacctggatcgatcggtcctgtaaatccaagatttggttctcgaaggctcccatttgcatacacagcctgcatcagagcagttgcaaatttgcaatggagtcagtgacacaagtgtaagctgaagtggctgcacaacaaattgttatccgtgtacctgctgcctggcccgttgaagctcttgctctaactgcgctagtttcaaccggcttgtctccagctgttggatataagcctatggaacaccataatcatgccgataatgaggattttgtttttcaaaaatgggaaagctacaatctagcatggtgacagcatgttagtagttaagtacttgtcattttacctttttccgcaggcggcttttccgtgcagcctctctgttttgtgcaagtcttctgaggacctgaataaataagcagaaaattattttatctcgcaagaccaaactgaatttaacatatgaaatggactgtgagttttgggaatttctctactgcatcttttaagaaaaggaaaagagtaataattacacggtttcatataatggagcagagcagagatggttggattgtactgtgtgatgctcaccttgtctggcggcttgcttgcctcctgatcaacatttctcccttcctccagaactacttggggaatttcttctagctgcaaatctcatcaaaatgagtattaaacacccgatcattcaacaggcaattagtagaagccacagctcatagctactcaaaatactagaggaaacaaaattaaatcaaagcggatgtgttcctcaccctattctcaaatttcatctctgcctccatgatcgtggatgcactcgtggcctggccgttgtcaaccttgaactgctcgtgactccacatgccaactggcggaggccggtcgtacgcccccattctgaccggtgccgcgaactgcgtcgacgccgaggtcatgtactccggaggagaggcgctgctgatactgaaccaagtaaaagaggatcagcagagtgcaccctccctaagtgcaaaaaactaaggatcgccacacactacttggagcagcagctgcaacaagctagggaggaaaggaagaagaaaaaaaaggtgattcttttaaactgggaaatggaatgtgctcagcacagcacaaaggttagagatagctagctgtatgcaaaggcaaatatgctctccccaagtgcggccgcatgcatctccacaaaagcttgggggatcaaaaggcgccattttcactggggattagagcactttgccaaagtggcatgcagaggttgacaacatgcgcaacaaatgatgatgaatcaagcttgatctgaaggctgagatgacgttcactttgcgagcgcacttccatcagggaagaaaaaaaattcttatcatgtgtacgagtctaattgtcagaatgatcactaactcaacagcccaggtccgatcagtagcacagtcatcttcagcccaacagtaacagtaacagtctctctcactacaaagaggctgtgatcagagggataattaatactccctctatcccaaaaaaacttaacctaggcaaggatgtgacatctaatatttcttagtacaataaatctggacaaccatttatccagattcgttgtactagaaaatgtcacattctcttctaggtttagtttttttttttgggacggagggagtacgaatcagttgccagcttcaagctagttgcagctagattgttagaaatgatgcgggaacctgtgcctagtcctagtagagacgagaagaatctgagtactagctagcagcctggactgcgtgtgcctgcccgcgagtggctggatgcttgcttgagttcgagtggaacctggaatctggaatcccagcctcccaggcagtgcagtgccggcagtgtgacgaaggaagcaaagcagagtgcgagtggtggcggcgctgccgctgcgagctttagcttttgcaaaggcgcggtgcgtgacgctgagagtgactcgctcgcttcccttgctgctccacggacaagttgccacctggtagctgctgcttctcctcagtgactcagatttgcttcgtgggtcccactctttttttgtggggtcggctgtctgtctcagtcatcatcctcatatactactactaagctattccctctgtttcatagtgcaagtcattatagcattttctatattcatattgatgttaatgaatctagacatatatatcattctagatttattaatatcattataaatgtggtaaatgctacaatgacttacattgtgaaacggatgaagtatagtcaatcctgtgccttcgatgtcaaccaagtcctgaaccagtgaacctgaactgaactccatgggatgtctgtaattgtaactaagattctggtgatctaatcccaagcacagaaagcatgatgacgcagcatctatgatcaatcgatcatgatccatcgtccatggaacccatctttgtctttgtgaggatgatgttacgtgctgcacgaacgggcaaagcagcagcagcaggagaagaagctcactcactcccacacgtagtgggggatttgccgggccagcacactggagggaccttggtaatgtgtcgctcaattattggcggctccactttgcttttgcgctaaaagcgagtgaggttggcctatccagcgcccacgaaaatgcaaaaccggtgggcttcgttttgtctgctcaccctgcaacacctccgaccaccgtggatagctcaaaccccactatgtgtatgtcccaacttatcaggaatagcagtgtgcattgctgtataatggtcgcctcattttgtcgcattcactcccgcatatatgggcatcatatatgtatttactacctatatgttattctaaccaatttggagggattggctctaatctctaatggcacagaaataagctcaagtttctggttagactgaagcctgaaataactatgtaacattttttttagaggaatttaaggaaactgtgtttgctgtagacagtagtgcacagtgcactgctggggaacatgaaaggacagatgatgtcaaggaagaaaaaaggaatgctagattggctaatctttttttctttttcttatgaaactttgattggttagttagtggtgaatggtgatgcattggtcatcgctcaccactttcttcagacccgcaacatcacttggggagggccaagcagtagcctctcctttgccctaaactgggttggagatgatgcaaaatgccttttttttctctagtgcccctgcactattttgccaaattaggacctcgtcttttatttttccgttgaggagtcaactatcaggatcctctacaacaaggatctgacgcatagttcatggctattgccgtgccctatttagaaacagctatgtgcaagacgcagagttcacggctattgccgtgccctatttagaaacagctatgtgcagtgtaaattcgcagtaacctacgggctatgaggaaaccttttgatttgttccaaatgggtggatgtggttgtctaaacaagagaacaaagcagagcatctatgttatactttcagagaattagcacaaggtatcagttgatgtcgcacttctatcttaattggtgattctgaaatctggtagccagcgtattattattgtaggcttcacctttgtctgtcctagctgacatgatctcactttcgctgcaccacagcactagtccacttgctgtaataaatatctattcggtttacatcatgttgtgccacaactaatgaaaatctaatgcaaattgcaatactagaatgcgtaaatggcatcataggtgctaactctctttcgtttgacagcttgttcaacttcaacgtaaaaatgcagcaattctaattgtcattttccatttgctaaatattaaatagagaaaattcagaaataataagggattcggttataggaatacacacctaagcttgtggatgttaaaatggtcttcaagatagccagggtaaagctccattatatcattcttgaattggtctcctccaataataatactgcataaattcatgtgccagagtgggaatattagctgcataattcataaacaatactgaaagttatgcagttgctctagagtgtccagtgtcgcatgaacatggaagaagatatggtcttagaaaatactctaagaaagatatgttctcagggaaaaaaaaagttttcgctcaaggaactttattccaacagtgtaaagattataatgaacatatggtttacgagtgctattccagacttactggagaagcgaatatgatcagttttagtaccactccagcactttgcagtcccattcaaataagaaaagaaacaacgatagacatgacgagacaaaatcaaaaacccttagctatgatgtcttggaagaactaaagaattatcagatagcccacttattcagaagctaaaatttttcagagtccccaagaaaaatcatgtccttctttcactaaacgagtcatcaccgaaggagaaaatcccacctgatgactctgctggttaggttaacaggaaacatattttcctacttcctctctactaggaatgaaaagataaacaagatatgaaaggcaagctgtggtttgatgttttttctttgtcaatcaggtaataaaccctatagaaatgcaagttatcattaattctagcacaacagcacatatagtgaaagccaaagagtaggacttaacttgttcttcaccaagatgacacacataataaaaacagaatcagtgaatcaaatatccagagaaacttagtacctgataaagttcttccgtctaatatggatggcctacaaagtagagcactggaacggtaaattgcttagcacaagagactccacggatgtgctatgtagctcagctccaaaggacaccagttagccagaagaagtgatgcagggttatataaagagccacagctgccctcccttcaaaagaagaagccaagtatgaagagcttttagtatctaatattatcacctgggcctcatgcttaggatgcactaattattcttttcgtaaactagttggatatgtgagaagttgcttgcacacaggaatacatacacacatccctcaccacctaactagtagagccagaaaaagtctgcacatgattctgacagagaagaaagatggtaactttcaggtgtaaaaaagtagcacgcttttaagtctgaggcacagccttggttacttcgatagatcgacacactagcaaaaatcgatagtttcagataacccaggtgattgacagtgccctacaaaagcatgccaggaagcagtttccacacacatttttattacgaaaccgccaagcaaagatggttaaatacaccacatccactgtcaaatactgattaggcagaaagctgcatgcaaggagatttggtttcagaaaaggaagtctcgtcagacaaggcaacactaactcatatgccataactgagcatagttaagagatttagtttgtcacccaaggggacataataaagttgtaaacactactagttagtactccagttattacaggcacagtacaaataccacacaagtaaactgaacttatcaggacttaatcccattgctagagtgcccctgttgcctcatgaaggcaagcaggatttaactaatattcagattgttagctaggcagccgaaaagatcatccaaccaattttattaagagcgaggtaatacgatgaccctataatggggctcatgttagattccatgatgcaattaggggacatcactagattcagcaacttggctgctcggtggaacttcccatttctggggtatccctccttgatcactaaacctcctcaaccttcccaaaaagatgccccctttacacctttcttttttttccctcatcctatgctacttgccttccttcctggttgcttttttggtggtgtgcccatatcatgccctttaattagctatatgatcttgagggtttctgttctcaagaggaacagatcatgctaagcatctagctatttcatttctcaacacaagtaagtagacacgcctagcaagaacttacacaagtaaacatggaggtgaagtaccatgaaattcagtcaatatcaaagtatacacctcaaagaaacaatcgattttcgcataacagtgtctgacaactaactactaggtctaagtcgttacactatttggcaatcattgtccatgatccatatctttcccaaaagcagcaagaaattacaccacacatataatactctgaactaacacaaattaaataaaacaccgaggaatatataatagaagtatgagtgcagtggggcacctcctcttttgcgaattgcgtaacgcttggtgcgtgacgacgaagaattcccctttgccataaaggcgcaaaagaagaagaacctttcgaccccggctaacctaaagttagaagaagagataagataaagcactataagagaaattaattagtgtggtaatcaggcaggggcagcaatgatgcgttattgttaatgttgcaaattcgcaaacccccaaacctcaagatcaaggtcgtggccatggccatggccatgctctctgatggaagcattattaaagaggcccccccgatgtcgccgtcgcgatgcggttttttcttcccctcggcgaggaggagatgaaatgcgccgcaacagtcatggtgggctagggctaaacccgctaacccctcggctgtggctgcggatggctaaccctagccgattccttcgtggcattgccttccttttggcttgattggtcttgcgcccttctttccccaccccctctcgcttttgcagcacccaaccttttcaatcctcatcatccgctgtacgaaattcagcgaattttttttttcgcgaacgcaattcagcgaaattttccgatgaaaaagccagcagatctctattcccctgaatctcactataaatctgatcaggataagaaattagagaaaattacttacctggaattccggacatttttcctggatgattgaacggattcagaaccgggaaaattacttgttcagcatcgagatgagattctctctctcgctcgtaggcaggaacagcgacagcatttcgcagatggcgattggagtatcggagcaataattgtgggggagcttgcattgcacttgctggctgcatcgattctgggccgagacgaacactggctaccacccaggtggtggagtggtgggccaagcttgtgtgtgtttttaccttcggatcaaagtaaacggcagatctctccaccatctgcctcacgattcccaaacaagaaaaaggtcaaccgtctaagagcaggtacaatagcaggctataagccagctgcaaacatattctaagaagatcagcaggctacagatttatagtcagctgtagcacggactccaagacgcggtgtgtgtatgacaggtggaccatgtattaatagtgtagtatgtaactattgtatgaatgagctactagattggctatagataaattggcactagtagttggctatactattaaacttgctcatgggaaaaattgttccttgaattaatttgcaaagtggttttggaatctagtagtacaactttttattgtttttgctagtgtattatgaccgaaagttatatttgtccacgggatgaaatgccggtttgaaaatcatattaaaaactccctctattttttatttgatgtttgaaccaaccaacgtcggataaaaaaacaaaggtcttaatagagacattgtagtttaaaaatattaatggtcaaagtgaaaacagtaaaaaaaaatattgctaaatatctgcaaatggatgttggcggatccaccatagggctttgaggtctcgagcccctattattggtgttgcaaccataggagcccccatagagcctcactgaaattttgtcatacgtccattaaaagaggtgctatagtattgtatagttttttttcagactctctagctaactgaaggatccgcctcggatgtagtatcagaaatcgccaaaattataagctaaccaagaaacaaatcacttgtccggtagcatctcccgatcacagcaaatcttacttctttagctagcatgagttagtgttaggaacttaggggggcaagcgtgcaataataatcttgatcagtagcttagcttgtgacgttagctaactcgctctcgctcggaaccaaggaaaaaaacaactaaagttgctagaccactactaaaggcagacgaaaaggagaggttgggtctccatgcatgaggcattccgtttcaactttttaatttaccaagtgagcagaaggaattagtggtgtatgaccaagactctcacgtgagcagtgcatgaacaaattcatttttttctctaaggatcagaagattcatgtggaatgaggggctgggcaggcgcatggtgataagatattcaattacaaagttagtggttaaaaaatagtatttgggtctcaaaataaggattgatctaatttgctttttgcgtcattgagtatttctagatgagtagatgtggcttaaacgtggatttttttatactttgtaccctttagataacatattttacagatagaccatcacgaaaacttattgcaaatacagatccttaactcgcgccaattggtgccgagatctaatgtgttagaaccagacaccatggcatcgagacccaggcacctggagcatctgcattgggggcggatgtttccaagcgttgacctcgacggtccatgtaagtcctaaacattagaatttacttataaatacttagtttttttgttagctcgataattttactatgttgtacccatatcaaatcgaagacttgtaacttcttacatttaatcctaccaaggattggtgccaaagtaattgacactaaggtataacgtatcgccgctaatatccatggtacctcctgccacaccaggcgccgtcatggctgggctgccagcctgccacgggtggcaaggggtcagctccaacttccttggcactgacacattaggccttggcgtggagttagggtttatatctgcaataaatttgataggttctatttgtaaaataaacgtttgaaatggttgaaaggttaaaaatccagtggcttgagctgatggatagtgatgcctttacttccacttgatatgatctttgtgtagggaaagtgcaggggttaaggagaataatagaatataatggaacccgactattggtttgtaccatgggacgattcctcgatactctcaaagttgctcaacattagattaagtcatgcatgacatcttctgaactaggtgaacaataaacaggctagccagagatgatccccaatgcttgtgcttttgctcattattttttttcacctctattttttctttagaaaatgcttttgtacctctttttgcaaggaaaaaaatattccatacggccggcatgagcaatccattcatattcctaaacctgaaagttgaaagggcagtatagtgttgatatgtctcttacccaatgcatacctgtacattttgttcaaaatttgcatgtaaactcctagccagtgaaattcagatgcttaaaacagtttgatcaacatggaagaaacatcatatgttcagtgccttgtatctgatctgaagaactttacttcaccccggcaacttacagcaatataatacaccgtaccgatttcagataaccattccctggcgaagtatgaaaaacgtgcttgccactatctctctttcagactttcagataatttagtcgtgttttacagagcaccgaaacgcctttgcactatgtgccaagctgatagctggtcgatacacttcagtcaagcacgtaagtctactcagaagggatgctataagaattcagacctcaagaaggagacggaagttcattgcctttaacccatttgttaaaggaaaaagctataatccattgcacgtatcttctttatactaaagagtatatatgtatactgtatctttgctagctacagagttgatcgatacacgcttcgtgtcgacataagaatgcatatcttttgacttcgctgttgcttatgtgagtggtgcatctggagttctcaactgtgctggagcctctcttgaatagacaaggttatcaattagttaagaaattttcaggttatttaaataaaaagattaagagaatccaatatggtgcatgaacctcttggatgttgaaatcagttaggtatgcctacaaaatatttatggacgacactgacaatatgcaaggtccagtatgatcaatccaggttaatagccatacctttggttatacatacaaaatggtcttgacactgacatatcaatatgggctgtgccaacaattatcgggatagcagcagctagccagctagtggcttgagataaattagttgtaccaagtcttcttatattagcaaactttcgtgttaaacatttttttctcacaagttcaaccttttgtctgaataaaagactgtctatcggtttgttcagtcccatttttcctctctaaatttacatggttcttcgtggtcgatacgtcgaggaatcatgaaagataacatatattctgaaggataaaagaaaaaaagaaagaaagaaaggatgacagaagagggaggttctatgtccaacaaagtgtgaattggtgggggcaaccttcctccaagtatgagagagccttttgttccacatttccactcaacagctaagacaataatgccctaaaaaaatatgaggtgccaagacaataatttggataacctatgcaacaaatggagcagtcaatgtcatctcagcctcacatgttctttaatctttatttggacaagcacaaggcaaggtagaggaagtaggtgtcagcaaaacaccttgtacacacgcgagatcgtagctatcctagcttaactgacgcttgcaggatgatgaacagtgtactgacgaacacagaaacacagcaaagcagagttttggcgctgctcaacaaccaccgcagctttttctgattctttctattcatactcctcatcttgtgaggttgttacatgcataacaaacaccagctttgccggatctaactaccgaacgcgccatcccacgctccagacccagctcggccactacaaccgaaaaaaactgcaactacttgaccaactctgaacaaactcaggccagccacaatacaaatggaatccaacgcctatatgctattataatgcaaagaattgactaaaacatgcatgctaacgacaactttattcttggcactcaagattatctatcattctcccccctaatcttgaagtgtcctatccaaacccatcttccttcgcaattccttgaaacgaactcgtccgacaggcttagttaacaaatcagcaagctgatcttcagaacagacatactccactgcaatttgcttcttctccacacactccctgataaaatggtagcgggtatcaatatgtttgcttctgtcatggaatacagggttcttgcaaagattaatcgctgacttgttgtcaatcataagtgttgtttggccgggttctgcatcaagcagctcagcaatcagccgactcagccaaataccttgacaggcagcagtagtggcagctatgtactctgcctcacatgatgatagagcaacaactttttgcttctgagattgccaactgatcaggcttccaccatacctgaacaatacacctgtggtgctctttctatcatcaagatcacctgccatatcactatcactgaacccaaccaactttgcatttccaacttcttctcttccataccagcaacctgtcttgatagtccctgagatgtatctcagtatatgcttgactgctgcccaatgttcacttgttggtttttccatgaatctactgacataaccaacagaatatgccagatcaggtctagtgtttaccaagtacctcaagctgccaactatacttctatactctgttggatcaacacattctccagtgccttctttactcagcttgagccttgcctccatgggtacttgagtgggattgcagccctccatgcccgttttctccagaatttttcctgcataggcactttgtgacagaaaaatcccttctcctttctgaacaacttccattcccaaatagtagctcagaaaacccaaatcactcatgttaaacctctgcttcatctgcaacttgaatgcatcaatctcctttttctgagacccagtgataataagatcatccacatacactcccactatcagctttgagtccccaactcccctcacataaacagcactttcagttgcagatttattgaacttcaaagacagcagtgtgttgtccaacttggcattccaagccctaggagcctgcctcaacccatacaaagcctttctcagtttcaaaaccttgcttgcattggtcttgtcatcaaatccaggaggttgcactacataaacttcttcctcaagctctccattcaagaatgcagacttcacatccatgtggtgtatctcccaccctttctgtgcagctagtgcaaccaacaatctcactgtctccattcttgccacaggtgcaaacacttcatcgaagtcaacaccctgctgctgcacataacctttggcaactagtcttgccttgtgcttcacaatcgcaccagatggatccttcttcaatttatagacccacttaagcccaatggctttgtgccctgccggcaactcagcaagtgaccaagtctgattttcctcaactgatctcaattcttccaccattgccctcctccagcattcatgcttctctgcttccacaaagcttgttggttcttcagtagcaatcaaacactgatcactgtagtcgaaatccaaaacaggttcagtagtggagagaatgtcttgcactcggcgatacctaacagggcctccatctgtttctggcgtcactgaagttggtggtgtgcaaaactccccatttggcgctcgcggtggtgaggacagaacgcccgtcgacaccggagacacgcctgcctgcaccggcgttcctgtctgctcgcccgcatcagcaacagagggcgccacagggctcacaaagaaatccaccgtgaactcttcttcttcagtcgccgcatcctcaggatcacgccacgcccatgtcgccgtctcatcaaaaacgacatcccgcgacacgcagacgcgctgcgccacaggatcatacatgcggtatgccttcgacccctgttcatagccaataaagaccatcctcgtacctcgatcgtcaagcttgcgcaggttcggcttcaccgtcttgacgtagccgacacagccaaacaccctaaggtgttcgaccgagggacgtcgcccatgccacgcctcatatggggtcacaccatccagcgccttcgttggcgagcgattcagaacgtacaccgccgccacaacagcctccccccagaaccgcgccggcagcccagccgccttgagcatggagcgcgccgccgcgacgacggtctgattgcgccgctccacgactctgttttgctgcggggagtaaggagcagtgagctctcgccgcatcccgcgatcggtgcagtagtccatgaactccacggaggtaaattcccccccacgatctgtcctcagagcccgcagctttcgcccggactccagctcaacgccggcttggaactgtttgatcgccgtcgccgcttcatgcttgccggagaggagccgtatccacatatgccggctcatatcgtcgacgaggagcaggaaatacttcctgccgcctggggtcgcaggcgtgatcggcccacacaagtcgccgtgcaccagttcgagcgcctcctgtgctctaaacttggcctcctccgggaacgggagtcgtcgttgcttgcccgcgagacaaccgtcgcacagttgatcagtgtgatcaatggtcggaagcccgcggaccatgttcccctgggccagcctccggagtgactggaagttcaagtgtccgaaacgcgcatgccaccgccatgccgtgtcgccaccgctcgccgccatgcagactggatttgcaatatgcagcttgagtatgtagagataatttatgtctcgttttacctttgcgaggagaagaccattgggatcacggagtgtgcagaccccgccccagatatgtgcgtcgtagccgcgcgcgtcgagacggccgacgctgatgatgttcttgcgcagcttcgggatgtagtacaccgcgtcgagagaccggtgatcaccattcttgcatcggaacaccacggtcccgcgcccctggatttcaatcacagagccgtcgccaaacttcaccgtcccaacaacgccggtgtcgagctcggcgaacgccgaacgcactccagtcatgtggttggtggcgccggtatccagaaaccaatctcctgtcacctcctcctctccaccatcctcgtggtccaggatcaccttcttctccgtgaggtgtacctcctgtccactaggtgttcgtccgagtgtcgcctcgccagcaagtgacacccctacgacatgtgccataagcaacgtcggttcttcctcggcggcttgcaccaggttcgcctctccccggcgttggcgacgtggcttgcggcactgccttgcatagtgaccaaattcatcacaattgaagcactttacccttgagatgtcgcggctgctgttcgcaccagtggccgcctctttgccctttggtgacccaccgggcttgcctcggtgattctgcgcgccgggcgcgccgcggcccttattgccgctgttgccagagccctcctgctcccgctgcttcacacgtgcctgccattgttcctccgtgaggtacaatttgccgccattgcttccctcctcatcatcgctgtaagaatccactgttgacagccgcccaactagctcctccagcgccatggtcttcacatcgagcagctgctcgagagagatagccaccggcttatacttcttgggaacaacgcgcagcagcttcttgttgacgtgttcatcttccatgactccacccatgtcgcgaatgtctgcgacgacagcagtgagccgcatcgcaaactcctccggcgtctccctctccttgaatcgcatcgactcaaattgacgacggaagccctgctccttcgcctcacgcacacggtcgacgccgacccgcatggtcttgatggcgtcccacgccgccttcgccgtgtcatgctttgccagcccgcgcaacatctcacgcggcaccgcctgaaggattgccgagagagccgcccgatcttcacgaaactccgcgtagccgggatcgatcgccgtccacagcccctgtgcctgcaggttgacgcgcatcaggagcgcccaatccgggtagttcgtcctcgagaggactgggaggcgagcggtgtgcgatgcgtctctcccctgagacacgagcggaagtaatgcgccgtctgcgccattccccccgccgctgccgcttgcgccaccgcggccgttgccgctccccccgccgccaccgccaccacgacggccaggcggtgtgtatgacatcgccggatcgttccagtaccgctctgataccaattgtcagcaaaacaccctgtacacacgcgagatcgtagctatcctagcttaactgacgcttgcaggatgatgaacagtgtactgacgaacacagaaacacagcaaagcagagttttggcgctgctcaacaaccaccgcagctttttctgattctttctattcatactcctcatcttgtgaggttgttacatgcataacaaacaccagctttgccggatctaactaccgaacgcgccatcccacgctccagacccagctcggccactacaaccgaaaaaaactgcaactacttgaccaactctgaacaaactcaggccagccacaatacaaatggaatccaacgcctatatgctattataatgcaaagaattgactaaaacatgcatgctaacgacaactttattcttggcactcaagattatctatcagtaggcgctgttttcagaagctgggacagagaagagaacctcaacttgtggagaggaacactaagtgcgtcaccatggctggccttcaattgttcaagccctttaggctggctgtagctgtggctgacgaccaacgcagtccacgagtagattctctgtgcttttgactatgcagggatgcacattattctcttgtgtcttagaggtgctttgaccaggtgcttagctgaagtttggtataagcttagctttgtattattttacacttgcaggttagatacctttcaccttttttacaaattcagtaaagtgaaagtaactatgagaactaagacaaacagaaaaggcatacagaccgctatagactggccgactgggatgttctgaatttctgacaggccatatattgtctgcatttctgataactgaattctgagtcttcaacactaaatttatatgaccatatatctcctgactccattcttatactactaactcaactacgttagtgtctgcttgatttggtatcatattttgccctaccaaaactttcgcaaaatctaattcgagagcactctcgatttagtcataactagcgacgcctatccagaatccagatatgtgttagctggaataatcttactttactatagtactaatccattaagtaagtaggagaaatattcctatcatctatgcttcaaataaaattttctctcaaattactcatccgatttacaattcgattacaccgttgtgttcgtaataattaaatctttacgacaagatctcacatgattatattttgatgaaaaatcacaaattacttttatgatatgtctaaattacttttagatttcactgagttacttcatagacatataaaagtaaatttagtaaagcctaaaagtaatttacatatattatagaagtaacttataacaaaaagaaagtaactttaattaatgtcttttttcattgaacaaattatcatatatataaattacttttatatttgattaaaatacctcctatacattcataatgctctgaggggattacttttattattgtttttagttaattccataatttgtgctgattaatttaatttctagatagagtcatgtttttatctctacaacggatttacttcaaatgacatgccaaagttactttcgttttgttataagttacttctataatatatgtaaattactttttgactttactgaatttacttttatatatctaagaagtaacttagtgaaatctaaaagtaatttagacataatataaaagtaatttatgattttttatcaaaatataatgatgtgagatcttgttgtaaagatttaattgttacgaacacaacgatgtaatcggatcgtagatcggatgagtagtttaagagaaaattgtatttgaagtatatgtgaatggtgtctcttatagatagagtggtagctggtttagacaaaccagctaccactagctgtgtagttacgtcccaaaactttggtagtaccaaaattttaacgagttttggcactaccagatttgatagtatagaatttaaactagcgtgggtaaaagttagtaccaaatcaaacattactttatactaatgaagttgccaacattctggtatggtaaaaattgatctcaatccaacccgcaaagcagatatgcagagagccagaaacatcgtggaattgtgggctgttgggctagcagaatatgcaggccgtcaccaatcaacaagcccagcattgctttttatccatgggccttcagttgcaaaacggcccagtttctcatggaccacgcgccgccgctaatccagccctactattaattcagccacatctcctcgcctccggctctctctctctctctctctctctctctcccgtgtccgcaaccgcaaatccccatttggtctcacctaaaaccctagctcgctcacccatggctccgaagaagcgaaaggcggatccggcggagtccccggtagcctcgtcggaggccggcgccggcaccaaccaccaccaggagacgccctcctcggagctcaagccccgggggaccatctacttccccatcaccgacgaccccccggagccgagcgcagagggcggcgccgagggggaggacggcgccggaggggacgacgatgaggaggacatcgcgaagctgctcgagcccctgtcgcgggagcagctggtggcgctgctccgcacggccgcggagactacccccgcgacgatggcggccgtgcggcgcgcggcggaggccgaccccgcgagcaggaagctcttcgtccacggcctcggctggggcgccggagccgacgacctccgctccgcgttctcccgcttcggcgagctcgaggactgccgtgtcatctccgacaagcaatctggcagatctaagggctacggcttcgtcctcttccgctcccgccgctccgcgctccgcgccctccgccgcccccagctccaaatcggcggccgccttgctttctgccatctcgctgcctcgggtcctgcccctccgacctcccagtcccagaaccctagctccaacaccaacgccaactccggtgcggccaataacgctggttctgcgtcgtcttcacaacctgacaacatgcaacgcaaaatctttgttggtaacgtgcatgctgatgtcgatgttgaccgcctgtatgagtacttctcgcaatttggtgagattgaggaggggccattgggatttgacaagaccactggcaagcctaaggggtttgcgctgttcgtctacaagtcagtggagagcgcccgccgtgcgctggaggagccaacaaggaactttgatggcaaaatgctcaatgtgcagaaggctatagatggcaggaccaagaacacacctgggatgaatgcaaattctaaccctagtggtaccgctgcctcggcagcagctgctgctgcagctgcacagatgactgctcctgctactgctgcaattacaccgtatgatgcatcagcttatggtgctactgccgttcctgacttgggttatgcgcagcaagcggctatgttgggattgggtgcacagcagcaggcgtttgcacaacccaatgctgcaatgcttgccatgatggcagcagctatgcaaaacccagctatgctcgcaacgctgaaccctgcttttgctgctgctgcattgggtgctgggggccagcaggtgcacgcggctggtattccaggttttggagctcagggttttgggacacagggctttgcagcaggtgccgccgcttttccaaatgcagcgggtgttcaagctcctcctggttttcagggtccgcctgggttccagacttctgctgggtttcaggttggccaagcagcttcacaagcgggtactgctgcggctgctgccgccggtgctgctggttatcaggctgctgctgctgggcagggccaagtgcccggaacgcaaattgggggtgctggttttcagggtggattttgaaatcactaggtataacaattcacatcctgcttaatcgcttcaagtcctcatttaccactaatgatttgagttagcttatcctccaaatattattcgcaacttggtgatttgggctaaaaatttctgattgtttctctatatcttagtttggcatctgctggtcgtgattcgttcgtgtggttttgcattcggatggattttgaatctatgttggtgccaaagtattgcgaaagggttcctgctgttggcttttacaatcagatggcttttgaatcaggcaactttgtggcagtatttacagaaggcgctttcttgaagaatttatgttgtttttattgcctactatgtagctttgtccttgcaacttcatcatgtacgttatggtttctgtaatggggtttaatgtactgaaatatctgtattttgacttgttgggatgttatccggtcttattgattatgtcaaatggtttctgggcacttgaaggctttttcttttttgcagttgcagtgggatttggaagaatgtgatattcatagcttttgcgttcaccttggaaatttctggtttgaggctgagttcagctgctatgaccttaagaccttgattgccattgagctttatttctaaatctgcatagtgatctcctgtagccaactagccatgggaaataggtgaaagttcactttgcgtttataatctcttgaaagagtataaattaatggataatgcctcatcagcaaacactgcatctccattggagattttggaatgtgcttttgtttttctgataaagtaagtatctagaacatttctataggattcaagcatagtaatggtactggcgccctgtggacactgcataggcttgactctttctagtgcgatgtgctgattgaaaagtgcatactagggtgtaggtaatgttcatcctgtcataaactcatgcggactttttagcttgtgcttgctgtcagaatgtggtccctctaaatatgagctgttttagcagaaggttatggtctgctgacagtgatctttgctttgtgctgaggaaggatagcattcaaaacattcatacagcccataaccatatgtgttctatttcttatatgcaccataagcgcaatcattaagtacggcagttgaaacctttgctttagagttcttatcctattgtctatagagtcgcaacaactatgcccatccatcagatgtagatctgattttcaaagttgcccccctttccaaatttgtcacaaaaccatctagtttcaaggcttacaacagtagatcaagcacaccaaatggctttacattgctaaatgtcgtgaagttattgtcactagctagaatttgcgcatgatgaagttacagagactattgaggtctccgtaagtttgctacatatcatttccctgttattttccatgtcatggaagaaatctccatctaattgatcaactttcacgttttgtctggtacaactaaatttttgttgtgagaactcgattagtcaattataggcatcattcttgttacaaatgaacataatctttcatatgtggtggtaaaaatctttacaatataatcattactgctgaattgttgtttatattgttggatttccttagtatcatctttcttgaaatggatttttttttgtttcttctagttgtgtatactggcagcagagacgaccagttattatttgatgatgattacatacttcatgtatccaatgggtatattgctttatatctggcagtcactatgattattacagtcttgtgtctatttgccatcatgttctatctccagttctctttaccatatcactgcgtttgcattcttatctttgaacgtgatgtcttgctaatttgagttcttaagcgaacttttcatattttccatgggaccatttcagtataaagactgcattgtggaatctggaaactgttatttcataggggtccgtgattatgaaactttttcttggatgcaatttagcagttctttaacctttttccacacaattctcacacttgtaatattagtggatttgggtatagtagctatgtgggaggtttggattctttatcaattcgtttgcgctgcaaaaatggctagtgaacttaatcaccttttggggccagacgagtttctacaccgtctgattttgtctctatatgtttggtttttaagctgctgttctgcttattgaagcaccttttcactaagagactccaattggacgagggcaccttttctagagcgttcatgcgaattattttttgtggtgatcatggggaatttgtttgtcacttaccatgcacagcatattaatgctctgaaagctgctgtaactcgggtgatgacaggcgaaggagctgtatatgccgtaacatattaaacatgcagtggtatgggctcgatgcgccctctattgaaggaccagacaaaactagagaggtagggactctcttaagcataaaatgttccggacttgaacgtttatcaactgctgctgaaagttcttagcctggtagaacaaagaatcctattctcagttgctccactaatttgccctcctttttgtccaagcatccagcatgcaagtagcctcatactctctgattgaagaaatgcaagtagtctcatactctctgattgaagctttcttcttgatgctaatctgcacttttattttctttcttgctgttcaccttatgtcaccagtgaaccttgtttcctcccctttgtcaattatatccaaccctcctcttatttgttttcttttcaagttccattggtgagcgatgcgtatattttggtggtttcctcggctaactgcaatcgtctaactctgaagtctgaacgagcggagcgggcgaagatgagacttcagttttgtcacagcttgagatttgatactggaactggtggtgctcctgagaaaacaggtgggtgcccacaatgacgttacatagatttttcagattatttttcttttgcaagtactctttactctgcttttcctcggtgaaagcttaacggtcctgtgtctcagctgctactgtagagatactgtagagagtatgtttcatctcaggagaaaaggctgctagtattcaatgtttttcgcattgaattttccctcgagtatgtacgtgtcctgggcaaacgtagtacgtgtcgtgggcaaacgtagtacttatgtgtagagggattatgctgacaggcgcaggagacttgctttgctttggatgtgtccagtga

SEQ ID NO: 25119 - DNA, 8049 bp, Oryza sativa
ggtagttcttttatccttgaattactggataggtacatcaggagctgtcacatttgatctttctagttttcggaatcagatcctagagaaacctggtaagaattgaactaataagcgtgtgatgtagtatgtagaatatctgctgagtagatgtagaaatctggtatatttgggactttgggtatttgaaggtgtgtgattgcccaacagttgatcatggaaaagaaaagggctccattttatcctaggattatacctttttcagctttttggctttgtcctggatgttgtgaccagttcaccaccactaatttatgtttgcttgatccattgtacagggtcctgtatttgatatgcctgacttcaagatgggtgggaagaagagtgatgatgctgctcccactgatgccggggatgaagatggtggtgatgatgacggggacgaggatggtgactttggggaaggcgaagaggacgtttcagaaggtgagggatatgataatccaaaaggcatcgataacaacaagaaaagaggtgagcctgaggaaaatggtgaggaggatgaggaagagcctgaaggccaggagggtggtggaggtgatgacgacgatgacgatgatgatgacaatgaggatgacgacgacgatgatgatggtggtgaagatgatgatggagtagatgaggaagaggaagatcaggacaatgaggatgatgaggaagatgatgatgaagactcacttcagcccccaaagaagaggaagaagtgaatatcttcatgcggctatagttaccaacttaccatgcgctgagctgtgcttggttttcgtcatgttctcggaatcgaacttgcattagggagttaagaaaaaagggctccacacgttcagtaagtgtggatttgtaggagctttatgatttcaagcaattagacagaactctgttgtcattgttgcttgcttctgtggagttgaacagatgtttcgctaacataattcgacctgaatggtgaaagcctgaagattgaatatgtcacaagttatttttacttctttcatgcaactcaaaataaaaaagttagtgagaaaagagtgacgttaaaattaggaataacagcaacacggcccgtagccatttgtgccctgagtgcctgaatgtgagtaactgagtatgtgaccgggttcttcagatctacttctagcgatgtgataatgtcatccggataatttcagaaatatgtttcgtttagatggaaattttaggagtattaatagcatgatgaatatgtattcgggcggtcagaccttcaacacagagtttgagtccaatttaattatttctcgtgcttccttattttagactgggatttctcgagtactaattaatttctaagtctaattggacatggaaagatcctaggaagcaagtccatccctactatgaatacaagggggctaaacccgattgaaacaaaaactaaacaattgccaaattcaattaagtatcaaaccctctatattctacgtctccctctttcttgctacctattttaagtctatttttctcaaatctccaattgcttatcatgtctcatctctacagcattagaggacgtcctaattggcttgatgagcctacgacaaaccggtatgtgtttactctaacagggtcccacttgggtgctcgttaagcggcatctatcactccctatgacgcgtgcgtctccaggttcaaggtgttcaaggtgtggctgcacatttctacgtcaacccttccatcttcattaagttcttttacgaagttatcatttggcttgtacttatgatattcataccgcttattagtaaccaaatactccctccatttcaaaatgtttgacaccgttgactttttagcatatgtttgaccgttcgtcttattcaaaaaaatttgtgtatgtaaaactatatgtgtatatgaaagtttatttaacgatgaatcaaatgatatgaaaagaataaataattacttaaattttttgaataaaacgaatggtcacatacatactaaaaagtcaacggcgtcaaacattttgaaacggagggagtaataatttatcggtataacttttatatatgtatcttagcgatttaaaagcaaatgctataaaaataaggcatgattaaaaatcacaaaattgactaacaaaaaagtttttaaaattaaattccggcttataagcgtaagtataaacggaaagatggggttgtcactctctactaaaagtctaaaaccttggctcgattgtggtgagatataattgttcagaatgcaagtctatctactgttacattcatgtaaaaaacttaacatacgaattaccttttgtttcaggcggagaggtgtatttatatgtttttttgtagcggttagataactccaattagaaagacatttatttatatccgttatgtaatgaaatactccacgtaggttgttacgccacgagtagcgacaaatttctccaacactactgggcaatgcttaatggaagacgactctaacacttttctatatataacaaaaacaacatatttcttatccactatcctttcctacgtggtgttcgtttagtgacgtgtacgtttactattggaggaatagtacgattttgaaatggaatattactagattcctacatcatattagattcttttcgaggccactttgttaccatctctctagtactaacatataacgtgaaagtatataccatatttctcaatcgagttctctaatacacgattttaagggttttctggggctaatcttttttttttctcttaactcttcgatttttttacgtccaaatgagtaataataaatgacgtgtaataacactttttttcctctaaaaaggcaaaataaaaaaaagaaaagaaaaagaaatagcgacgaaaacacaacacaaacgaaacgctctcgagccagagtcaccccctcttctttcttacctcccccaaaccctagccatcccgatccatccactcctcgagatttcggcggaatgcctccgccgccgccgcggtctcctcgctccctttccagctagggctctccctgcccacaccctcccccgcccgcgagatttgcgcgcccccgcccagcgccgattcgagctgctcctgctttgctgtttcggtgggggaggccatgaacaacagcgcgttcagcgaggagatactcgccgagaagctcgccaagctcaacaacacgcagcaatgcatcgagagtatcctttacccacccagctttcctcgtgctaaatcttcgcgagaatttgggtgtttctttaggggtgtgtgtcgatgtttcgtgtaaagttgcaatttttttttacacttcatatcttgcgccctttcacgattactgttgggaatcaagtctcccttcttcatttttccctcctgagactgtgtatcatacttgtatcatactatcgtgttatgtttgtcaatagctagcaacttccttcaactttaagtggatatatctacgagttgcagatgtgcgggtagcacgcaagaaagcatcttgtagcttgaacaagtgcgggttcttgtgtgtcctttttacaccattggtagagagggttcttgtgttgttagtagctctctgattgctatactgtttattagtaaacctaccgaaaataggtacatgttgacttagaatcctgtgacatatttaggtggcgcaaatccatggttttgtttgtctgaacatgtctttccatgatctaatttgttcccttgactttaattcttcgcgactactagctctttcgcattggtgcatataccatcggaagaatgcagagcaaattgtccagacatgggcgaagcagtttcacagctctggaaatgaacagaagaccccttttctctatcttgctaatgatatcttacagaacagtaagcgcaacggtacagagtttgtagaagaattctggaaggttctccctggtgcgttgaaagatgtaactgaaaacggtgatgagcgcgggaagaaggtggtcagtaggctggtgagtataatttgtctactgataggaatttattatatctagttggagatattggtgataagagctatttgatgattactgctgtatatttaatatattcttttataaaatcctccaatatctaatacgaataaccgtgaaaactgcaatcatttaatactgcagtaatatgtgctgtaggttgaaatatggcaagaaaggagagtttttggttcacgtgcggggggcatcaaggatgtgatgcttggaactgttcccctgcctgtattagatatgaccaaaaaacggtctcacggttcctcaataaagatcgtcaaaagagactctcgttctgtaaaacttgtaagctttttttttcctaccccatctgctaaattatgttcttcagcattggaaagtgttatgaaaattctcttaaactcttatcattttgttttcagagactaggtgttgggggaccgctgagaagattgtatctgcactgcacactgttctcagtgaacaagcagatgaagactctgatctggagaaatgcaaaacctcaatgcggcgtgttggaaagatgcagaaggatgttagcagtgcttgtagtaaaggtgctttatattatttgttattgacatgaatcctccatcttagctgtcttagtacatattctcaagttattccttatctgtaggtgatgatcctcgtcgtgaaaccctttgcacagaactaaaggaagaggaggatagcatgacagaatgcattgaaaagcttaaagtagttgaagcaaatagagcaactgttgtgtctgaactgaaggaggcattgcaggaacaggtcagaaacaactgttgtgattatttatagtaatgcatttccattttccgtatgcaattgagttggtatttgcaaaagcttacttgtaatgttatttcaggaatctgagctggagaaagtccgtactcagttacaggtaatgttgtctaaacatcacaaattttattaaagactgatgttgtagcatgtattgatgtaaaatatattattcctatgttttgattaacagctggctgaagctatggtagaagaagcagccgacatgcaacggaaactcaagaacgagccagtcattccttcgtccaagcacttatcctcagtagaaccaggaaagccactttctaatgggcaggcgaaggatcagcagaagacagctgctgctatcctcgcagacaagattgcagcatcatcaaactctcagcagatactgcaatctgcactttccaagtttgctgctgaggaagccaaaaattcatccgaaactcaccaggataagaggctgaaaattgaacattcctcacaggtcccaagtgtcgcgaatgctgccgcttttgttccaatgccacaaatgaccaccacaacagcacagcagccccaggcaatcttagttcagcagactcctatgcaaaaccagcctcctgcacctcaaccccaatacaatatctaccaggcccctccccatcagtttgtccagcagcctggtggtgtaatgatgggcatggcgtacaatatgagcaccatggctccaccaccgcctccaccgccacagatgatgaacctagcaaggccctcaccttcaacaccccagccaccaatgggtataatgccacagactcagccgccaccgcccgcaccaacgatgcttcagcaacaaatgccgatgaacgtcggaccaccaatgcagttcgcccttcagcagtccggcgcgccgtctttcaggcctttgcagccgcccccggggatgcaattcttccacccccaatctcagtgacatttttggtagtccagctcctgttaaaactgtcgcgttttcggtgttagtattgactggtagacaaaaggttctgactgttgtagggtatactgtttggttgttctttacctggagatgttgtacatgtaatgcgaggaaactaacaggaagattcagttaagtgttgagcctttgctcaatcctgcagagaagggcagaagacgtcacctgtttgtgagctccagattggttgatgggctgacgaactgggcaagttcgcgtcaaaatcggcccgttgttttctttttctttctgggaaatgggaataacgcggtcgagattcgagatgattgtagtttgtatatgctgcccatttctgttgttctttttttgtaagcagcaggacaagttctagtaaagaggaaaaaaaaaaccccagaactttggattatgatgattcgcgaaataccttttcgattcgaactggaagtggccaatctacaaatgcgagtatcagccaaggtgatgtttggtacacattcatgtatcgaccgtattttcatgtcctccgtagctaataatctctaccatcctcactattcttctatttacaaaaaaaaaaaacataactttcaccaaatgaacttcaaatttttgatttgaaaaacatggtagtacatttcatttttttatagaatatcaaactgctgcatcttccatctttctgacatttttatgggaaacatttcgagtggcttttcttgtaaaagaattgcgtaataggcgtggacgctctgaatgggatagacacgtgactgggccgtgcggtgaattttacattttacccctcagattagtttaccttaagcactccgctaccccacctctccggaagctttcattcgcgaagccgcacaacacaacgcaacgccgcgcttccgcctctccacccgccgccgcctccctcgccggcttgccgccgccgccgcggtcgcgaggcggagaccttgcgggacgatcggagcgacgtccctctacacccctccccctccgcagcggcgagaagaacaagggggccgcccgccatgctgcgccggtaagggcacacccacaccctgtagatgtttgtcccatccgagttagggtttcctggcctaatgctcgttcctccccgcctctattgcaggtgcgtgcgggatctgtacccgctgcggcctcttaggaggatccctaggccgatctccagcgaggttagcatttccgtttccgtttgtttgcggtcgatcaagttgtttgttctgtgaggcgcttgctgtgtaggcaaatcggtagttttctgagggagctttacttggggcactcttgaattggcatgcttactcattaaattgatggaatgtgtactgatgcgcgaatagatagaaaatgctgctaatgtttacagttgtattaacataggaccttagtgtctctgtgttttgatatgggcctagcaaatcaaggactatttggagcataatgctgttacattgaaccagttttctgcttgatttgtctaaggtcttatgatgatattggggacctaagctaataaccatatctatttgtatcttgcatagctgctatgctgaattttgtaccagttttacacattgtaggtattacgtatttaatgttgtggaacatcacatgaactaaggaattgttgtgtgcgattttcttttatctatattagattgatcaattgactagtgcaatcaaatggccctcctagagtatagaaagcttgatttatttattgattaaaaaaaacttctgctgtgattctgtgaaactttctagttgatgcgagacacagttctgcagtagttgttccgactataataatgtttggaaggcagttgtttggattcaaagaatttaacttgatgtggtaccaaaagataaacaaaatccacttagactgcccttgcttgaactatgatatttgtaacttgatttaatatttttctttatttagctgtatatgcagtttgtttacttctctgtgtaaaatgctgattatcacataaagaagcgaaaaacacagaaaagtccatggtgaattcttgtatcggaaaaaaaataaccatactatcttctcatgataatatgtaatgctacttattctgctgggagcagtattgacgca

SEQ ID NO: 25120 - DNA, 1593 bp, Oryza sativa
tggacttgagagatcctttagaatgtaaaatttgaaatgaattcctatggtgcttcatttaaaacaaatttgtgttgttatggactacacaatatgcagatcaaatggcacaatcggttggtgccaatctatgttttagttcttatgattactctttagcaacacccccaccaatatgtgcatttagcatcatcttgccaaagtcttatgctttcatattatttgatgatgcagtttctgaatactgaataatgacactggcacaacaatctcatcgaactaatcgttgtctgcaggatccatcaagcgctggtgcagttgaacataaatctctggctgagacatatttactacaagaacctgataattctaaagacatggtacgctctcctctttagtcattgttgtggtactaatatcgatgaaatactttctaattacaaggttgatagaaataatttaatggtaccttttcaatgttaatatatctgatgttttctgttatcagggtgctaaggaaagtaaacacgatggtgttattagtacgggaacttctgatgatgggaaaattgtacttgatatcatagaggctattcatgctgctgaaagaaagcaggcagatgcagatgcttacatgtattcagaagagaaaaggaagttgaaggtttgctttcgatttcatattatgactgcttcgttatttactgcattgagtttcaacactagcatgcctttgtgatttacagtattatgttccctcttttcttctgttgaactgatgttttgtggatttgtagcagttccaaatttgacaaatgacgtttataattgattcttttgattttatactattacattttataatggtcagtactctgcttatgttttctcaggagaaatatgaaaaggagctgaaggacaccagggctcgggagctcatgtatgctgaagaggcagcaattctggacaaggtctgtgacattttatattttattatcgctagtctctttgatcatgtttccataaacattgtattctgctggatgcgaacaatgtttctcaccgaaaaaagacctgctcagctatataaatatacacagcttgacgcatacctatatctcaagatttaggtcctttttacttttcatcctctatctttaagactttgaccataggttttttaataataatatcatgaaaaaaattacataaatattcagatgccatgtggctaatatacatatatggagttttaaagttcgaagtgtttgactgcacgaataccatgacaacctacatttggagagggaaggaggagttaaaccttttcattttttctgtggatatgtaatttaaatttacacaaaaagcaaaatttttttgctctatatgccttcgcttcacttcactagacctgtatataatctctctttcctatagaatgcagatcgtgtctcttgtttatattttaatttcagattgattatttttttgtggtggttttaatcttcttttctccttttgttttgttttaggagctgaagaaagagaaattgaagtcagctgctgtgattaaggaactgcaagaaaatg

SEQ ID NO: 25121 - DNA, 2429 bp, Oryza sativa
aatgaaaaaggctgtgggggccgattaatcaagtggaatggtctgggagccgagaagtaatgatctgacccgggaggtcggtacattgctaaatgagttgttgaaaagcatctcttaaagtcgaatcgagacgcaagtctcttttcgcccaaacatagaaagaaataaatcacttagtgatttcaaaatgtcttcaaataaaagatttgcaaaacaaccttgcctctcttccaagcttgcattaaacacctaagttcccgtgacttgctgagtgcgaaagtactcacccttgctctatataaatatatacatagttcctccgccctgaagagaagataaggtgaagtgaagattagggtttcgtcctggttcccagccgtcgcctgtggtgttgggtgttagttcgttggttccgctgctgctgctgttgttggtgtttcctcgtccgtgtcgtcggttgcattctcgggttgttctgagctgcaacctaagttaaggtaaataagtcctctatctattttaaggatttgctatgattcatatttgtcaccgtgggtaccagcactatgtcctgggactggtaccgagatcgcggtttcgtaggaagcggttcgcgccgttttccctacgacacgctcctatcaggtgccgttatacggcggtatcagattggggtgtgacaagagatggtatcagagcattagttggccctaggatcgaaacccctaaataggatggcattatctgaatacaaaaactatttgtgaaagctaaggtgtcgttgtcccctttagctctagttttgcgaaaaatcttttgtgtccaaaagtagaagctagtcgttgttttgacttttatcctagagcaaacctgtcttcacgcccagttaaagaaaggtgagctcaagcctctaggagtcttagttaagcccttgttggtaggctaaccttagtaccgtcacccgctcggtaggagttgtggtgaactagtgcgtgtgtgagttttgtttggtagtccgtgttcaggtgttagaccagttgggttaccggctgggacacaccacctatgtcttctgtgatttcgaaaaccgttttgatgtagtgtttttgtttcctccttttcttatctactttctgcgttggtcagttctcagttcctctgaagcaaatggcacctcaaccaacctgtcagacttgtgtccgcaactaccttggttctgaggaagacccagctttgtcagaaaatccaaatcaactagctgaacaagtcaccaaccaagtcgccaagactggtaatgctgttcctggaccaaacaaggaagttgcaaccagaaaccaacactcctcaatggatatttatcagattctagccaatcagactcagatgctacaagaaatagctcaaaatttggcttctatacaacaacaactgctactaccacagcccaaggtgaatccagacaagagtaagaatgaggccgcagaaatacaaggaacacaatcagtagaaggcactgatacccataaagagaagaacaaagaattcttaaatgtgatgattacagggatgaaaaccccacttcgagctaataattgccccaaccttcagaactcaatcaatgaatccgtatcgcaagaaaatagcatggttaaagaaggaagttgtcacaaaagaaagaccttgccatcagaagttgacatgcaagatgtcccacaatgtcagacactgcaatcttgccaaaacttatccaagacccccaccctcaaatcaaagaagatcagacacgttcccggattcatatgcttcatttgccacgaaattggccattacatgagacactgcccccaaaaaccctatatggatgcactactacaagctaatatgagcatctcaaggatgcccttctatccccaaggaagcccgaattcgccaaatgttaatgcagtacgtccaaccttccctgatgacaaaagagcaaaagcatcctgcgacatgtgccaagacatccaagaaaagaaagagatgcaagaatacaagagacgcaaagtaatgtccctagagattcaagcaaaagaagatttgtgtcgaaaaaacaaactcgccagcacaatactatcagaaagcatctcattcaactagttccggttctacgtctcgttcgactatgtcagaacctggtcagcaagccacaatgatcaacagtagtagccatgaaggaagcaactccgaaccatgccctacaccttcaaaaagacgtggttataaggcaggagtcgaatgtttcatctgccatgggatgggacactattcatggtgctgccctcagaaagtcaagtcaaaacgagtccaaccaacaacaagccttcccaacgtatctggaccaaagagttcaaagtcaccaaacagtggttctgcctcgttgacctcac

SEQ ID NO: 25122 - DNA, 5236 bp, Oryza sativa
attctatgtcggcttattataattcagcttacagtaatctggcttaataatatatattacaataattttaacctgaaacaaacagaggcttagtttatttattgagagaatacggtagtgcagaaggtggagaacggctccgcttttacactagtagacacaaggaagacatacgtgttaccgtttgcgcataataccatatatttcaacagctgaaacacacttgtgtttacgtaaatgcagtggcggagctagaaacaataaattttatctgccatgaaggtgactatcagtaaattatttgaattttgcttaaattcaaattaatctaatttttttttgtcaaatggagggaggttatggtggttattcttctttatgtactccagtaggaaataaaacaataaatgcatgactaagattgaacaataatgaatctgttggatcagttggcaagtgtaaatgattgtactaaccgggaaattggtattagctattaatttatgaagttatgtatttatttttcttcatgcagacatgtgctcctacgtatcaaaaccatgtttcattttttacttcccccagccacagatccttgttggtatcctttccaaaacagttaaaaccagcttatcatactagtaaaaatattattattgtcacaaccatctatcaacttcctaattaatggctacctgtagtaaacaaatcaaaatgggtaaaccaaaccataactaattaaaaaacaatttacacttgtctgcatatttttttaaaaaatattcgataatattgagtttgttatagtttatcactatacttttatatactccatccatcccataaagatttcattttttttctttttccaacacttgactacccatcttacttaaattttttatggattttttatatagtcgcatataaagtgctatttatattttatcatctaataaaaatagaaatactgatgatagaaaaattttaaataagatgaaaagttaaatgttatataaagactgaaaaatagagtttttatgggagagagggagtaatacggagtaataatacacaagtttatcaattcttttacgacgtgctattgggatggtatagaatggacttccttttcttttcctacctcacctaacatttgatgaagagaacggtgaaccgggaaaagccctgtgaattttcaaacttacccagtcagtggatgggatgctatgcgatcatgtgagcgacaagttacaagatccaaaccagtcgtggagcagtcaagccgcgcacgcagagagaggcaggcaaggcaacgcaacgaaggcgaagctgcctgcctctgccgcgccgcgccgcgcgagatctgggcggaagggaaggcgcggcgcgacgcgacgcacgagagaaacaaaaggaaaagggaggggcgggggggacaaaaaccttcgccgcacaaagcggttaccgcgtccccccagatctcgtcgccgtgccgtgccgtgccctgcccttgccccgctggataccggcggcgcaccggcgcggccgcgcgatccgatgaggcggcggccgttcctcgaccagcggcggccgtcgtcgttcaagcgccggtggcagcagcgcccgtggtggttccgcctcgcggtcaccctcctcctcgccctcgcctgcctcttcctcctgctcgcgctccggggctcgcccgaccccgacccggtggtgctcccctccaccgactcgtccagatccgcggccaccacctcccctctcctccatcaggtgagcgaatcgcgtctcatatctactttgcttcacatttcgttagctcatttgcatttggcttttgagttgatccggttttaattagttcatgatcatgagtagcgtttgaaattcgtggctcctgtaatgtgcagagatcttacctcgatggcgttacggatgcgttcaacatgaccgacgaaatgctgagtgctcactcgttttcaaggcagcttatggaccagatttcccttgcaaaaacctacctcgtcgttgcgaaggaagccaataacctgcagtttgcagcagagcttagctcgcagatacggcgggcgcagagcatccttgcgcatgctgcagcccatggtggcacggtgacggagcaggatgcggagaaggcaattagggacatgtcggtgttgttcttccaggcgcagcagttccgctatgatagtgcagttacaatcatgaagttgaagggtcagattcaatccctagaggagaaatcgaaagctgaggcggaaaagagcaccaagtatgggcagattgctgccgaggagcttccaaaggggctttactgccttggagtccggttaaccatggaatggttcaagacaactgagctccagaggaagtttactgagaggagcccagcagtacagagcaacctaagggataacagcctttaccattactgtgttttctcggacaacatccttgctgtttctgttgtcgtcaattctacaactctaaattcaatgcgccctgaaaagattgtttttcacttggtgactgacgaggtgaattatgctcccatgagggcgtggttcgccctgaatgattacagaggagccactgtggagattcaaaaggtagaggatttcacttggctcaattcatcgtatgttcctgttcttaaacagctccaggatgctgccacccagaactactacttctctggcagtggtaatcgtggaacaccagtcaaattcaggaaccctaagtacttatcaatgcttaaccacctgaggttctatatcccagaaatctatccagaattgcgtaaggtcgtatttcttgatgatgacattgttgtccaaaaggacttgtcggaattgtttaccatcaacctcaatggaaatgttatgggagctgtagagacttgcatggagacatttcacaggttccataagtatcttaaccattcccatcctctaatccgtgctcattttgatcctgatgcctgtggctgggcatttggtatgaatgttcttgatcttgtgatgtggaggaataagaatgtgacaggtatatatcattactggcaagagcgcaatgctgatcataccctatggaagcttggatctttaccacctggtcttcttgctttctatggcttggttgagccattggaccccaaatggcatgtcttgggactgggctacacaacagtggatcccgctactatcaaagaaggtgcagtgttgcattacaatggaaatatgaagccatggctaaaaattgggatggagaagtacaagggcttctgggataactatgtagactattcacaccctctgcttcagcggtgcttcacgcactaatgaatgtgtatcaacattagaattttttgtgaacttcctagtggaaatgcttcaatgccttactcaacagccacacgtgaacacagtaacagaactgattaactttgtcctgaaattacatcctcagattagacatgggcggccgtttatactacctgtagttgatgaagtacagcaaccacagatgtgactggcacaggtaaacatcagaaagagccaagattgccatggattaggctgttatttgagcagcgtccattatatacattcataactcgcaaccaccaatgtaattttttcaattttgattttttgggtgagaaaattgagggcataattgtagatttgatttaaaattcttgtggtgtcacagcaagttttgagatatatatatttattggatgttcagagtaaagcttattgtttaaatgtctcacaaagcataattatcgtatatattttctaaatgttgttttgcactttgcatgccctttatgaggccatgcaatgttagtataaagtataaacaaagttagctcatccaggaaatgtgactttatgacatgatgtcgtagtaatcataaggattatcatgtttaacctcagagagaaatttagtgcttacagaacttttgatgaattgtcgtgcaagaaagtgtttacacaaaacaaagtgtaatattcagaacagaaatattatttgtgctgccatcggctacaaactggtaactgcagctgcttagctattattttctttccttctcttcagggctatttagcatatggcagctatctgggtcatctcttttgaattgtttttgcagttttcctatctataccttttatgattcatcattgcattgcagtcattttccaaatccaagtatctttttggttttgctgtggctaccttactttggtgacttctccatcaacattggtagaaggagcattggtcctctttttccttctggatctaaactttctccgcctacgtctcttgcttgtctcttttgtttcatcattatatatgggcatacggggcttcacatctgcaggatcagccacaggttcaacagcctgtgtactgttttggttggcttcactcaagctatccttcgaagtctccagctcagtctcaggactggtttccttcattggttcaacttcgttgctggcttccacctctttctccagcagattactgcctctgctttcatagttggcctcaccttgtgagttctccaactgtctagtgctatctagttcttctgtgctattatcttgactatctgccaatttggggctccactgaggaagttcagatttccccaagtggcttccctctagagcatcatttgaattatcattggcatcacctgttgttttgtcttgtggttcatcatcttccctgttagttctaagctttataaagtgttgttctggggaactattttcttgagggttgctctctgatgcagtggtgttgtagggatgcggttcttctgtagtagcaggtgtggaatcactagagtttgcatacttatcgaccaccacagtatcaacagttgcattttcgttgtttgtgcttgctccagtgctctcatcttggttactctctgacgcactattgtcgtaagaatgatgttcttctgctggagcagagtcaccagggtttgcagaattctcaggtaccgctgtgtcagaagttgtattctcattgtttgtgccaaccaaaatgctctcgctgatatttgtatctgatttctgtagtcgtgcaacttggtcttgatctcttcaagctcagcttctttttgctgcagaagttcctttatagctgccatttgttcagggcctgaagcagccgc

SEQ ID NO: 25123 - DNA, 9441 bp, Oryza sativa
  unsure (1)..(9441): unsure at all n locations
atgaatgtcccatcagcaaaaatgacctgattcaatttgattaaccattcttgtatcatagcacactaatgaaaggtctttttagaacataaaagaaaagaacaatgtgtagtactccctctgtcccaaaatataagggattttgggtcggagggagtcctccaccttgatctctgcttttatgggcaaggaggacctttattagtgtgctttgatacaagaatggtcaatcaaatggaatcaggtcatctttgctgatgggacattcatnnnnnnnnnnnnnnnnnnnnnnnnnnnnnnnnnnnnnnnctctcaagcataaccaggagtttccccagcagttggtttaataaatgatcctactgggcaagtttgttggactatttcgcagaatgctatgagtctctccctgttgccaagctctactgcctgagaaaatgaagagataatttatcactgaaatgcctagactgcagtgttctaaactcttttaaggcttggttggccttctgtcagtactcaaaatcaaacttctaattggatggttccttcagccatatatgccgcactatcatggctgtatgaatatttttgtgctggtgaagtgatgtttaaacatgtagatccaacctgcacaatatcatggcgaggaacccttggaagtggctgaactctatagcccttggttgacatgacttctgcaataagcatgcctccctgtggatggtataagactgtcacttgatatcttgcatgctgttttattttttcattttattggttaaagatgtggaaatttataaataacttaccttgacagcttctccaaccatttgcggagcaagaaacaagccttgaaacagtgcccgcatcacatgtccaggtgtagacccaaactctaccccaagtccaggtgcagacaggcgagctgctgctgccgcaaccaaatctttcttccctgcgacatagccaccacaaggtgcaattgtcccacctggattctttatcaaactacccgcaatcaaatctgctccctgccatgaaagtacccaatcaggtaactaaaatctaatgcttaaggtggctacaagcatgaacataccaccattggaggctctgacgtctcaacaaattcaccatagcaattgtcaaccataaccatgcagtttggattttgcatctgcaatgagttccaaaacatgactccatgagcaaatatcaccatatgcattagttaatgcacatacagaacatgctggtccatgaattcacaacatatcatcttgcctttatcaaatctatagctcgctggatatccgatatgcttaggctcttgcgccacgaataaccacaagatctttgtatgaaggcgcatccggtctcaggtctgacagcatttgcaagagcatcccaatcaaggccaccatctgctgcaagctacaactgaagccacatcagtaactcacaaatagcacaatgtaaagcattcctggtgtttgtaaggtgaagaaatcaacaaaccggaacttctcggtatgccactccaaaatccttgagcgatcccacattggccgaccccctgatcccaatcacctcctccaaggtgtcatagggaggaccagcgacagccaggagctacacattttctaaattttcatcagctcccagtttctaagctagcagaagcaatgcgaaaactcagttcatccaggtgttctctaatctcttacctcgtgtccaggcctcagaagagcaaacagagcacaggcaatggcgtgcgtcccggagaagaactggaaccgattaacaaagagctcatcactagtacaagaagctcagtttttcacgaacgcgcaaaaggattgcgcgtcaatatattacggtgtaggtacaagaagctcagtggagctcagcaatggaagcagtggagagagtggagtggaatgtatggagaaatggggggagtcagagagaaatggtagcgcgtgtggacatggaacctgggggcggacaatggcggcctcggcgccgacgatctgggcgaagacggagtcgagcacctccctgccgcccccgtcgtcgtggccgtaccccgtcgagccaccgaaatgctgaaattcgcggatgccgcgtgcgcgtcataccctgaacctgacagcgagccgcatacggcggaggaggagagaagacgagggaggtttacgtgcggcgcgacgtgggcggcgtggaaggcggcggagacgcgggcggagttgagggcgagcgcgcggtccacctcccggaactccgcctgcagcgactccaccgcgcgggacacgtccgggtggaacgccgacgcgcgcgccgcacgcctgccgccccgcgaggcgggcgcggagcggggccacgcgacgagcggggagacggcggcggcggcgcccgtcatccctttcgctccgcttgggcagacgttatcctcgtccccgcgaaatgtttcgcctcccttaagcccagcctaatgcggccatgtgaagcgagaaatgggccgtggccgtctgatgaggcccattacgagagaatctgcttcggcccaggcccagcaacctagtagctctttcaaaaaggcgaaaccacccccaacggcgattggttgatggtgcgaagcaaagcatgcggggtaacacgccacacaatgcttgcactcaacgaaggctagctaagctaagcttaaatcattgcctcccactgctccgcttgctgcatgctgctctatatcacttgctgtgtcccggtgttttctctcatcaggatcaagctcgtctcgttgatcaatggcatcagacaagtgctcatcgtttctactagcagcggcagcggctgcagtgctcgtcctcgcgtcggcgccggtggctcattcgtggagcaaggagggtcacatgctcacatgccgaatcgcgcaggtgaatgatcactatcaatcgaaccattcctgaacatttaggctgaatgactgatgattatgatgccgtgttggatgcaggatctgctggagccagccgcggcgcacgcggtgaggaacctgctgacggaggaggcggacggcgacctgtcggcgctgtgcgtgtggccggatcaggtcaggcactggtacaagtacaggtggacgagccctctccacttcatcgacacccctgacaaagcctgcagcttcgtctactcaagtacgcttaggcaactcttctcctccatcagtttctgaattatgctatactctgaatctgctgtgataatggtgtatatgttgatctgtctgtcgcgtttgggttttcaggggattgccatggcgcggatggtgcggaggatatgtgcgtcgctggcgcgatcgcgaacttcacctctcagcttatgcactataatcacggcagcgccgatcgcaaatgtgagaactacgcagttgtagtatatcatatcaaccaatatagtttagttgtcatgtatctcttgtctgactgttcattttctttcatattgttgtaactgcttgtaacgcagataacatgactgaagcactgctattcttgtcacacttcatgggagatgttcatcaggtaaccttaccaattagtctactctcatgcactccctgcaacagttcatacacatcaacatactaactattttatctgtccatccagccaatgcatgttgggttcacgagcgaccaagggggcaatacgattaatctacgctggttcaggcacaaatccaatctccatcatgtaatcaacttccttgatccttgcacataattccttccatgtgaaaaacctgccgttaagctcaatttacttacttttcaagtctgtctggtgttttttcaggtgtgggatagggagatgatactcacagctattgctgaattctacggcaaggacatggatgcgtttcaaaaggaccttgtgcacaacttcaccacggtaagagaactgcctgaaaacaactcttccaagcaaagaaacatgagaaaaattcctgcaaaattattttgaacgaacgaatttctgcaatttttcatctccagggaacgtggtctgatgacgtatcctcttggggagactgcgaggatctcctgtcttgctcaaccaagtcagtacaatccaaaattctgaaaccacaattctgtattgtttaacaaagaaagaatcgccttggttttttgcattcgaatcatatttttctatcatacaacaggtacgctacagagagcataaatttggcttgcaaatgggcgtacaacgatgtccgtgaaggcgaaactctgtcaggtaatgctgcctttgctagaacaagcacacatctctgaagtctgaacctagctgatgtcatgggattgtcaatttgttatttccagatgactacttcggctcacggctcccgatcgtgacacgacgaatcgcgcaggggggagttaggctggccatgttcttgaatcggctcttcggggagcacaaccgtgacgtcgcatcaccagcctgaactgatagctgcttcagaattcagaaaattcagaagttaaccacacgtgtaatctaacggccgcatccatttcattttatttttacgtgatacgtgactctatttttacgatgaatagttgatgccaacaatgctgattaattaaccacatagtaatacaagtaagcaacgcttgaaatcaacaggacatagcaaaccaattccattcttttctgatcataaagagatgtacatccacatgtatgattaattgtatctagacaagattcaatgactatactactctcattgcaccaagctgtttctgctttatagcctactagaattttttttaaaaaaaaattgctagtatgccccaaagttgggttgcatactcagttttgctacaaacgtgagtggctttgcagatttcatttgccacagagttctggccgatattctctctttatcgtgattttctgcttgatgccgcgatggtgaattatcccatgggctgcatgcatgggccaaattactcgcgttacagattcttttggaaataataatgatagaggtacgttgcaatttttttaacgcagtcatgacaaatttagacattctttatttctaattttactgaattttgttgtttttgtaaaggaacaatataaataagcccgaaatgctcttgagtcttgacaccataattttggccaggattttttgttatctctagtgaaatgactatccatgatcatcatcagatgaataattaaacagaagacatgtgcatgcaacacacgcgttttccagcgcataaatctgactgttccctatcgagatagtagttcgacactgaccaaaacggggagtttgtttcactaatcacggcgcggttttagaggccccacaccacgcacgcagcagctaggtgctaatctaacgtagtttttttttttttgacgcaaatctaacgtagttttttagcgaagcgaactgctggattccacggtgttcgtctcgccaccttccatttctgtttgatgatttaatcctctgcccagttcttcactgacgaacgaacaagctcgccgccattgccaaaccaccttcttcttcttcttcttcgcctcctcatcatccacgatcaggtccatttgggagatcaatgcgaaattgtgcagttgctgcgtcgttctggggcggaattgattgtgttcttcagtctatctaatccctattaatcgatcgttgagggtttgagatcggatttggcgatggcgattacgaaggttctcggatcgaaacctgccgactgcttccaatttcaagatcctaattcctggtacttcttcacctgtcgctcgtcctatcccctatcgtatctatccccaatcatctccttgttcatgtttgagacgctttgcgtgtgttcatctcctaaacgattcgttaacttctatatatatgtatatatatatttgccttcgttagggttcaatgtgatcctaacatatgacttgttgattgtgtccctgtagcgcacagactgcatggattttcttccatgaaaattcttcatttcaggttttttttttccaaaaaaaatatcgctatctttgatcaggttaagatgacagtaactcgatcataatacacctgtaagatgaacttaactttcagttttgaccgaatgtagcacataacagagaaaataaactgagatgtaaactttgacacattaacagaatagatgagcatatttgagatgaacagtgcagaatcttttgggtctctttcctgcactctgctagtggaattgcatgttatcctggttttttttttgacaaaatcaaaatttctcaatcttgcaggacttgcatgactgagcttgtaagcgatgtggtcgttgaggttggagatttctccttccatctccacaaggtacatctgctacactgatctctctttcaatctcctatctttttctagtgcaaattcactattgagtcttgaagtacaaatgcgcaataaattgaactcattacacatgcgtcaacaatttggtttcttgatgaaaagatatcatctgtcatcctgttttcttgttccatgtcctgtttgaggtagctgaaatcgatatattgatggattatctgatttttgtgacagctatttgagggtttaaatgaatgaattaactactacaaagattaaaaagaaatgttcaagaacagggacagaagccttaaattctgcataatctgaacattttaagatttttctctactgacgtgtgtcaaattgctcttccatttccagttcccattgatgagccgaagtggcacgctgcaaaagctgataagcgaagcagccgccggcgccgacgacggcgagccgtgcagcgtcaagctccacgacgtccccggcggcgccgcggcgttcgagctggcggccaggttctgctacgacgtcagggcggagctcgacgccgggaacgtggtcgcgctgcggtgcgcggcggagcacctcggcatgaccgaggaccacggcggcgagggcaacctcgtcgagcaggcggaggcgttcctccgcgacgtgctcggcagctgggacgacgccttgcgcgcgctgcggtcgtgcgacggcgcgctcctcccgctcgccgaggagctcctcgtcgtgccgcgctgcatcgacgcgctggcgagcaaggcctgcgccgacccgaccctcttcggctggccgatggtggagtactacacggcgaggggcctcgaggagacggtgatgtggaacggcatcgccaccgccggcaagccgaggtcgccgggcccggactggtggtacaagcaggcgtcgtcgctgaagctgccggtgtacaagaggctcatcacggcgatgaggtccaagggcatgagccccgaggacatcgccggctcgctgacgcactacgccaagcgccacctctccggtctgacccgccactccggttacgtcggcggcggcggcgcgtcggggaccgtgctctcggacgtggagcagagggcgctcctggaggagatcgtcgcgctgctccccgtcgagaggggcgtcgccacgacgaggttcctgctcgggctcctccgcaccgccacgatcctgaacgccggcgcggcgtgccgcgacgcgctggagaggatggccgggaaccagctcgaggaggcggcgctggaggacctcctgatccccaacaccggctacgccgtcgagacgctctacgacgtcgactgcgtgcagcggatgctggagcagttcgtcgccgcgaacacgtcggcgttcgccgcctcgccggagatcacggacgaagcccagctggtcgacggcccctccggtgagctcatgccgatcagcacggtggccaagcttgtcgacggctacctcgcggaggtcgcgacggacaccaacgtcaagctctccaagttccagagcatcgccgagctcgtcccggactacgcaagggccatcgacgacggcatctaccgcgccattgacatctacctcaaggtaagcaaacgctcggagagacagagtcttgaactggacatttttctatggaaaaaatattaaaaaaattagtcaaattaattgagataacataagtctataaaaaaacatgtgagaataaggccatatttagatctcatggtaaaaaattaatttgttcctgtaacgacccgcctctcccaggtcgggcccacttacatctggcagctttcatagcctctcccaggccgggccagataggtgccctcacagaccaacacatctgcacactttgtgctcattcgtcgttctttggaaattggcttccggaaaagaagttgcaacttattgatatgagtattctattaatcttattaagccctaggccgggatgttacagttccccctatcacatcgaatgtttgaacacatatatggagtattaaatataaatgaaaaaaataactaattatacagatgacgtgtaaattgcgagacgaatcttttaagcctaattgctccatgatctgacaatgtggtgctacagtaaacatttgctaatgacggattaattaggcttaataaattcgtctcgcagtttacagacggattctgtaatttgttttgttattagtctacgttaaatacttcaaatgtgtgttcgtatattcgatgtgacacgccgaaactttacaccactgatctaaacacagcctaaatttgatgtacaattagaaaaaaaaattctaacaattaataatacatgtacaacagatataatttgttttttttcctcttgtatagattgaatttaaacttccatgtttgtgtagtgtcccatattaaccctaatctatattatcaaattttatgaatattttttatataactttcatgtctcgaactgcattagagcagcaacgtggtgatgctctggctgtggacgcaggcgcactcgtggctgacggcgtcggagagggagcagctgtgcaggctgatgaactgccagaagctgtcgctggaggcgtgcacgcacgcggcgcagaacgagcggctgccgctgcgggtggtggtgcaggtgctcttcttcgagcagctccggctgcgcaccacggtggccgggtggttcttcgtcgccgacaacgtcgaccagggctcccccatcgccgccggccggtacgcgccggagaggagcggcgagctggacttcggggcggggccgccggaggaggaggatggcgacgacgacgacgacgaggcccggaacaacgtgcggtcgtcgtcgtcggcgacgatgagcgtggacgacatcaggcagcgggtggtggagctcgaggaggagtgctcgagcatgagggaggagatccaccggatcgggaagcccaagggcgcgctgagtaggctgttccggaagctcgggct

SEQ ID NO: 25124 - DNA, 2258 bp, Oryza sativa
taaggttcaaacagtatgcaatagatgagtactccctccatcccaaaaataaaaagacaaaccctgatttccgtgtccaacgtttgactatccgtcctatttgaaaaaattaaaaaaataagtcacgcataaagtattaatcatgttttatatctaacaacaatgaaaataataattataaaattttttatggacagtcaaacgttggcacgaaaacccacggtttgcctttttttttggaacggagggagtaatgactaagctaggtttattttatctataactttctttttaggtacccatgcggccatgcaacatttgcattacaggtgcaatcttgaaggtttgtcttaaggagaaatttttagcaaaaaccatgagcagaagcggaaacactaacattccactctaaaaaacgaaagccaagctcgctcacttctctgtaaatatgtactcctactagccagcatcaggatttctgatttcataaactcgacccccgaaaatcatcatcattgtacagaagaaaatttacatccgcagcaaaatcggcaattctatccaaattgtgcctcaactggcgactaaaacatcaagaatgccaagtagcttgtagctacatgccaaaaattattagctctgttaaaaggaggaaagttcagcagccgcctgacaggaatggctctggctcctatatattcaggtatttgcaatatggtcttaagatatttgtgattggactgagtaacgtaagtctgtaactcgcagatcttgttgaatactacattgatgaacaaaatcacgagaatgtgatggaagaagcataagaatggaggagagtaagcgtctgctctgctattgcacgtttccttgcctgcttcacccactcgctagctatttctgctgcttcactcccttgtaaccctctttccaaggcctccgctgctgcactcaagtctccatgtataatcaagttctccactctgtttagaagagactcaattccgtctccagattggtcctctttgatctgaaaaccatttacacaaaatttagaaatccagtttgatgttatatgacagaccactgttagtgtttatcatgcaagagggaatttttgagatcacttgactgccaaacaaattaagaacaagaaaacggaagcttgatagccagctagctgaagaaacttattctattcaatggacggttcagtgtcaggcaacaatgcaatagggaaatctaaaaaaaagtgctcaaatcaaagctggtaaagatccctagggcaaatagggccactacaagtcaaaagtggtaaggaaatacaatgcctggaatagacactactaataggtagttgaccagaaaattcagaaccagcacacaaaatatttcagtcacatcaatataaaaaagctaattgatgatcagtaagaaaacaacgtcaatttattttcaccttaatggatgaagccacatgagcaacagcatgagtcagcataccaccaccacccgctggtataaggctgaaatgcctgactgtttccttcaaggaattaaactgcaacaagaaataatgatatatcatttattctggactaattattgggtagccaagccagtttttctcagcgagcattcatgattaacaacagttaatatttggagcaggtatttaggagcaaaacaagcaagaaggtggaggcatcattagaattctcacacaatgatgaattaataatgtcgagcggtgtggcacactaagtaataaggctatgagctgtaatcatttattgcaacacaaggaacttaccttttgtttcaaatccataggggtatctgatccgtactcgagaacacttctggaattgatgaaagagccaattctaacagtgagtccttatcaataccttcaagagatttgcgcaattgatccacctctgtccggattggtgatccagtggatagagcatcttccaaagcaagagtaccctgcaagaagagttacacgttcagttgacatgaacttaggaagcctgaaagaaaaaagtgagatgataactaagcttgaaatacttggatggcatcaaagtgaggattttaccagagccagcttatgaaccgaatgacttgccgagtttcttcagatcgtgcataaaacgccatgcacaaagcatctatttgaaaaatatgcaaaaagaaaaaaagcgaaattaaaaaaatacaagcaatctgaacttccatgtattgcacaaatt

SEQ ID NO: 25125 - DNA, 519 bp, Oryza sativa
attgattgctcaaaaaatatatattataagacaagtagtttcatttgtaaaccatcgctccagagtatagaatccttatacgcaaaagaagttattaatcatccttcaacccacaaaagtcatgcagttgccaaaatggaaagttaaaaaatagaagatgttgcagtcgaccaatcaaaataaatatgatggtaaggatgggcatatagcaagtagacataagttttccccacaaaaataataataatagagaagatcactgaagttcaaacctttggtccatctgtatctgtgtgtacatgatgggaaggacctgctgttgctaggctcgattgtaccggagaaactgaagtggttgtcttgtcagtttgttcaggaagaacttctcctgttgccttatcatcaacacttggatttatgtcaataacaggaatatcttgggacagtggtttagcagcagctccatgttcatctggaatttgcggtgtcccctgggcaagggtttctttttccttttct

SEQ ID NO: 25126 - DNA, 849 bp, Oryza sativa
tgttgggccttcgctgcccgtgtaataattatatttacgcttccgtttgttaaactctgaattgtatcaacttttggtgtaccttgcctcctgggacaaggaacaatacacgcacgtcaggaacgcctgttgggtgatttccggtcgtgacaagttggtatcagagcctcccttgaccctaggacgagccgtagatcccaagccttagcaatatttttgaaaattaaaaatcttttgttatttgtgaaaacccgctattctctctctgtcttgctgcttcatttatcgccaaaatctgatctctaaaatgctgtttttcttttgtttttgtttgtagatggccggcagcgtcacccgtcgtggtttggacatgactggcttcgtcctggagctgcggggcatgtgcgtggtcttggggtatccacatggagtggattaccaggccaggccgctcccggagcaggagggtgaggatgcagagcctcacgctgggtgggaggtcactgcagtgatcctctctggctctcccgagcggacttcgctggcagtcaccgcgggtggggattcttctcccgccgcttgccagaacgccgctctcctcgccatcggcaccctccaccagcgctacccggacgagttgcagcactcgccctatcgctaccaccctcgtcgcggaggagcccgcgacttcgccaccttccgagatgctagcttggaggatgacgctaccgtcgtgcatctggcacgcatggtggaggcatacgacgcggctcgtatcgacttccatcagatggtgcgtcgcgggatggttgagaacaacctgaagatcgtggagcggcgtcaggagaa

SEQ ID NO: 25127 - DNA, 1810 bp, Oryza sativa
cggctttatcttttgtatagcatggttcattgcggggcaccagactgagaagtggcggagataagcccacgggggtcgctggggagtccatgccttgtttataagggggtgattatgatccaggaaggtgcgctgcagtggattgtgttgtatgaggggtattgtcataactcctttccgaggtaccgtggtggtattgaggcacatggtgacatgatgtggggttgtgtcttgtgggtacagtggtacagctctgatcagagtaaaactattcgaatagccgtgcccgcggttatgggcgggtcgaacaatgtctttcgtgattagtttcacacttctcaccttagtaagagatgcttaaattggtaataatttgattagctcctggtttggaatggtatattcctggtttggagatagaactgtgcagccgggatggttgttcagaatggttgggcctatgcaacagggtatgttgtatagcgttggattaatattgtttaattacttaactgttttattaaattctcaaatgtttgctaaatgctgcctttgcaaatgaaaccctattatgccctcctttgttatcctgtgcacttgcatatttgctgcgtggcttgctgagtatgtcatatactctccttgcaatcattcatcagaagaagagttcttcattgaggctgatggagtggaggattaggtgtagccttggtcaagctgcctgtggagtggagccgtctgcgccgtttattttattttctgctgcttagatctttattgattgagaggaactatctacctccgtaatgacattttatacgcttaataattagagtaataactgtactctattatcaatttgttattgtgtgcctcggctgattcctggacgagggttcacacacatgtaagcgtttggaattttggatagaaattccaggcgtgacaagttggtatcagagcccctttgaccctaggttatgccaaatggttacccatagaagccttctaaaaatattggaaaagtagaactgttctcctctctttctcttttaattaaaccaaactaatggcacatgcacttcataatctcttttaatggttctcattcaaaatttattccagtgttattagtactgtacatctattactgtactaatggctcattttccagcaaaagttttacaatgatgtttcatttaatcttactgcaataaaataaatttagcaagttgattttataactttcttttatttcttttgaaacttgttattcaaaagtacaaaacttgtgacctcattttcaactatttcaactcatcttgcaagtttggtttactttatttacttaccttttgctttgattttcaaactttattcaaaattaatccaaaaacttgtgctattaattggataaatgttttaactccctcctttcacttgtctttagatgccgcgctacaagcctgagtacttgtttggtgttgagggttttgtccaggagttgcgtactatgtcctttgtcattggatttgggactgcccctttttatgcctagattcgtcatgatcgtcatgaagagaagtgccgagtcaaagttaccttgaacagtaacagtgaagatatcccatcagtgatgttcgaagctggaggaaggaactacatccatgcatgtcaggaagtggcaaggatcgccataggagagctccgtgatcgctacagtgatcagttggccgacactgagtatcgttaccatcctcgtcaaccgcagggaagtgaccgtggcagttaccttgagactgaaggaatt

SEQ ID NO: 25128 - DNA, 1311 bp, Oryza sativa
tttaggaccccagtccatgccacaaggaggttcttcgtctgttgttcgtccgcagcgttagttcttcaacaacaatgctggcaataacatccgcaatcaagctccacgtcctgttgcagcttcgacacagcaacaacctgccaagagggagcaaggcagcaagcctatggtatgcttcaactgtggagacccaggacattatgctgacaagtgtccgaagccccgacgcgtgaaggttgtccctgcccagagcaactctgctgtaccagcatcaaaggcccgtgtcaatcatgttgcagctgcagaagctcaagatgctccagatgtgattttgggtacgttccttgttaactcagttcctgcaacagtacttttcgattctggtgctacacattcatttctatctatgagttttgcgggaaatcatgggatggaagtagaagatcttagacgtcctttgatggttagtaccccaagcaatcaagcactctctttgcaacgtagcccctatgtcagaatagaaattcaaggggtaccatttctggccaatcttatattgttagaatccaaagaccttgatgtcattctagggatggactggttagctagacataaaggtgtgatagactgtgctaacagaaaagtaactctcaccagcaatgatggtcgagttgtaactgttcatgcattgtcttctgagtttttaaggtcaagactgaaccagataactttggaagagattcctatagtccgggagtatcctgatgtgttcccagatgatttacctggtatgccgcctaaaagggatatagagttcagaatagatttggtacctggaacaactccgatccataagagaccttatagaatggtagccaatgagttggcagaagtcaagaggcaagtagatgatttgcttcagaaaggatacatcagaccgagttcatctccatggggagctccggttattttttgtggaaaagaaagatcatacccagaggatgtgtgtggactatcgtgcattaaatgatgtgactattaagaataagtacccgctacccagaattgatgatttgtttgatcagcttaaaggtgccaccgttttctccaagatagatcttcgatcagggtatcatcagttgagaatcaaagaggaagatatacctaagacagcttttaccactaggtatgggttgttcgaatgtactgttatgtcttttggacttaccaatgctcctgctttcttcatgaacttgatgaatatggtgtttatggaatatctagacaagttcgtggtggtctttattgatg

SEQ ID NO: 25129 - DNA, 1282 bp, Oryza sativa
  unsure (1)..(1282): unsure at all n locations
gccccagcagatcctccgatcatcatcataagtagtgatgaagaagaagaatccaagcgcaaccattccaagattgagtgggtagcaactcaagatgatgaagacgagccgaacgagccttcaatcgaccttcgatgctcggaagaacaagagtagcttgttaagtcgttgtcttagatcgttgtgttagtttgcttcttttaagcttgcttgtgtgtgtgtgggtcttgcatgtgatttacatcagtggtgggatataagtacatgcgtttgtttgctttttgagtgttaggaagttggtgagtttagtggtgtgagagtcttcagtttgtaataatgaaactcagttaagatcaataaaagttaaagtaattctctgtcctaagtagttttcccccggtttctcttcttgtgccctatccatgccagatggtgaacactcgcagcaacaggaatggtcccaatctcaacaaccccaataacaataacaatggagagaatccaacccttgctcaagttcttgctcaacagactcagcttatgaacatgatgatgcagcaacttcagaaccagcagaaccaaggaaataaccatgcaccccctcagaataagttagcagaatttcttcgtgtaaggccgcctgttttctctagtaccactaatcctgttgaagctggcgattggttgcatgccatagagaagaagttggatttgcttcagtgcactgatcaggagaaggtctcatttgcatcacatcagttgcatggccctgcctctgaatggtgggatcacttccgcctgaataggactactgctgaacctatcacttggcttgaattcaccgctgctttccggaagacacatataccatcgggagtggtgtctctcaagaagaaggagttcaggtcgctcactcaaggatctcgctctgttacggagtatttgcacgagttcaatcgtctagctcgttatgctccggaagatgtacgcaatgatgaagagcgtcaagagaagttcttggaaggacttaatgatgagctttcttacccactcatgactggagattatcatgatttccagaagttagtggataaggctattcgtcaggaggacaagtataaccgcatggagcagaagaaacgccggattgctcacttcaaggcacaacaggggagtnnnnnnnnnnnnnnnnnnnntttaggaccccagtccatgccacaaggaggttcttcgtctgttgttcgtccgcagcgttagttcttcaacaacaatgctggcaata

SEQ ID NO: 25130 - DNA, 7862 bp, Oryza sativa
ctagacaagtttgtggtggtctttattgatgacattcttatctactctaagaccaaagaagagcatgaagaacatcttcgccttgcattggaaaagttatgagaacatcaactgtatgctaagtttagcaagtgtgaattttggttgtctgaagtgaagttccttggtcacgtcatctcagcaggaggagttgccgttgatcctagtaatgtggaatccgtaaccaactggaaacaaccaaagacagtttcagagatccgcagtttcctaggcctcgcaggatattatcggaggtttatagagaatttttccaagattgctaagcccatgacacgactgcttcagaaagatgtgaagtacaagtggtcagaagaatgtgagcagagttttcaagagttgaaaagtcgcttgatatcagctcctattttgattttgcctgatccaaagaagggtttccaagtgtattgcgatgcatccaaacttgggttaggttgtgttctgatgcaagatgggaaggtggttgcctatgcatctcgtcagttacgtccgcatgagaaaaactaccctactcatgatcttgaattggctgcagtagttcatgcgttgaagatttggcgtcattatcttttcggtactcgtacagaggtatatatcgatcacaagagcttaaagtatatctttactcagtcggatctgaacatgagacaaaggagatggttggaattaattaaggattatgacatgggaattcattatcacccgggaaaggctaatgtagtagcagacgctcttagcaggaaaggctattgcaatgctacggaaggacgacagttgccattggaattatgcaaggaatttgaaagattgaatttgggaattgtcagtataggtttcgttgcagccttagaagcgaagcccactctaattgatcaagttagagaagctcaaactaatgatcctgatatccaagaaattaagaagaatatgagaagaggaaaagctattggtttcttggaggatgagcacggaactgtatggttgggtgaaagaatctgtgtccccgacaacaaagatttaaaagatgcaattctgaaagaagctcatgatactttatactccatacaccctggtagtactaagatgtactaggatctcaaggaaaggttttggtgggcaagtatgaagcgtgaaatcgcagaatacgtagcagtatgtgatgtttgtcagcgagtcaaggcagaacatcagaaacccgccggtttgttgcagccttcaaagattcctgaatggaaatgggaagaaatcggtatggattttatcactggtttgcccagaacgtcattaggccaggactctatttgggtgatagtcgatagacttactaaagtggcacacttcattccggtaaagacaacttattccggaagtcgcttagcggaattgtatatggcaaggattgtgtgtttgcatggcgttcctaagaaaatagtgtccgatcgaggcagtcagtttacttcaaatttttggaagaaacttcaggaagagatgggttctaagctgaactttagtactgcttatcatccgcagacagacggacaaaccgaaagggtgaatcagattttggaagacatgttgagagcttgtgctttagacttcggtggaagttgggataagaatctaccttatgcagaattttcgtacaacaacagttatcaagctagtcttcagatggctccgtacgaagcactgtatggtcggaagtgccgcactccgcttttgtgggatcaagcgggagaacgtcaggttttcgggacggatatcctaagggaagcagaagaaaaggtgaaaatcattcaagaaagattgcgagtggcccagtctcgtcataagagttatgccgataatcgccgcagagatttgagttttgaagaaggagattatgtgtatcttcgtgtcacgcctcttcgaggagttcatcattttcacaccaacggaaaattggcaccgcgttttgtaggaccttataagattgtcagtcgaagaggagaggttgcttatcagttggagttacctcaatctttggcaggagtccataatgtgttccatgtgtcgcaactgaaaaagtgtttaagggtacctaccgaagaagctaatcatgaacagatagaagttcaagaggatctgacctatgttgagaaaccaatccgtattttggaaatagatgagagaagaaccagaaatcgagttatctgcttttgcaaagtccaatggagtaatcactcggaagaagaatcaacttgggaacgagaagatgaattgaagtcagctcatccgcatttgttcgccagttcttccgaatctcgaggacgagattctgtttaaggggggtaggtttgtcacaccctgaaaattcaaaatatataaattgttgtttaaatggaatttttagaatttattttaaaagcctagaagagaagatttaattttaattaataaattccaatataaaatggggccaaataaaatttcattaaatactttgcttaattctataattcctagatttttctgggatttatttgagctaaggaagtatttttaataaatggaattgcatttaagaaataatttaaattgaaaaaggttttaaaaagtctcttttggctttgggccgaaagtcggcccaagtcctttctctctctcctcggcccagtccggcccagtccgccgccgcgcgcgcgcgtccgcccgctgacaggtggggcccacctatcagggtcgtcgtcaacctccggccgccgccgcccgaaaccctagtttcgcgccgccgctgttcccttccaaatccggccgttcctttccttcttcggccgaatcaaaagaggggaaatgatcctcgagatctcctctaccttttctcctttggaaacatcggctaattcgttttggaagttcgtggaatcgagttcgattcggatcggcctctttccttcgaaccctaaaccttccttctcgtcgccagctgccgtgggccttcgccgtcgcctccgagcccctttaaaaggttccccggtgtctcctctacccgtcgccgccttcgccttcgcctctcgtcgtcggaaacgccctagcgccgtgtgccctagcgtcgccgtcgccgccgtcgctccagccgtgcgcccccgccgttccagtcattgtcgtcgctcgggaagaccgccgtcggggtcgccaagtcgtcgccgtcctcgtccgccgcttcgccaccgccaaagaccaccagagcaccgtcgccgtcgtcaagccgaagagcgccgccgtttcaacctcgtcgccgtcgccgtccgttggtcttccgccgtcgctttggtcgccggtgagatcgccgtgctgtccgctacccgttggtgccctccgttcgtgctgaagcaccgccgttcgccggcgagcgtgcgccgtccgagccgtccgagccgccgccgccggtggtgacgtcatcgccgaggtcatcggggccgttcgctgtgagccggtcgtggaccgttcgatctcggccgtccgttttagatcaagtcgatctcggccgtccgttcgcgtgaaccgccgccgtgcgcccggtccaccgaaaccctagcccgctgacgcaataatccttcttttccttttcaaaaataattcattattgcgtcataattcaattaaaatcttcaaaaattcataagtaattcatcttagctccgatttagttggttcaagtctctaaatttttctaaaattgagatctacatgctaaaaatatccacatgtactgttcatgtttgtttatgtgctgttttggtgattttgcttctttctgtttagattccgtcgtttacggagagtccgtttttgcagaagaagaatttgaagagttccaaggccagcaaggcaagccaaacagatcccaaacaaccctttgagcatgttgatcccgtttaaagctactgtttcttttcaactattgcatttatttttgaatgtcattgggtggaattaacctattgtttgttatagcccttttgttcttgattactttattccttgataccttgggttattataatttgactagttgagctttatttatattggttcaactagatattagatataattgcttagccctgcttagaaacattagctcacttttgggataacttatgaatcactattacttaatgatggcttaataatagttcacgatggtcaatcgtgattggttaattaattaatgtgccaactaaaacctgataatggtgggttgtgagcacatggttttgatggtcgtgctcatgacaattaaggaccggttcatgagtttcggttgtgaaacattaaccatgccagccacaagccagcatgggcaacggctttaccttttgtatagcatggttcattgcggggcaccagactgagaagtggcggagataagcccacgggggtcgctggggagtccatgccttgtttataagggggtgattatgatccaggaaggtgcgctgcggtggattgtgttatgcaaggggtattgtcacaactcctttccgaggtaccgtggtggtattgaggcacatggtgacatgatgtggggttgtgtcttgtgggtacagtggtacacctctgatcagagtaaaactattcgaatagccgtgcccgcggttatgggcgggtctaacaatgtccttcgtgattagtctcacacttctcaccatagtaaatgatgctataattggtaataatctgattagctcctggtttggaatggtatattcctggtttggagatagaactgtgcagccgggatggttgttcagaatggttgggcctatgcaaccgggtatgttgtatagcgttggattaacattgtctaatacttaactgttttattaaattctgaaatgtttgctaaatgctgcttctgcaaatgaaaccctattatgccatcctttgttatcctgtgcacttgcatatttgctgcgtggcttgctgagtatgtcatatactcaccttgcaatcattcatcagaggaagagttctacagtgaagctgatggtgtggaggattaggtgtagccttggtcaagctgcctgtggagtggagccgtctgcgccgtttattttattttccgctgcttagatctttattgattgagaggaactatctacctctgtaatgacattttattcgcttattaattagagtaataattgtactctattatcaatttgttattgtgtgcctcggctgattcctggatgagggttcacacacatgtaagcgtttggaattttggatagaaattccgggcgtgacagcacgcctcctctcgaagccgcagctcctccgcgcgacgagccaccaaagcctctgcggctattgacagaaaacacgaggcctgggagatctgcttaactccagtgcaggtccaaaactcgccttcggatgtgtgagcgtgccagttgatttgatcctgcaatcaacaagaaacaaagacaaagaaaccgaaattaaatccataaatgatagccgatcggctaaatgccgatgacgtatcatttatctttgagccgatgtcatatgtaaatcgatcggcaagtgttaagtaaacaaatcagaactaaatctactcgatcggctgtagacatcaataatatataatccttatatcgatatatacttgaatcaagtgattgggatagatcggtcaccttgccgagacagtataaatcacttaaatcgaaatatatattattaatgagattatatatatatatatatattcatagcatagccgatgaaatagatctagcatgtatcggctaataccccgataccacttcgtattaagatattaaagcaagtagaatataccaaacagaagcctaatatacttaaatgcaacaagatcttaacataaagggcagatctaacatgtcaaacgatcatataggataaaagcagttagatcaggtaagatcggctgaaactccgatactaccctaatcggcaaccagtaggcaggctagatattgaaattctaagcacgacttaatagatcaaactcaactgatacagcattaagtatgaaaagaagaacaatatctagacaatcaagccgctggatgtttcatagagtggtggatatctcatataatctaagccaacgtcgttatttaacctaatcggctgccttctggtaacagatgttagccgattgtaggttagatgatgatatcgtcaaggattatgcaagatatatgataactcgacgaattacgtaaacaagactagagtatcataaggatggaagcactaatctcaagaacacaaaccgccataacaagttttacctcttgttgaagatcgaaaccgatgcagctcaacccgaaagcaagaactcgttgaaataaaactaaagcaaaaagggtggcgatgcgccgaaattgtattgaacgtgtgtgttatccattacatagggctcggggcctatttatacccgagaattataagatatgtccatattggacacgactcttatccctaacaaactctaagataccataagtttttgcggcagacttttgcccacatttatctctaaggaatttacataaaatatcctaattaatagatacaattgccttcccaggactctatccatgcgtggcaatcatcttgaagcacatcaattcgaacccgatgtcgtacacaagtcatattatcggaatcggctgtatcacttaacacagtctgactcagacttagccgatctcaatcgtagccgatccggactccagctgattcttactctgtttccgcaacaacccttatcttcgattccgcttcgatccattttcatctcccatgctgatattaccaaatttggtcgttaacacatgccccccaagtccgggatatttgataatgttccggatttgccgtgtatcgactccaagcaagtttcgcactctaccgttttcccaaccgttactctagtgctttaaatactaaccgttatccccgagaaatctcacaccgtgacttccgttttcaccgcttaagcgaaactttaccctctctctctccggcgattcctccaatgcgcaaggcaattcccaggcgactccatccccagccagatctccgcctgcgacgatgtcaacctccgcgagcccatctgccgcaccatcggccaaatacgctgaggtaagtccccatcggctagatcccccttttcatcattagatcggttttctctcgcctcatactgctttctttttctcggttactttgaacttgtagcatctctccaatttagtcgcagttccaagcttgtcacatgaaaaccactactttctcggcccagtcggcaaccctgaccccactgagttcatcatcggtgaaaccaataggattcctttcagactatccaatccagatctaggtcattggaagaacacctttaaatcttggccgtctctagaaaaaacttcacccgagaaaagttggattacatggttcaagcgtatgtcagctagcaaacgagttcactggaacgaaatcggaatcggccaagcacttgacctaaccatagcaaactcagccaaagaagaacctctaatggcagctgcttcttacttttggtccaacactatcaatgccttcttattcaaccaagggccgatgaccctaactctcatagtcatcattatgatcacgggtctagatgtcacttcatcggctaaccccatgagtctgaacacaaaaaaccaatatgacttcaagaccaagagtataggaggttggtcaggttatgtgcaggg

SEQ ID NO: 25131 - DNA, 1776 bp, Oryza sativa
cctgtcatcggctatgatgcccccaagacttcagctcttcttcaagggcttatcagagaaccagccgatgccggtaagaaaaggaaaaccagatcatcggctgtagatactttagccccagctccaaagaagaagatcaaaaagaaagctaaaccagctgatgatctgcctgccctagatccatctattaaacaagctctggatgaagaagaaatcggagaggatgttgatcaagctgtagccgaaataagcgatactgaaagaacaccatcggcttcacctaagcaggtccctcaaactccttctgctccaactcattttacaagagtaagaaaccttctataaccacttttgtaatcatctcactttatggccgattgctcacatacttggtaactgcagaaaaggaaggctgctgtgaagaagaaatcggctccaatgacatctaaaccagctccactggtacaataaccttaattctttcattagttaatctcagccgattttatataacacttgtctattttcaacctccttcccctcctattcaacaagcatcaagcgatcggaccccatcagctgtagggagtcatcacatagaagaagaagttcaaccaactgctccagctatcccagtaaatttcttataaccaacatatgcagatcggctatgcctatttgatctctaactctctttaaatcatcactgcaggtcttagccgatcttttcttttttgatatcagagattatcttgatgaagagacagaggttgacaacactagcaaggctctagctcctttgtctgatgatgtgaagaaaactcttgaagatatctctcatcggctagagacatcatcactagatagcctagtagtcgactgtggatcaattaggactcggcttcacgaagtttacgctcaaatcctcgatgagttagccgatatccttactacagctgtttatcttgagcaacatcaatttaagctggaaaaggccaagctgagattagccgagcatcaagagcgcaaagacattgaagcaacaatccaggccaatcggcaatttgttcatgaagaaaaagccaagctcgatcaattatctaaaggcccgatcaaatccaatattgaccggcttgaagctcgcaagatggaactcttagcacaacttcaagaatgcaatgctgaactggatctagagcacaagaggttagccgatctcccacagtctatcgaagaacaaaaagcaaggttaaaatcagctatcaagaatgttgctaatatgaccaaatctttgaaggtcattcctggaaccgacgctcaagatgcccaagccatagaagaagtagaacagattaggcaaagagctatatcggctatccagcgatacttatctgaataatctttgtgtaatatgacttggaattttgtaatcggctaagacattcggattaatatgatgtgtaagctttgctcaaaaatctcaaaaattttgcactgtattgtgatatatatatatgcccccctagttttacaatgtcaagagcattgataaaaatacgaaacaactaagggcgatataacaatatcggccattgtatatcagcaaaccacgactgattacaatagaaccactaagggcgatataacaatatcggccattgtacatcggcaaaccacaaccgattacaataaaacaactaagggcgatattacaatatcggccatctcaaggcgatgcaaatacatcggctatcatgtatcggcaatactagccga

SEQ ID NO: 25132 - DNA, 12739 bp, Oryza sativa
gctagaccgctggctcatggatttattttcgtgtttcaccatgttcataacccgcgataatgaatatgttgattagtcatgcatttacttttgataatcatatatctttcggttttaaattgacagattattttattattataacttaccaattgaaagcaacatataatacttgtagatccttttcgagatggtttgagtggcggctttttttatatggcgtaaaaagtatggtgtagaatatagaccttttaaccaaaagtccaaaatgcacgcactagccaagttattgcacttatatgctcatttctcaagtttttgcgctagatcgcacccacctacctttatgtaccgtagacgtaatttactcgaaaggaaaaaataaaatggtggcactatttagcagaactgttaactaggagtaataaaataaaacattaatcttacccttgcaaccttggtccttgtcgtaggggttaccctcgtaaccttgcttgcacttgcagtagtatccgggaccgttggtggagttgacgcactcgctgctgtcgctcacacatgcgtacccagccggtttcttctcctgcacatccagtggagggcaggtaatggagtcgcggatggccctctttcggagaccaaaaatcccagcaacttacccgcacgaacgccaaaaacacacttatctggattcgtcttcatgcctaccgagcacaggttgtcgaatgtatcttgaaggccagacgcatggtcgaatgccttgcggctttttacgatgatgtcgtcgacatatgcttcaacattccgccccaactgtgaacaaaggactttgcagatgagcctagagaaagtagccccagcatttctcagtccaaaaggcatcctaatgtggcagaaggtgctgaatagtgtgatgaaagttgtcttcagtatgtctctgggttcgtaaagatttgatgatacccggagtaggcatccaaaaaactcataagtacacagcccacggtcgaatcaaccaattgatcaatccttgggagtgggaagtcatctttcgaacaagccttgttcagatccgtgaaatcaacacacatccgccacttgccattggacttcttgactaacactgggttcgccaaccactccgggtggttgatctcccgaatcacaccagccttgagcagcttttagacttctgtcttcactgcctgttggcggtctatcgacattttgcgtagcttctacttctttggcttgcatatagctttactactagatggtgtatgatgaggtcgggccaaacgcccacaacctcgtttgatccccagacgaagatgttgatgtttttcttgagcacggccaagatgttattcgtttcttcttcacttatatcgccgcctagggaaaccacctttgttggttcagcctcgtcaacttggaccttgatcaccttgccatgtggggacggcttcggcacgattcttgctcgctcaccatcttcagcttgtacattgtctacttctctacttatcactgttgtttcgctccctagcacggccaaagactgcagccccttgactacgattaccccggccggaccaggcatcttcagcttgaggtagttgtggtgcgcgatagcttcaaacttgttcaacgtggcggtgccgaagatggcgttgtagttgtacgaaatatcaatgacaccgaagagaatcatctgctcgtgtctgttgggacccgcgccgaacgccggagctaagtgaacttggcctaggacttgcaccgcttcgcccccaaagccgtgaagcaaagtgagcgcctgagagagagccaaggtcaggaaccccatcctagtgtatgcttcggcgaagatgacatatgccgaactgccgccatccacaaggattcgacgtactttaaatctagctatctctgccgaaatgatcagcgggtcttggtgtaggaacaagaccccctcggcgtttctctgttgtgcaccgcccgaagctgcgtttttctttgcagcttcacagctgtgagggtggatctgctcttgttatcacttggataacactttgcgggatgtcttgctgttgttcggcctgagggattatgtcctgaacaggttcacagggcacctcttcggccttcacttgctgtggtcttggctcctgttggttgccttgctgccgaatgtttcggcattgctcggtggagtgcaaagagcgcccgtggaacatgcagtagagatccttcttggccttcttgcgaaagggttgctggtgattggtgtcctggtgtgtgtcaagcaccttgtggagggtctacacctcttcgactgccactcacaacctttccacgttcggctctggtctttttacacgtcatgggagcttggctgggtcttgggggcagcaccttcttcgtcggctgcacttggcgattcgccagcggcatggcttcagctgcttgcatcaccgcttgcgcagctgcagcggaagcggcggccttgtcatagtcggcttgtatctccagccttcgctttgtgtcctcttcgccacgtgcatggccgtcgatgatgcgaaacaagcgctcgatggtctggggctctttccttgctattcttcttgtgaggtcgcttggaaggagccctgccgaagcagcattgatgacggacgcctctgtgatgtcttgcacttggcagcgtgcttgcgagaagtgtcgaatgtactccttgttgtttctccgtcttctagcaaatgccgaagaggtcttgctgcgttttcggctcctcataggtgcctcagaagttaagaacaaagacttcacagagttgctcccatgagtatataatattagatagcaaattgaaataccaagagcgggcgatcccgtcaagcgcaacatgtattaccttcgccttggtattgtcattgccgtgagccacttcgattgccgactcgtagattgacaagaactcacttgggtctgattcacgcgagtatattgcaacgggtgggtacttgaattggggtgggatgggatgattcttgagcacccaacttaacggtggcctcttttcgcccccgcctctcatcgttgcaccttggaaagatgagttcaagctcggttatgggatggcgaatggcgaagtcatcgcctgcacccgtggttgggccatcgctttcggctagggtccggttctgaacagtgctccttgcatgttggctgaaactacctgtgtcaccatgcctaggtcgaactgtggtgcttggatccaggccacgccctgattcgactggttcgcttgctgtgtggagccgaaaccggtgattatcccataaacatcagttgttgatgcttgggtcatggtgttctgttcgaagctcagtgcttgctaccaggctattgtcccttgacttggttgattgattgccgcgccgaattgacttatcggttgccaggtcggagccccctggcttgactgattcgcttggtgcattgcaccgaattgacggctgccagaccggggcaccttgacttgcttccaacggcattcgccgatggggttggtttcgaaattgtgtggggttgattgagctgttgaaggaaagcttggaactgagcttgtaaggtcaaagatgcttctatggcggcgtgctgtgcttcgacatgcttcgccggttgtacttgtgtcactgccggctgaacgggcatcgtgaaggtgtaaggggccggttgcactgtaacggtcggagcggctttggcaacgtacagcggagcttgatagacttgtccgtacatggccgaagccggcggagcatggggttgtgcagcatggccgaaaccttgggtggtgaccatcgctgtcgaagtcgggtggggggccgatggggctggcttgacttgttttgccgcttcataggcttgatgctgcagttgcatttggcgaagcatgtcttgtaacttgttcatgttctgacgcatcgtccccatctcggcttcggcttgcacttcaaggtcgatgccttctagggtcatggtcgccgcttgttgagtcgaagctgttgcttgctttttgatgggtctgttcgtgctgggccagcacaagtatggcccagaagggtgggagcgggagcagacctatccacctaccttgccatggctcatggaggttccgctgtctttgccatggatgccagccccagccagctgccaccaccaccatggatacctgtcgacgccacgagtttagtctactccatgacgtgctcgttgctttgctcctggactcttggtcatggagtccttgccagctggctagagaaccgttccacggtgaaagaactagggcctggcccggcctcggccccggcccactgccaattattttggtgtggcattaattgatcattgccaaacaaaaaatttaagagtcggctgggattttcggccccatcattttatgcttattatccgtaccacatattattaactaaaaaattaatttgtaggtgaaatttttatgtacatgttattagcaatttaaaaataaatatataaactatgatgaaaagggcacaaaatcaactctaaaattaagctttaaaatttagaatttggcttataagcataagcctgagcaaaacgatgggttgcttgtttggtttgttctacttaaagttatatattttgacatacaccaaagccaaataacttggaatgcttttttgggttaattcgatccatgccattgcaaatatgtcatttatgataaatgtgttggagtttaaaacacttaattggttaaatcttagcctagacatgatcaccttctacttatgcggaaattaattgatttactgacctaaaaatgaagccattgttcttctgctttcttcttcttctagagatgcctcacgaaccccttccagtgcctaatcgatcggacgattgacttagggtttagggttagatagagttaggttgttaatttgcctccctccttctctttctttatatagcgacatcggtggggctcagggttttttctcaagctaaattcgaatctattttgtaccgatcacacaaaacagatttctcttctttggtttcttgttaggataggaaaaccagtgggattttattcttcctagctaaccggcattagccaagaaaatcatccaacattctccccttgattttgagactaactgacgagtttactaaataaaatacctccccaagacaatgtgtcacaagcgtcactgagacaacactatggtacgcaaataaactcaagcttaacttagtgggtattgattgaaaattaagttcccctcatccaggatcttaataaggctctaatttacacatgtgctagctagaacatatcttagttaaacttaattttactagcctttagagtatggagccatgagcaaatgctcagcttaataattagaccctgggacatatctttcacaaccatatgtgaaaacacatgttgttactagaatagaaaactgtgtttaattagtgcacaacttatagcatagtataattttgagtggtttatgagcgctatttaccactcttagttcagggaaattttcttaaacatatgactgaatcataacatgctacaaaatccaactgcatcgtcgactatgcaataagagattattttggaccttttccatggttattgctcccctatgtgtggacatagcttaatctaaattagcttaataatctttataaatatccacacatctcacaaaataagtgtgtccaaatatctctaaactttagagaccaaatagacttttagaaatataagcatgttacttaaagttgccttgtaaataatacaaagcattcttaataccagtggtctagtctagatttaattaaatactgtcaagattcccagtattatgccaaatctgtatgcatctagatttgagctaatatcaagcttctgtcagctgaatcataaatgattatctttataatttaatttcaaatgactgaattaactaatccaatgaggagacacccttcttcctcgtgtacggctcagaggctatgctccccacggagctacgacatcagagcacacgagtgcagaagtactccgacgaggagcaggaggagcagcgaagtgacgatgtgaatctactcgaggaacatcgagaaagagttgccgtcagagcaggcagctactagtaggcccttctccaatatcacgagaagcgcatcagagcacgtacactttcgatcggagattatgtcctccgacgggttcaaagccaagcagggcacaacaagctctcacccaagtgggaagaactatacacgatcacttaaagtcttgcggctgggcgcattcaagattgcagacggcgatggtcgcgagttaacaaactcctggaacattgatcaattacgtaaattttatgtataaatcaatagtatacatatttgtaagatatcttacgacttcaataaagttgatttcaggtaaagaacatcgtcaaagtgttccttcccaacgatcccttaccacgacaacacctagagttgaaacctatcctcatgtccctttacgccgccctggcaaggcctctgaggaacctaagtgaacttcggctggggacgcccagagcggagaaggccttgtcagattatgcagggacaaacgaccatgtaagatctggtcatgtaagagttctcaccgggcgtattaaccaagccgtgtgatcagaaattgagttttccaacttcacggctgagggctagggtcagtgctttttcaaccaaggcaggtcaagggtcgaagagccttatcccccgagaacaattctccgacgacaaggctgggggatagggagagtgtatggctcaaatgactaatcaaagtcgcagaacgagaaaacactcatacacaacatacccaaaataagaaaacttagtatattacatgcttccttgagatgtttttctacaggatacaaaagctactaggacggccaacgccaatacatggagcagaaaaccttctcggcaagcgacgccatcaactgcgcaagaccgtcaatctccacggatgtcctccgagaacgagagaacccttcacgaaggaactcgaggtgcaactgcgagcggttatcttggatgcaagccagcacatgtcccccggcgtagcggctcgctcgacgacactcctgcttcagggcctcgtcgatgcgcttgccaatcccttagagctgtgcgtaggcccccttcatccacgagatataaccagcagcggactccatgggatctccgcggggaactcggagctccctgcaaacttccgccatggccgtgcagcaacccttgaggtacgagttgaaccacacctcgcgacctcggagagtttccatggcctggtccttcttcgcctccacgatggtcctttcgagttcggccacctcgagtttggtcttccaatactggattcgacgatctcggtctgccaacacgttcttgaaatttgcccaacacagaaaagattaagtcaagctactcttctctttcgagaacacagctaattaagtcaatccgaacacgaggagcgaaggaaatcaagacacaaacctaaggacgtcatcaccatgttcgtctccacggacgggctttgatcgatttccacctccggcacgtgaggctcaagcgtgagcgccggaatgactactgacgtatcgggctgcccgcactgctggacatcctcgacttcaacatatctacaatgacaaaggtactcgggatcacatgctaaggaaacaagggaaacaactgtttaaataaaagcagttcgaacccacagaaagttttacaacatgtagataaaggagtacagaggaaaataaaaatcctactcttgaaaaagggggaggacgaactcccccaagtcactgacttcctccatcgtgtccttacgcgcgtcatcggcggccccccgatccaaagcctctttaaggtctaagtcgcgatgcgctagcctcataaacgcaaggacatggcacgccccagtgtaaataccgttagacgtctcctcaccaagcctagccgtgtggctggaggggatctcctccatcgccttagccagttccgtgagcgacgatgtcagcaaccactcgtcgggatgcgctgggatcgaagttgtgacaccgaactccccggcgagttggtgcacgccggtgaacgatgtccgcagcgaacctcggatggctgtcagatggccctcgagctccgacatacggtgctcgagtccacgccgctacgtctcgttgccagctaccagctccttcatcttttggaggtcctcgcgggactccgccagatcacatgccagctgatcggcacaatgatttgccgacgacgccgctgcactggcctcctcgatctcgcggcccacgccgcgggcgcccgcttgaaggatgcactccatcttagcctggagctgcccccaggtgagggtgtcggcggacagaggccggacgggcacgaggcgagcgataggactacatggcgccgcctcctggtccttagtactggccatgacttccgtcgaggtcgccacagggggcgcactagaagcagcatcagccccactgtgcgccgctttcaccagtgccatcctgcgaagattttttctccatgaggctaggtgatcaaaactttgagaataaaaaaacctcaaaaacatttacttacttctcgccgaccgtcaccaacctctgctttcgctgaggcggtggagacgcacccaagtcctgagtaagataatatgatgtgaggttaagtcgttctgactacgtactcaaggacgaaagagaagcttaccgctgggctcatcgccttccggcgggtcccgggtacagaggagaacttcctccccctcttcggaacattgctgccacttgtggtgtgtcacgcccaaaacgaccctaaaatatatcctttaaattacgcctagaataattaaaatccgtgtgaaagcctccaaaaaataaaatgtgcaaagtaaaagtcaaacaaggcttagaggatttttgtatatttcctaaaagcctaaaatgcgtaaataaattttagtggaattttcagagcacaaataataattattaagaaataaacaaagttgaaaaagttttataaaaagaaaaaccctaaaagtcccccttcccttccttgggccggcccggcccatctctctcccccctctctctctcctctcccccgcggcccattcggcctccctccccgcgcgcgcgccgctgacgggcgggcccacccgccaccctcgctgacgggtggggcccacccatcatccccgtcctcccgccactcccgccgctccgcccgcgccaagcgacgccgccgccgccaaatccgccgcatcccgccgtccccgcgtgcaataaagtggggggaaatactccccgtgatcccctctccctttccccccatttttccctctctctcttgcgttcaaacgggtggatttgcccccgcaaatctcgccggctgctctctcccccttccaaccctatttaaaccctccccgcacctcctccgtccggttccgcctctcgccgcccttcctcctcgccggattcaagctcgcgacgtcgctctctctctccgccgtcgccgccgagctccggtctgccaccgtcgtcgccccgaaccgcctcccacctcggcgccgcctccttcggcttcgccacatcctcgccgacctcgtccacctctccgtttcggtcgccgaccgccggagcgccgccgtccgcgtcgacccgagccgcgccaccgcctccctccgctccgggcgcctcctccgtcgccctggggtgagccgtggaccatcgcctcctttcccccttccctcccctctctcggccgccgctccgcagcatctatggccgcgccggcgaccatcggggcgcgggcgcgccgcctcccgccgaccgcgccggcgtggccgttctcgggcgcgccgagtggctgccgcgtggggcccggccatcagccgcccgcgccctcgggtgtggctgacgtgtggggcccacggcgccggccggtgcaagcccgggtgcgcccggtccaccgtggaccgtgaggctgccgcgtgggccccactcccgtggacccggtccgcgcgcccctccccctcggctaacgcaataaaccctttttaaattaaattttaaatgaagaaaatcgcaaatatttatttaaagagcatataaacttcaaatgcccataacttggccatttgaactcggaattggaccattcaagtctctaatttttccttaagaagtcaagaacccattttagtgctttgttactgcttgttatatggagtttattagagtaaaagcccttttattttccgttggttgtgtagacgctgcagctttggaagatccgctcttcgtgtaggttgaagccgacgtttgggaaagcgagcaaggcaagtcacatcatccttgaacatattgaatcctagtttataaaattattttgatttaaattattgtattatcgctttatttaaattcccgcgttatcactgttttatctagccatgcctatttacctttgttatgaccttattattgttattgttattattaccttgttcaccctagaataaacaaaacctcaactagtggacactttactcatggtaccactagtatgaatttaggtagatgcttcgctggttagttaggcaacattaggtggttttacaactctagactttgggaatattctcatcacctggacactacggaatggttggattattgtggaattggattcatacccccccctctattcaatatccataaaatggttttaggctgggcttggggtgcctggttttgatagtagcacctcggccatataaggaccggtcttcgggcctctgttgcaaagcactaccgtacttccaaatgtctagtgggtaaggcttagtttgtggctcaatctggttataaacaaaagtacacggatggagatggacgaagtcaggggtcgatggacatttctagggcaaatgaaggctacacgagctgcggcccggtagtcgagatgtcgtggcacagggccggtgtcctgctgctaggggctcagtcctgcctacctgtcccgggtgttccggccgtaggtggggttgggtcggtactcttgtctatggctaggatgggttggaaactatgtcatgtcttccgtccgtataccatggtggtatgtggcacgtgattacatgtgaggaagatgtgtcttgtgggtaaagatatacacctcttatcagagtataatctattcgaatagccgcgccctcggttatgggcaagccgagcaatgtacacatgttagtgttttaattcttaaaacctgcttaacaactaaaacgtggaatggttggcctgggttggcttgggacgagctgggacccagggtcgggttgccacttcggtctgaatcatcgtaggccttgggttaaggcagattcgtgtgggttgacggcccttattaataatctggtatagctctaggatcgtatttataaaatagctttgagcaactaagtgtcttttaatgctgtttactgcaaatcctaacccttatattataacccccttgtactcccttgcatttattctgcacttatgggtgtgtcttgttgagtacggtggttgtactcagtcttgctcaatttttcccaaacccagaagaggagcccctggatgatgaaggctttggtgtttagctcgtgcctgccgtcaagcgcctgtggtcatcgccctagtcttccgctgtttcccgtttgtctttgtgtgtgttgggctttcgccgcccatgtaataaattaattatttacgcttccgcttattaaactctgaattgtatcaacttttggtgtaccttgcctcctgggacaaggaataatgcacgcacgtaaggaacgcccgttgggttatttctggtcgtgacaagttggtatcagagcccccttgaccctaggacgagctttagatcccaagccttagcaatattttcgaaataaaattcctttcttatttgtgaaaatcctctagtctctctctgtcccgctgcttcatttatcgtcaaaatctgatctttaaaatgttgctattctcttttgtttttgtttgtagatggccggcagcatcaaccatcgtggcttggacctgactggcttcgttttggagctgcggggcatgtgcgttgtcctggggtatccgcatggagtggactaccagggcaagcagctctcgaagcaggagggtgacgatgcagagccccacgctgcttgggaggtcactgcagtgatcctcactggctcacccgagaggacttcgttggcagtcaccgcgggtggagattccttctccgccgcttgccagaacgccgcactcctcaccatcggcactcttcaccagcgctacccggatgagttgcagcactcgccctaccgctaccaccctcgtcgcggaggagcccgcgactacgccaccttcagggatgctagctcggaggatgacgctaccatcatgcacctagcgcgcatcgtggaggcgtacgatgtggctcgtatcgacttccatcagatggtgcgccgtgggttggtcgagaacaacatgaagatcctgga

SEQ ID NO: 25133 - DNA, 2398 bp, Oryza sativa
gtgctgctaccggtgaaggcagtcacccgaaaggcagcaactacaacaaccatggcagcccacctccacctcctcacccgcctccaccaccaccaccagacaccaactctatcctcacccaaatcctcgcccagcaggccaacatgatggctgctttcctccatcacatccaaaatccgccacagcataatgctccacctccaccaccacccccgcaacattctaaacttgccgagttcctccgcatccgtccgcctaccttctctagctccaataaccccgtggatgctttggattggttgcatgccgtggggaaaaagttagacaccgtgcagtgcaacgatgaggagaaagtcatctttgccgctcaccaactgcaggggcccgcatctctatggtgggaccacttctaggctacgcagccagaaggacagcctattacttgggcccgcttcaccgccgctttccggaggacccatgtgcccgccggagtcatgacccttaagaaaagggaattccgagagttgaagcaaggcaactgctctgtgatggagtatttgcatgagtttaacaacctggcccggtacgccccggaggatgttcgtgaagatgaggagaagcaggagaagttcttggcaggaatggaccctgagctgtccgtgcatatggtctccggggattatccggatttccagcgtttggcggacaagagcatccgcttggaagccaagcacaaggaactggagtcacacaagcgtcgcttggcaaatttccgcaatcaacagggggctaaccaaaggatccgctacaccaatccctatccagggggatcctcctcgtagcagcagcagcagcaaccacgctccgcgctccgacctcaattcgtggtgcgcgtcccacagccgcagcaacagcagagccagcaagggacccgtgcgccccgtcctcctacgccagccgtgcagcctggacaaggccgcagagacgttcatggtcagcagcgtctgtgcttcaactacttcgagcccgggcactttgcggataaatgcccaaagccgaggcgccagcaaggccaagcgcctccccgccccaacaacggtggtaaggatgtcattcggggtcgtgtgaaccacgtgactgccgaggatatgctgacaactccaggcgttatcgtgggtacgttcctcattcattccatccctgctaccattttgttcgactctggagcttcccactcgtttatatctgtgccattcgtggggagaaatcagttgggggtagaaaggcttaggaaccctctgctcatcaccacccctggaggggttatgacagcaaagtattatagccctgccgttcctatagaaatccagggaatcctttttccctcagatttgattcttctggacaccaagaacttggatgtgatccttgggatgaaatggttggctcaattccaaggagtagtggattgcgcaagacgcactgtcactctgtaccgagggccggaacaaccggttgttttctttgcgcccccaacctctgccagtagttcagaacttcatcagataggactgtcagaaatccccatcgtcagagagttcggagacgtgtttccggaagaactactcggtatgccgcccaagcgagagattgagttccggatagatcttgctccaggaaccactcctctgtacaagcgaccctaccgtatggcagcaaatgaactggccgaagtcaagaaatagttggaagagttaaaagaaaaggggtatatacggccgagcacttccccctagagtgctcccgtgatttttgtggagaagaaagacaagacaaagcggatgtgcgttgactacagagctctcaatgaagttactatcaaaaacaagtaccctcttccccggatcgatgatctcttcgatcagcttaaaggtgccactgtcttttctaaaattgatcttcgttccggatatcaccaattgcgtatccgtgaagaagatattccgaagaccgcattcacctcgcgttatggactgtatgaattcacggtgatgtcgttcggtctgaccaatgctcctgccttcttcatgaacttaatggacaaagtgttcatggaaaacttggataagtttgtggtggtctttattgacgacatcctgatgtactcacaatcagaggaagaccatcagcagcatctccgtctggtgttgggaaagttgcgggaacatcaattgtatgccaagcttagcaagtgtgagttctggttgtccgaagtcaaattcttagggcacgtgatatccgctaaaggagtgctgtggaccccgaaacggtgaccgccgtcactaattggaagcaacccaagacagttactcaggttcgcagctttttgagtatggca

SEQ ID NO: 25134 - DNA, 708 bp, Oryza sativa
ccatgatttggagttatccgctgtggttcatgctctaaagatctggcggcactatctcattgtgaatcgctgtgaaatatatattgatcataagagtttgaaatacatcctcactcagtcggatctgaatcttcggtagagaagatggttagaactcatcaaggattatgatgtgggaatccactatcatcctagtaaggccaacgtggtcgccgacgctctaagtcgaaaaagccattgcaacactcttggcgtccgtggcattccaccgaaacttaatcaacagatggaagccctgaacctaagcatagttggtcgtggattcttggctacactggaagccaagcctaccttgctcgatcaaatccacgaggctcagaagaatgatccggatatgcgtggactcctcaagaatatgaaacaaggtaaagccactggtttcacagaggatgaacatggaacccaatggaacggaaatcgggtatgcgttccagacgacagggaacttaaaacagttgatacttcaggaagctcacgaaagtccttattccatccatcctggcagtacgaagatgtacttagacttgaaagaaaaatactggtgggttagtatgaagcgggaaattgcagagttcgtggccctttgtgatgtgtgctagcatgtcaaggcagagcaccaacgaccggccggacttgggctgcaggaat

SEQ ID NO: 25135 - DNA, 2181 bp, Oryza sativa
aaggaaaaaggattttccctggaattaaaaattgcactttggtgatttttaatgggttacaattgtttctagagctctgaaaattccattaaaaatcctgttaatgaatttcgacatgtagaactcaagaaaaattccacatgtcaaatccgattattatttgcattattttcttagggttttctcctgatttcacctgcattttcttagggtcttttataaattacaatttggcttgggaggaaaacttggggtgtgacatcagcgcaccttcagaggcggacgacattcctgtcccactctgagagaaggactcgaccgaacgcgccgccgcgattaaagtgagtgtactcgatgattcctttacatctttcttctcgagatcgcgttgtgacttcatattgtgcaggctctccctctgacggacgccatcggaccactcgtggatcactaggtggtgacgtcgttgaaggagggggtcaccaaggaggcatcagacgctgttgctgccaccatgtcacgactggaaataacccaacaggcattccttatgtgcgtgcattattccttgtcccaggaggcaaggtacaccaaaagttgatacaattcagagtttaataagcggaagcgtaaataattaatttattacatgggcggcgaaagcccagcatacacaaagacaaacgggaaacagcggaagactagggcgatgaccacaggcgcttgacggcaggcacgagctaaacaccaaagccttcatcatccaggggctcctcttctgggtttgggaaaaattgagcaagactgagtacaaccaccgtactcaacaagacacacccataagtgcagaataaatgcaagggagtacaagggggttataatataagggttaggatttgcagtaaacagcattaaaagacacttagttgctcaaagctattttataaatacgatcctagagctataccagattattaataagggccgtgaacccacacgaacctgccttaacccaaggcctacgatgattcagaccgaagtggcaacccgaccctgggtcccagctcgtcccaagccaacccaggccaaccattccacgttttagttgttaagcaggttttaagaattaaaacactaacttgggtacattgctcggcttgcccataaccgagggcgcggctattcgaacagattatactctgatcagaggtgtacatcacgtgtaaccatgtgccacataccaccacggtatacggacggaagacgtgacatagtttccaacccatcctagccatagacaagagtaccgacccaaccccacctacggccggaaccccccggacaggtaggcaggactgagcccctagcagcaggacaccagccctgtgccatgacatctcgactaccgggccgcagctcgtgtagccgtcatttgtcctagagatgtccatcgacccccgacttcgtccatctccatccatgtacttttgtttgtaaccagactgagccacaaactaagcattacccactagacatgtggaagtacggtagtgctttgcaacagaggcccgaagaccgatccttatatggccgaggtgctactatcaaaaccatgcaccccgagcccagcctaaaaccatcttggggattttgaatagaaggagcggtgtgaatccaattccacaataatccaacaattccaaagtgtccagatgatatgaagattcccaaagtctagagttggaaaaccacctaatgttacctaattaaatagcgaagcatctacctaaaatcatactagtgataccatgagtagggtgtccactagttggggttttgtttattctagggtgaacaaggaaataataacaataacaatattaaggtcataacaaaggtaaataggcatggctaaataaagcagtgataacgcgggaatttaaataaagtgataatgcaataatttaaatcaacataattttacaaaataggattcaatatgttcaaagatgatgtgacttgccttgctcgctttcccaaacgccggcttcaacttccacgaagagcggatcttccgaagctgcgcgtctacacgaccaacagaaaagaaaaggcttttactctaataaactccaaatgacaagcaggaacaaagcacaaaaatgggttcttgacttctta

SEQ ID NO: 25136 - DNA, 900 bp, Oryza sativa
aatcaaggtcgtgaacccacatgaacctgccttaacccaaggcctatgatgattcagaccgaactggcaacccgaccctgggtcccagctcgtcccaagccaacccaggccaaccattccacattttagttgttaagaaggttttaagaattaaaacactaacttgggtacattgctcggctagcccataaccgagggcgcggctattcgaatagattatactctgatcagaggtgtacaactttacccacaagacacatcttcctcacgtgcaaccacgtgccacataccaccacggtatacagacggaagacgtgacatagtttccaacccatcctagccatagacaagagtaccgacccaatcccacctatggccggaacctccgggacaggtaggcaggattgagcccctagcagcaggacaccagccctgtgccgtgacatctcgactaccgggccgcagctcgtgtagccttcatttatccttgagatgtccatcgacccccgacttcgtccatctccatccgtgtacttttgtttattaccaggctgagccacaaactaagccttacccactagacatgtggaagtacggtagtgctttgcaacagaggcccgaagaccggtccttatatggccgaggtgctactatcaaaaccatgcaccccgagcccagcctaaaaccatcttggggattttgaatagaaggagcggtgtgaatccaattccacaataatccaacaattccaaagtgtccagatgatatgaagattcccaaagtctagagttggaaaaccacctaatgttacctaattaaatagcgaagcatctacctaaaatcatactagtgataccatgagtagggtgtccactagttggggttttgtttattctaggg

SEQ ID NO: 25137 - DNA, 3244 bp, Oryza sativa
ttttttcaatttttagggtgtgacacgcgggcggctgacggccgggccccacatggcagccgcggggcgcgcccgaaagcggcctcgccggcacagtcgacgggaggtggcgcgcccgcgcccctatggtcgctggcggcggccataggcacggcggagcggcggccgagagaggggagggaagggggaaacgaaatgggcggtccacggctcaccccgggtcgacggcgacgacgggaacggcgaccggaacggaggaaggcagcggcgcggcacgggttgacggggacggcggcgttccgacggtcggcgggcgaaacggaggggtggacgaggtcggcgaggttgcggcgaacccgaagaaggcaacgtcgaagcgggagaaggtcccggggcgacgacagcggtggaccggagctcggcggcgatggcggagagagagaatgacggtgcgaactcgattccgacggggagagagagcggcgagtggtggaaacggcagagggaggcacggggagtgtttatatagggttgggagggggagagagcggccggatgtgggggaatcggccgcggaagatccggccgccattgatgcgccggcgaggtttagggggaaacgttttcgaacgaatccgagggagagagagagggaaaagtggggggaaagagggagggaatcacggggaatatttcccccctcttgattgcacacggggcggacgggagcggcgggattcgcagcggcggcggcgctagggcacaggcgaggcggcgggagcggcgggaggaaggggatgacgggtgggccccacccgtcagcgagggtggcgggcgggcccgtccgtcagcggcacgcgcgcgcggggaggaggccggatgggccgcgggggagaggagagagagggagggaggtgggccgagccagcccaagaggggaaagactttttagggtttttctttttataaaatcattttaactttttttatttcttcttaattattatttgtgctctgaaaattccactaaaatttgagggctccttttagaccaaggagaatttaacaaaaattctccgggccacatttgaatttttcttgtacgtattttagtgtttgccaatttcttttcgaattttaattaattctattattccttttagaaaatgatttttatttcgggatgaatttatcaggacgtgacaaaccaccactgtcaccgtcgtcggccagcctgagtaatgttaaggaaaagatccagaagctcggtttgactgacgtccatgaaggaaacgttgtgcccattgatccagagaagttcactcccgaacagaaggaagacttcaatgcaatgatgcaacaagcacaagatcaatttttaagttcattcatgcagactcgcaagggcacatttgttcagaagtacaaggtgaaggtggttcttgaggatcctgggatcggttcttctaaagagggagaaaagaaacaagttccagacggatcagcccagccgagtgacaaaggcgttacagatgggtcgacccaggagaaccagggtgactacttccatggagtacatggagttcaaggtgacggcactcagggaccacaagggggaaatcttaatcagaatgacaatgcattccaagattttttcaataactttcaagatcgagttgactatgttgtgtatagtgctttgattaatcaatctggagtgttgactaataccttgtcaaatataatgaaatcggtagccgatggttcaatagctgaacatcaggctgcaggcccagtttatttgcaagggggtacttttccaaattattgaactttgatcaccgatgttcatccacttactcagggaattcctcctgttgcatcatcagctcagccgatggcaccagcatcagctccagcacctgcagcgccgtcgtcggctccaggccaattaatcaatcgtcaattattggtaagagagcaatctcagcatcctagaccgaatgtgactcagctaacacaagaccagattgcatctaggtgtttctacctcctcagaatgctgttaattcagctcagcagcagccgattcagcaaacaccgcccaggcaacaggttgtgcagcctattcaacaaacatctccaatccagcaggtcgtgcaaccagttcagcagacgccagcaaggcgactggctttacagccgattcagcagacgccgttgagacagtaggtcgttcagccgattcagcagcaaggctcaatgaatgtgttgcctggatttgcaacacctggtggtcagcctgtgcagtacactacaaatcaggttgtcccggaacacctggttcatcatgtgcaaccagatggttcagtggtacctcaagttattcctgagcatttggcgcgtggtactcagccaaaccttcacaattaccaggggggcaatttgagttatgaatatcagcctccatcacctcaagttcagtaccaacaggcaggatcggttcaacctcaatttgttcatcaatacaatcagtttgagctgtcgcgtcccaaaacgactctaaaatacatcctcaaaattatgcatagaataagtaaaatccatgtgaaagcctccaacaattaaaatgtgcaaagttaaaagtcgaataaggcttggaggatttttgtatatttcctaaaagcctaaaatgcgtaagtaaatattagtggaattttcagagcacaaataataattaagaagaaataaacaaagttaaaatggttttataaaaagaaaaaccctaaaaagtcctttttccccctccccctcttgggccggctcggcccacctccctccctctctctcctctcccccgcggcccaatcggcctcctcccctcgcgcgtgccgctgacgggcgggcccgcccgccaccatcgctgacgggtggggcccacccgtcatcccctaccttctgccgcccccgccgcctcgcccgtgcgctagcgccgccgccgccgcgaatcccgccgctcccgtccgtcccgcgcgcaatcaagaggggggaaatattccccgtgattccctccctctttcccccccgtttttccctctctctctccctcggattcgttcgaaatctttcccctaaacctcgccggcgcatcaatggcggccggatcttccgcggccgattcccccacatccggccgctctctccccctcccaaccctatataaacaatgtcgcgacccaaaacg

SEQ ID NO: 25138 - DNA, 35400 bp, Oryza sativa
atatcgtaagggaagcagaagaaaaggtaaagatcattcaagaaagattgcgtgtggctcagtcgcgtcataagagttatgccgacaatcgccgcagagatttgagttttgaagaaggagattatgtgtatcttcgtgtcacgcctctacggggagttcatcgttttcataccaaaggaaaattggcactgcgttttgtgggaccttataagattgtcagtagaagaggagaggttgcttatcagttagagttacctcaatctttggcaggagtccataatgtgttccatgtgtcgcaattgaaaaagtgtttaagggtacctaccgaagaagctaatcttgaacagatagaagtccaagaggatctgacctatgtggagaaaccaatccgtatcttggaaacaaatgagagaaaaaccaggaatcgagttatccgtttttgcaaagtccagtggagtaatcactcggaagaagagtcaacttgggaacgagaagatgaattgaagtcagctcatccgtatctgttcgccagttcttccgaatctcgaggacgagattctgtttaaggggggtaggtttgtcacaccctaaaaattcaaaaaaatataaattgttgtttaaatggaatttctagaatttattttaaaagtcttgaaaagaaaatataattttaattaataaattccaatataaaatggggccagataaaatttcattaaatactttgcttaattttataattcctagatttttccggggtttaattgagctaagaaagtatttttaataaatggaattgcatttaagaaataatttaaattgaaaaagtttttaaaaagtcttcttttggctttgggctgaaagtcggcccaaaaccttctctctctctccccggcccaagtcggcccagtccgcagccgcccgcgcgcgcgcgcgtttggacgctgacaggtgggtcccacctgtcaggcccatcgtcttcctcgggccgaaaccctagcgcgccgccaccgagccgccgccgctgtttccttccaatccggccgcccctttccgtttccggccaaatcaatagaggggaaacactctccgggatctcctctaccttttctcctttggaatcatcagctaattcgttttggaagttcgtggaatcgagttcaattcggatcggcctctttccttcaagcccgagctttccttcctcgtcgccggcagccatgggccttcgccttcgcctccgagcccctttaaaagcctccccagtgtctcctccacccgccgccaccctcgccttcgcctctcgtcgtcagagtcgctctagcgccgtgcaaccttgcgccgctgccgccgccgccgctccagccgtgtgccgccgtcgattcagccgtcgccgtcgctcgggaaggacgtcatcgtggtcgccaagtcgtcgccgtcctcgtccgccgcttcgccatcgtcggagaccgccggagcatcgtcgccgtcgtcaagccgaagaactccgccgtttcctcttcgtcgccggcgccgtccgttgcttctccgccgtcgttttggtcgtcggtgagttcgccgtgctgtccgctacccgttggtgcccttcgtttgtgtcctagcgccgccgttcgccggcgagcgtgcgccgcccgagccgtccgctccgccgagccgccgccgccgtcggtgacgtcattgctgacgtcatcaaggtcgtccgccgtgaaccgccgtggacccgatcgatctcggccgtccgtttggattggatcgaatctcggccgtccgttcgcgtgaaccgccgcccgtgcgcccggtccaccgaaaccctagcccgctgacgcaataaatcccctttttcttttcaaaaataattcattattgcgtcataattcaatttaaaccgatttaagtgttttaatctgatttaatctttaaaaattcataactaattcatcttagctccaatttagttggttcaagtctctaaatttttctaaaattgagatctacacattaaaaatatccacatgtactgttcatgcttgtttatgtgctgttttggtgattttgcttctttttgcttagattccgtcgtttccggagagtccgttttcgccggagaagagtttgaagagttccaaggccagcaaggcaagtcacacagatcccaaacaaccctttgagcatattgatcctatttaaagctattgtttctattcaaatattgcatttattttcgaatgtcattgggtggatttaacctattgtttgttatagcccttttgttcttgattactttattccttgataccttgggttattataacttgactagttgagctttatttattggttcaactagatattagatataattgcttagccctgcttagaaacattagctcactattgggataacttatgattcactattatttcatgatggcttaatgatagttcacgatggtcaatcgtgattagttaattaattaatgtgccaactaaaacctggtaatggtgggttgtgagcacatggttttgatggtcgtgctcatgacaattaaggaccggttcacgagtttcggttgtgaaacatttatcgtgccaaccacaagctagcatgggcaacggctttatcttttgtatagcatggttcattgcggggcactagactgagaagtggcggagataagcccacgggggtcgctggggagtccatgccttgtttataagggggtgattatgatccaggaaggtgcgctgcagtggattgtgttgtatgaggtgtattgtcataactcctttccgaggtaccgtggtggtattgaggccttgggttaaggcaggttcgtgtgggttcacggccttgataaataatatggtatagttctagaatcgtgtttacaaaatagctttgagcaactaagtacctttaaatgctgtttactgcaaaccctaaccctttatagtataactcctttgtactcccttgcatttattctacacttgtgggtgtgtcttgttgagtacggtggttgtactcagtcttgctcaatttttcccaaccccagaagaggagcccctagaagatgaaggctttggtgtctagctcgtgcctgccgtcaagcgcctgtggtagtcgccctagtcttccgctgtttctcgtttgtctctgtgtgtgctgggccttcgctgcccatgtaataaattaactatttacgcttccgcttgttaaactctgaattgtatcaacttttggtgtaccttgcctcctgggacaaggaataatacacgcacgtaaggaacgcccgttgggttatttccggtcgtgacaagttggtatcagagccacccttgaccctaggacgagccgtagatcccaagccttagcaatatcttcaataataaaaatcctttgtatttgtgaaaatcctctagtctctctctgtcttgctgcttcatttatcgccaaaatctgacctttaaaatgttgttttcctttttgtttttgtttgtagatggccggcagcgtcagccgtcgtggtttggacatgactggcttcgtcttggagctacggggcatgtgcgttgtcctggggtatccgcctggagtggactaccaggccaggccgcttccggagcaggagggtgacgatgcagagccccacgctgcgtgggaggttactgcagtgatcctcactggctctcccgagcggacttcgctggcagtcaccgcgggtggagattccttccccgccgcttgccagaacgccgctctcctcgccatcggcactcttcaccagcgctacccggacgagttgcagcactcgccctaccgctaccaccctcgctgcggaggagcccgcgacttcgccaccttccgggatgctagctcggaggatgacgctaccatcgtgcacctggcgcgcatggtggaggcgtacgacgcggctcgtatcgacttccaacagatggtgcgccgtgggatggtcgagaacaacatgaagatcctggagctgcgtcaggagaatctgcagctgaagaaggacctacacgcgttggaggcgcagctgtgtcagcttaaggtcgcccagggtgaggtctgtcgtcccaagcgccgccgcgtctgccgcagccagaagatcaccgcccgcaagagcacctccaggcccgagcttgttcgtcagtccctggcgtggacctgcttcgtggagacccctcgtgccgagcccgcgcccgtggttccccaggagggggaagcctccggcgttggtagcacggaggatgcgctgttgctcaccttccgtcctggcccgtcgcagcgatagacgagcagttagtaggcttgcgcgtgtgttctttctcgtttgtcttcttgttggagttgtgtggggcatggttatgccggtgtatggcataactgtgtcggagcctgtctttattttatttgtctaagcaatttgaactttaatgaaccaatttaatagcagtaataaatttaagaattaaggtagtcgtgggtggttagctttaattgtcagctctctctctgtttgctggttctgtgtggggttttcagatggtgatgaccaggagaagtgctaataccggtgatggcaaccaacctgagggcagcaaccacaacaaccatggcagcccacccccacctcctcctccgcctccaccaccaccaccagataccaacgctattctcacccaaatcctcgcccagcaggccaacatgatgactgctttcctccaccacctccaaaatccgccacaacataatgctccaccaccacctccccaacactcaaaactcgctgagttcctccgcatccgcccacctaccttctccagctccaacaaccccgtggatgcgttggattggttgcatgccgtggggaaaaagctagacactgtgcagtgcagcgatgaggagaaagtcgtcttcgccgcccaccagctgcaggggcccgcatctctatggtgggaccatttgcaggctacgcagccagagaggcagcctattacttgggcccgtttcaccgccgatttccggaggacccatgtgcccgccggagtcgtggcccttaagaaaagagaattccgagagttgaagcaaggcaaccgctccgtgatggagtatttgcatgagttcaacaacctggcccgttcgccccggaggatgtgcgggaagatgaggagaagcaagagaagttcttggcaggaatggaccctgagctgtccgtccgtctagtctccggggactatccggatttccaacgtctggtggacaagagcatccgcttggaagccaagcacaaggaactggagtcgcacaagcgccgcttggcgaatttccgcaatcaacagggtgctaaccaaagggtccgctacaccaatccctatccagggggatcctcctcgcagcagcaacaacagcagcagcaacctcgctccgcgcctcgacctcaattcgtggtgcgcgtcccacagccgcagcagcagcagaatcaacaagggactcgtgcgccccgtcctcctacgccaactgtgcagcctggtcaaggccgcagggacgctcaaggtccgcagcgtctgtgcttcaactgctacgagcccgggcactttgcggataaatgcccaaagccgaggcgccagcaaggcaaagcgcctccccgctccaacaatggtggtaacgatgtcattcggggtcgtgtgaaccacgtgacggccgagaacgtgctgacaactccagacgtcatcgttggtacgttcctcattcattccatccctgctaccattttgttcgactctggagcttcccactcgtttatatctgtgccattcgtggggagaaatcagttgggggtagaaaggcttaggaaccctctgctcatcaccacccctggagtggttatgacagcaaagtattatagccctgccgtccctatagaaattcaggggattccttttccctcggatcttattctgctagacaccaagaacttggatgtgatccttgggatgaattggttggctcaattccaaggagtagtggattgcgcgagacgcactgtcactctgtaccgagggccggaacaaccggttgttttctttgcgcccccaacctctgtcagtagttcagaacttcatcagataggactgtcagaaatccccatcgtcagagagttcggagacgtgtttccggaagaactactcggtatgccacccaagcgagagattgagttccggatagatcttgctccaggaaccactcctctgtacaagcgaccctaccgtatggcagcaaatgaactggctgaagtcaagaaacagttggaagagttgaaaggaaaggggtatatacgtccgagtacttcccccaggggtgctcctgtgatttttgtggagaagaaagacaagacgaagaggatgtgcgttgactacagaactctcaatgaagtcaccatcaaaaacaagtaccctcttccccggatcgatgatctgttcgatcagcttaaaggtgccactgtattctccaagattgatcttcgttccggatatcaccaattacgtattcgtgaagaagatattccgaagaccgcattcaccacacgatacggactgtatgaattcacggtgatgtcgtttggtttaaccaatgcacctgccttcttcatgaacttaatgaacaaagtgttcatggaatacttggataagtttgttgtggttttcattgatgacattttggtatactcacaatcagaggaagaccatcagcaccatctccgtctggtgttgggaaagttgcgggaacattaattgtatgccaaacttagcaattgtgagttctggttgtccgaagtcaaattcttagggcacatgatatctgctaaaggagctgctgtggaccccgaaacagtgaccgccgtcactgattggaagcaacccaagaccgtcactcaaattcgcagtttcttaggtttggcaggatactatcggaggttcatcgagaacttctcccaaatcgctcgacccatgacacagttgttgaagaaagaagagaaatttgtgtggagcccgcaatgcgagaaggcgtttcaaactctcaaggaaatgctggtttcctcgccagtgttagtcttgccagatactcgtaaggatttcatggtgtattgtgacgcttcgcgccaaggactgaggtgcgtgctcatgcaggaaggacatgtggtagcctatgcctcacgccagttacggccccatgaaggcaactaccctacccatgatttggagttagccgcggtggttcatgctctaaaaatctggcggcactatctcattgggaatcgctgtgaaatatatactgatcataagagtttgaaatacatcttcacccagtcggatctgaatcttcggcagaggagatggttagaactcatcaaggattatgatgtgggaattcactatcatcctggtagggctaacgtggttgccaacgctctaagccgaaaaagccattgcaacactcttaacatccgtggcattccacccgaacttaatcaacagatggcagccctgaaactaagcatagttagccgtggattcttggctgcgttggaagccaagcctaccttgctcgatcaaatccgcgaggctcagaagaatgatccggacatgcatggactcctcaagaatatgaaacagggtaaagccgctggtttcacagaggatgaacatggaaccctatggaacggaaatcgggtatgcgttccagataacagagaacttaaacagctgatacttcaggaagcccacgaaagtccttattccatccaccctggcagtacgaagatgtacttagacttgaaggagaaatactggtgggtcagtatgaagcgggaaattgcagagttcgtggccctttgtgatgtgtgccagcgtgtcaaggcagagcaccaacgaccggccggacttctccaacctctccaagtaccagaatggaaatgggatgaaattgggatggatttcatcaccggacttccaaaaacccaaggtggatatgattctatatgggtagttgtggatcggttaaccaaggtagctcgatttattcctgtgaagaccacctatggagggaacaaattagccgagctctacttcgctaggatcgtgagtctccatggcgttcccaagaaaatcgtatctgattggggaagccaattcacctctcacttttggaagaagctccaagaagagctgggtacccgattaaatttcagcaccgcatatcacccgcagacggatggacagaccgagtgtctaaatcagatcctagaagatatgcttcgcgcatgtgtcctagatttcgggaagacctgggataagagtctcccctacgccgagttctcctacaataacagctaccaagccagtatacaaatggcaccttatgaagcgttgtatgggcgcaaatgccggacaccgctcttgtgggaccaagttggggaaagccaagtgttcgggactgatatcttgagagaagctgaagcgaaggtcagaaccattcgggataatcttaaggtggcacagtcccggcagaaaagttatgcatataaccgtcgccgtgacctggaattcgcaatggatgactttgtgtatcttcgggtcacgccattgcgaggtgtacacaggtttcagacaaaagggaagctcgcacctcggttcgtgggtcctttccgtatcattgctcggcgcggagaagtcgcttaccagctggagctgcccgcctctttgggcaacgtgcatgatgtgttccatgtgtcgcaactcaagaaatgccttcgagtgccatccgagcaggccgactcagagcaaattgaagttcgcgaagacttgacctacgtggagaggccagtgaaaatcctggacaccatggaacgcaggaccaggaaccgggtaatccgtttttgcaaggtccagtggagcaaccacgccgaggaagaagctacttgggagcgtgaagacgagctgaaggcagcccatcccgatctcttcgccagttcttccgaatctcggggtcgagattccgtttaaggggggtaggtttgtcgcgtcccaaaacgactctaaaatacatcctcaaaattatgcatagaataagtaaaatccatgtgaaagcctccaacaattaaaatgtgcaaagttaaaagtcgaataaggcttggaggatttttgtatatttcctaaaagcctaaatgcgtaaataaattttagtggaattttcagagcacaaataataattaagaagaaataaacaaagttaaaatggttttataaaaagaaaaaccctaaaaagtcctttttccccctccccttcttgggccggctcggcccacctccctccctctctctcctctcccccgcggcccaatcggcctcctccccgcgcgcgtgccgctgacgggcaggcccgcccgccaccctcgctgacgggtggggcccacccgtcatcccctaccttccgccgcccccgccgcctcgcccgtgcgctagcgccgccgccgccgcgaatcccgccgctcccgtccgtcccgcgcgcaatcaagaggggggaaatattccccgtgattccctccctctttcccccccgtttttccctctctctctccctcggattcgttcgaaatctttccccctaaacctcgccggcgcatcaatggcggccggatcttccgcggccgattcccccacatccggccgctctctccccctcccaaccctatataaacaatgtcgcgtcccaaaacgactctaaaatacatcctcaaaattatgccgagaataattaaaattcatgtgaaagcctccaacaattaaaatgtgcaaatttaaaagtcaaataaggcttggaggatttttgtatatttcctaaaagcctaaaatgcgtaaataaattttagtggaattttcagagcacaaataataattgagaagaaataaacaaagttaaaaaggttttataaaaagaaaaatccctaaaagtcttctttcccccccttttcccctcttgggccggctcggcccaattccctccctctctctcctctccccgcggcccatcggcctcctccccgcgcgcgcgccgctgacaggcgggcccgcccgccaccctcgctgacgggtggggcccacctgtcatccccttcctcgcgccgcgcccgccgcccgcccgtgccctagcgccgccgccgccgccgaatccgccgcatcccgccttccccgcgcgccataaagagggggaaatcactccccgtgattccctccctctttccccccactttcccctctctctctccctcggattcgctcggatttattcccgaaatcctcgccggcgtcattgatggagccgagatcgccgcgccggtttccttcctctccggccgccctctctcgctcccgacgctatataatcgttcctcgtgcttcgctcctccgtttccgccactcgccgcactctctccccgtcggattcgagctcgcgccgttgtcctctctctccgccgtcgccgccgagctccgattcgccgcccgtcgtcgccccggatctcctcccgtctcggcgtcacctccttcggcttcgccgcgtccccgtcaacctcgtccaccccttcgtttcgcctgccgaccgtcggagcgccgccgtcctcgtcgatccgaaccgcaccgccgcctctcgccgcttcggtcgccgtttttgtcgccgccgtcgacccggggtgagccgaggaccgccgcttcgcttccctcttctctcctctctctcgggcgccaccccgccgcgccggtggtcgccggcggtgaccatcggggcgcgggcgcgccgcctcccgtcggccgtgccggcgaggccgccttcgggcgcgccccgcggctgccatgtggggcccggccgtcagccgcccgcgcccgcgggtgcggctgacgcgtgggacccatggcgccggccagtgtgagccgcgtgcacccggtccaccgtggaccgtgaggttgccgcgtgggccccactcccgtggacccggtccgcgcgcccctcccctcggctgacgcaataaatccgattttaaattaaaaatttaaatgaagaaattcgcaaatattcatttaaagaacatataaacttcaaatggccataacttggtcatttgaactcggaattggaccgttcaagtctctaatttttccttaagaagtcaagaacccatttttgtgctttgtttctgcttgttatatggattttattagagtaaaagcctttttcttttccgttggtcgtgtagacgctgcagcttcggaagatccgctcttcgtggaagttgaagccgacgtttgggaaagcgagcaaggcaagtcacatcatctttgaacatattgaatcccagtttgtaaaattatgttgatttaaattattgcattaccgctttatttaaattcccgcgttatcactgttttatctagccatgcctatttacctttgttatgaccttattattattgttgttgttattattaccttgttcaccctagaataaacaaaaccccaactagtggacactctactcatagtaccactagtataattttaggtagatgcttcgcaatttaattaggtaacattaggcggttttacaactctagactttgggaatattcatatcacctggacactttggaatggtttggttattgtggaattggcttcacaccgctccttctattcaaaatccccaaaatggttttaggctgggctcggggtgcatggttttgatagtagcacctcggccatacaaggaccggtcttcgggcctctgttgcaaagcactaccgtacttccacatgtctagtgggtaaggcttagtttgtgggtcagtctggttataaacaaaagtacacggatggagatggaagaagtcgggggtcgatggacatctccagggcaaatgaaggctacacgagctgcggcccggtagtcgagatgtcatggcacagggccggtgtcctgctgctaggggctcagtcctacctgcctgtcccgggggttccggccgtaggtgggattgggtcggtactcttgtctatggctaggatgggttggaaactatgtcacgtcttccgtctgtataccgtggtggtatgtggcacgtggtcgcacgtgaggaagatgtgtcttgtgggtaaagatgtacacctctgatcagagtataatctattcgaatagccgcgccctcggttatgggcaagccgagcaatgtacccaagttagtgttttaattcttaaaacctgcttaacaactaaaatgtggaatggttggcctgggttggcttgggacgagctgggacccagggtcgggttgccagttcggtctgaatcatcataggccttgggttaaggcaggttcatgtgggttcacgaccttgattaataatactgtgtagctttaggatcgtgtttacaaaatagctttgggcaactaagtgacttttaaatgttgtttactgcaaaacttaacctctatattattatccccttgtaccccttgcattaattatgcatctccggtgtggcttgctgagtactgtggttgtactcattcttgctctatctttctccccccttcagtaagagaagctttggagaagaagtcttaggtggagtcttggcttataccccagttgagcgcctgtgaagatggacccgtaggcccgctagtccgctgctgtttatttttgattgtcaggccttaagtgcctttgtaataatgtaaatattatcgatataataaagatgtgtcttttatatcatgtttgtatggtgtaccccggcttttcctgggacggggattaatacactagcattcgggaaaatgaaattttctcagtcgcgacaaggtttctcagccatgagggaagctgccttctgacttctaatcggtcccactgggcgtgccaaaagcgtgttgacagaaaacacgaggcctgggagatctacttaactccagtgcaggtccaaaactcgccttcagatgtgtgagcatgccagttgatttgatcctgcaatcaacaagaaacaaagacaaagaaaccgtaattaaatccataaatgatagccgatcggctaaatgccaataacatatcatttatctttgagccgatgtcatatgtaaatcgatcggcaagtgttaagtaaacaaatcagaactaaatctactcaatcggctgtagacatcaataatatataatccttatatcgatatatacttgaatcaagtgattgggatagatcggtcaccttgccgagacagtataaatcacttaaatcgaaatatatattattaatgagattatatatatatattcatagcatagccgatcaaatagatctagcatgtattgaaattctaagcacgacttaatagatcaaactcaactgatacagcattaagtatgaaaagaagaacaatatctagacaatcaagccgctggatgtttcatagagtggtggatatctcatataatctaagccaacgtcgttatttaacctaatcggctgccttctggtaacagatgttagccgattgtaggttagatgatgatatcgtcaaggattatgcaagatatatgataactcgacgaattacgtaaacaagactagagtatcataaggatggaagcactaatctcgagaacacaaaccgccataacaagttttaccttttgttgaagatcgaaacccatgcagctcaacccgaaagcaagaacttgtcgaaataaaactaaagcaaaaagggtggtgatgcgccaaaattgtattgaacgtgtgtgttatccattacatagggctcggggcctatttatacccaagaattataagatatgtccatattggacacgactcttatccctaacaaactctaagataccataagtctttgtggcagacttttgcccacatttatctctaaggaatttacataaaatatcctaattaatagatacaattgccttcccaggactctatccatgcgtggcaatcatcttgaagcacatcaattcgaacccgttgtcgtacgcaagtcgtattattggaatcggctacatcacttaacctagtctgactcagacttagccgatcccaatcgtagccgatccggactccagccgattcttactctgtttccgcaacaacccttatcttcgattccgcttcgatccatcttcatctccgatgctgatattaccaaagttggtcgttaacagcggtgagggtggtccggttgcgatcggctgcggcctcctcatggaggcggagggaggactccgcctcagccgccgttctctcgtgggcggccaaagtggtctcacgctggtctagcatgcacgcccgcttctccagtgcctgggtacgctcctctagcacccgagcatgctcctctagctcccgggcctgctacgcctgttcccggcggtgcccatcctgttcgcgctggttgcggtcaaggacctcgatccgtggatggaaaatggcggtatcaaccccaccatggcgaaggacaggaggtgcacggatcgctctgggtaccgcggccgcggttgcgactcccccaccctcacggcggcgtcctccggcatgatcttgcgggtgaggctaaggtacctctctgccgtgatgcgtaaagccgggagcacagcgtcaccagcgtcttggcccgtggtagccggcgggaaaacggcgaggagtatggtgtatggaacagcgtggagcgagagaagcgttagggcttgaggagcgagtatgcgggtgagcagtcggcgagaggaaggagacgaactctctccctccctgcccttttatccccagctccccgcctcgcccgcgctcgcctcctcgtttcacgcccttgcggctgccccctcgattcccgcgtctgcggttgccttctcgactctcgcgtccacccatcacaccaccccactgaacccgcgccccgcatttagtgcgcctgtcatcggcacactcggcgcggggcgtgcgatgttcacgggcgcggttaggcgggcccaccatcggtcccatcacgtgcctagcaggtgagggagtcgaggcggcgtgggtgacgattctggacgtggtctagccgaccccccgattttcgcgccctaggcacccccagcatcagcgtggttaatggtggtcaaatcaccattctggctaaagcgccagcctggccgctcgccgacaaccctctgaattccccgccgggcccacaaccacagcacgggaagtcgtgaggcgccacgtcagactgtcctttgggggccaatgttcgacgcggtaccgggggctactgtcggagatatggtcccgggggtatacaaagtgaggggaagttaccttcccatctagccgcgtggctctacagcttggccttactcccgcacctcgcgagtggcagaagcggccggggggcctcggggtgccacgtcatgcccctcgggccctcgcgctgcctcgccccgaggccctcgcccaaccgccatttggtggggggagcgagcggggaggcgacccaggctgaacagccatcaatgcgtgacgccccaactgtccctcaccgcgtttaatgcggtaggggcagacgtgcggtgccgcctgactaacccacgtcaatcaggcgggaccagtctgtgaccggcctattgccggtcacgtccgattggacgggtggccgtgcccccacgtcgcctctgtatccggcggagtggaggtaggtatgtcccgtcccatcggagtgtcattcggagttccctccgtgagaggacgaccaccacaagtcttcacccatttatgagggaatgacagggctgttccccgtgtcaggtggggggtggcgctgtgtcctgctcaaggacggactgctgcttagcctccaggcgaaggcacgggtcatgacccggtcaaggtaaagtgggtcgccctcccatggaagagtagagtagaggcggtgcatgtggtatccccttgaactataaaaggaggaccttgcctaccgagaaaggggacgacactcagtagacctgaactctaggaaagcgaagagcaagaacgctctccggagttaggatcccttgtaacattcaaccactagtcccacacacaggagtagggtattacgctcgatagcggcccgaacctgtgtaatcttggcgttcgcatgcgatttaggagcattcaaggcggatacgcaatctcgagaggcgagccctttcccccggccgaactcacaaaagggggatctcacgatctcccgctagagaggatcatctcctcgacacccgacgacttggctcctgcacgctccggctccgtaggctgtggtgggtgtgttggtggtgatattcgatgaccttaggtcctgcccagggggtccctgatataccgcgggtcagttgatctcttagtaggacttggagatatcggacccctcacaatatggtaaagacccagtcttgtccgagtagaactccttccatccgtagataccatccttatcacgtgatagatttccttaatgtatacttgtcacgaccggaaatcacccaacaggcgttcctgacgtgcgtgtattgttccttgtcccaggaggcaaggtacaccaaaagttgatacaattcagagtttaacaaacggaagcgtaaatataattattacacgggcagcgaaggcccaacacacaaagacaaacgagaaacagcggaagactagggcgacgaccacaggcacttgccggcaggcacgagctagacaccaaagccttcatcttccaggaactcctcatctgggcttgggaaaaattgagcaagactgagtacaaccaccgtactcaacaagacacacccgcagatgcaaaataaatgcaagggagtacaagggaattataatataaagggttagggttgcggtaaacagcatttaaagacgtttagttgctcaaagctatttgataagcacgattctagaactatacaatgttattaatcaaggccgtgaacccacacgaacctgccttaacccaaggcctatgatgattcagaccgaactggcaacccgaccctgggtcccagctcgtcccaagccaacccaggccaaccattccatattttagttgttaagcaggttttaagaattaaaacactaacttgggtacattgctcggcttgcccatatccgagggctcggctattcgaatagattatactctgatcagaggtgtacatctttacccacaagacacatctttctcacgtgcaaccatgtgccacataccaccacggtatacagacgaaagacgtgacatagtttccaacccatcctagccatagacaagagtaccgacccaatcccgcctacggccggaacccccgggacaggcaggcaggactgagcccctagcagcagggcaccaaccctctgccattcgacatctcgactaccgggccgcagctcgtgtagccttcatttgccctggagaatgtccatcgacccccgacttcatccatctccaatccgtgtacttctgtttacgactagactgagccacaaactaagccttacccactagacatgtggaagtacggtagtgctttgcaacagaggcccgaagaccggtccttatatggccgaggtgctactatcaaaaccatgcacctcgagcccagcctaaaaccattttggggattttgaataaagggggatggtgtgaatccaattccacaataaaccaaccattccaaagtgtccaggtgatatgaatatttcccaaagtctaaagttataaaaccacctaatgttacctaattaaattgcgaagcatctacctaaaattatactagtggtactatgagtagagggtccactagttggagttttgtttaatctagggtgaacaaggtattaataacaaaaacaataataataaggtcataacaaaggtaagtaggcatggctaaataaaacagtgataacgcgggaatttaaataaagcgataatgcaataatttaaatcaacataattttataaactgggattcaatatgatcaagatgatgtgtcttgccttgctcgccttcccaaacgtcggcttcgacttccacgaagagcggatcttccgaagctgcagcgtctacacgaccaacggaaaagaaaaggcttaaacactaaataactccatataacagcagaaacaaagcacaaaaatgggttctttacatcttgaggaaaaattagagacttgaacggtccaattccgagttcaaatggccaagatatggccatttgaagtttatatgctctttaaatggatatttgcgaatttcttcatttaatttttagttaaaaaaaatcctatttattgcgtcagccgagggagcgggcgcgcgggccgggtccacgggaagtggggcccacgcgtcagccccacggtccacggtggaccgggcgcacgcggctggcggcggtcggcgccgtgggtcccgcgcgtcagccgcacccgcgggcgcgggcggcggacggccgggcccacctggcagccgcgagggcgcgcccgaaggcggcctcgccggcacggccgacgggagcggcgcgcccgcgccccgatggtcaccgccggcgaccatcggcgcggcggagcggcgcccgagacagaggagggaagggggaaggcgaacggcggtcctcggctcaccccgggacaacgacgacgacgagaacggcggccggagcggaggaaagcggcggagcgggtcgggatgacgatgacgacgacgctccgacggtcggcgggcgaagcggagcggcggacggggtcgacggggatgcggcgatgccgagggaggtggcgccgagccgggaggaagcccggagtggcgacggcggcggaacggaactcggcggcgatggcggagagggcggagcacggcgcgagcacgaatccgacggcgagagcgagcggtgagcggcggaaacggaagagcggagcacggggagggtttaaatagcgccggggaagggaaagagcggccggagagggaggaatcggtcgcggaggatccggccgccattgattgcgccggcgagggtttcgggaaggaaatcggacgaatccgagggagagagagagggaaaagcgggggaaacgggagagggaatcacggggagtgattcccctctctttaatgcgcgcggggacggcgggagcgagcggatttggcggcggcggcggcgctagggcacgggcgcggcggcgggcgcggcgggaggaggaagacgacgggtgggccccacccgtcagcgagggcaggcgggcgggcccgcccgtcagcggcgcgcgcgcggggaggagccgatgggccgcgggggaagagagagagagagggagggattgggccgagccggcccaagaagagaaaaggggggggggaaaagaacttcttttaagattttctttttataaacctttttaactatgtttatttcttttcaattattatttgtgctctgaaaattccactaaaatttatttacacgttttaggcttttaggaaatatacaaaaatcctccaagcctcatttgacttttatctgtgcacattttaattgttgaaggctttcacattgattttaattattctcagcacaattttgaggatgaaatttagggtcgttttgggacgcgacaatacggaaactatccatatacgcgtgggtataccgtattagtatataacgtacagccaaggatagagggtataccttatccgtaaccttgacagtagcccccgacttctgcttaaatgagctcatgttatcgatcgcaacttctgatgtcggaattgttgtcgctctcatctggtcgatctcggtgtgaaaactgtagagacaaagagccatcgacaacaccgcatgaagttcaacggccatgagtgaatttaaattgaagtctgaaaaactaccccacgcaacggacccagaattttccggcagcaatctctctcctttccttggaatacgcaccatcggaagcacgtttacttaaagggattttggggatccatttgaagtccgtttgcaagaaaactctcctgccttctagcactcttcgtcttctccgctccccacaaaaaaaaaccctagctcacttccttcatcctattctccggcgatcctccggcagcaatggaccttgagaaatcttcctcgaacaccgcatccatgaagaagctacaggacgacggtgccctccccggtcgcgggaccatgcagagggaggctagaggtacagaacctaaacccatctttcaccgcatggttgtaattgaacattatgtttcttgtggttttcttcctccgccttccgagtttcttcttcttgtcttgaatttctacggcctttctttgcttcagtttaaccccaactccatcgcctttttgagcatcttctctcatctttgcgaggcctaaattggggtagtgcctttccttgacctcttccatttttattacgagctgcgttggatggaatccatcagggtatctggatgcgtcggattccgacttcgggatggcctgaagtcgcgttacatccccttcagtgccccacttctcgcagcaagtggcaaacgagatggttctacctccagatagagaacttggaccccgtccttgttattcctgaggaccagccagaaaagatcccagagtggactgctaaacccgccttgactccctccctccaatcctttatcgacatcattgatgatctccgaaaacgggggttgtcgggatatgaagtcgctgccgacttcgtaggtcggcggattcaaccgctacaggcccgtgcccatccggccttcgattactctgggccagatgacgtgacccgggtctctcctcggggtatttatcctcgtatttctaaatttgtttcaagtgcatctgtttcctctaacttatcgagttctcgttctcgatttacaggtctggacagtgacactgtggggcgccgcatcggccagataatgatcagctgtcacgcccagaaattcccgaatagaattccaagcagaatgtgcaataaaatccccgtccaggaccagccagggtacacaaacgacaatgttgacatacagatccacgtcttacaaacatcataaagttttacataaatgcagcggaaggaaagaaagacaacaggagctaagccttgactaaactgcagcgggaacaccactccacaggcatcctcgacggcaaggacgaagcctactcctcggagaacccttcatctggtccgaactcaaactctggggttgggaaaagtagagcaagactgagtactacccactgtactcagcaagtcataccggaatagaggtatgatgcagggaatcatcaaagaaaagctaaagtggttcctttgcataaagcgagcatttataaacagagatttcaagatttaaacagttgtaataagtaattaagcagtattaatcatccactgtccaacgctacaccacgttgcaacaggcccaaccatccacctaaactatccaaattaaaggattacactaaggtgagactaatcatggtgaatctggttgaccgcccatgaccgcgggcacggctattcgaatagttttactctgatcagaggtgtacaactgtacccacaagacacagccccacgacacgtttccgtgcgccgacatgccaccacgacataccggaaagaggccgtgacaggacccttcgcataaccccctctagccaagcacaccacacctcaggtttcacccccgtccccagtgggcgacgggcagtcccctctcgtgcctaggtgaatccggaagcgacagaggccgtcgcagggcccgccccgctccatcacgcccacccttgcctggatgcgtcgactagaggaaagctacactacaagcccagccgttgcccacgctggcttgtggtaagtacgataaattcttccagggcatcccgcgaaccggtccttaactgccatgggtgcgaccagcaaaaccatgcacccacagcccaccatgtgattcattttatttaaccaacaccagagcggtggtattaaaccaacattatcatataaacttatagtctaggttttaaatgagattccccattgtgtgctagttgaactaggcatggctaagcaattcctagtccaaagtctaatcatgttataacccaggctaacaaaggagaatgatatccaaaagcatggctataacaataggtaaccatcccatagtactattataaaacaatgcaatatttgaaagaaaacaatagagcatttgcaatataggatcaacatgttcaagtgacaagcatgacttgccttgctctgctgctggagggacctcggcgactatctcgaagtacaccgaagcgtcggaggaatcggaatctagcgacatacaaagcaaacattgcaaacaggctataagactactgaaacagagaacaaaaccatttttaatggattctacacatttttcttgatttactgagacttgaatggacttaaacggagctcggatgaattagttatgaattttagaaggttcactgtgtttattactataaaagaaaaaccttaaacaatttattgcgcaatattaaccagggctgacgtcagcacgggcggcgcggcgccgacatgcgggacccaccggtcagcggcacggggaggagagaggaggcgtcggcccgcgggcccaccggtcagcggcacggggagggcggtctaccgtggaccgggaccacgcgggtgatccaccgccgatccacgggaccgacggcccggatcgccctcgggccgatcggacggacggcggcggcggcagcccccgggctcggatcggcatcaaagccgatcggccgacccggggctagcggcggcggtgcgtgcgcgtcgcgtcgctggcgacggcaaccggcggcggaggcgacgcgaaagcggcggcagcggatggcggcaacgacccaaagcgacggcgagcgcgggcggcggcgacgcacggggaaacggggaaggagaggagaggagatgcctcaccgagggtggccggcgcggaggaagacgatggcgaatggcgacggcaagccacggggggcgacggcgaccggcggacgagctccggcgtgccctaaggaaggagaagggagggattagagagagggagatagaccccggcgaccggcattcgaggccgaaagcggcggtagggtttagaccctaccggagcgcgaggagacgggggttccggcggcgaacctcgacggggaaggggcggccgaggtagatctcgaccccgcgaacccgacggcgacgacggaacggtgcggcggcgaccctagcggtggctagcggcggccgaagtagcaaaaacggcggcggcgggtggttgcacggcgcgggagcgttggggggctcgggagaggtcggcgcaatggggaaaaagagagagggggtgccggcgatgcttaaataaggggagagggggccggacgtggccgggagcggcgggaatcaccggccgacgtgggggagtggggaggagagagaggcgggattcgattttcgaatcccggccatctcgggcgcgggcgcgagcgggagagagaggggaatgggcgcgggggatgcggcgcacgcgcgggcgtggtcgacgtggcccggggaaggcggagacgtgggcgcggcgacggttgcgggcgcggcggcgcgccgggatcggcgggaggagggagacgggcccgacaggtgggtcccacctgtcggcgaccccgggagggagggaggcgggcgcccggctgccgggctgggcctcggcctgcggccggcccagcagagaggagggggaaagagaggggaaatgggccgacggcccatttaacaaaaaaggaggaaaaagaggggaaaaagaaaaagaaaaaggaaaaaggattttccctggaattaaaaattgcactttggtgatttttaattggttacaattgtttctagagctctgaaaattccattaaaaatcctgttaatgaatttcgacatgtagaactcaagaaaaattccacatgtcaaatccgattattatttgcattattttcttagggttttctcctgatttcacctgcattttcttagggtcttttataaattacaatttggcttgggaggaaaacttcggggtgtgacaaacctaccccccttaaacggaatctcggccccgagattcggaggagctggtgaagaggtgcggatgggcggctttcaactcatcttccctttcccaggttgcttcctcttccgaatgatgactccactgaactcggcaaaaccgggtgaccttgtttctggttctcctttcgctggtatccagtatacgaaccggcttctcaacataagttaggtcttcctggatatcaatgtgttccgaatcagcctgttcttcaggtacccttaagcacttctttagttgggacacgtggaacacgtcatggatgccgatcatgttggatggaagttctagctgataagccacttctccccttcgttccaagattttgtatggtcccacgaagcgtggtgccaacttgcctttcgtctgaaaacggtgtactccccggagcggagtgacgcgaaggtacacgtgatctcctgcctcaaaagtgagctcccttcgacggttatccgcgtagctcttctgtcgagactgagcaatcctcaacctttccctgatgattctgactttctcttctgcttccgctaatacttctgttccgaatagttgacgttcgcctgtctgatcccagaagagaggtgtgcggcacttccggccgtataaagcttcaaacggtgccatctgtagactggcctggtagctgttgttgtacgagaattccgcatatggcaagcttttgtcccaagctccaccaaaatcaagagcgcaagctctcaacatatcttccaagatttgattgacccgctcggtctggccatcagtttgcgggtgataggccgtgctgaaatttaaacgggtccccaattcttcctgcagcttctgccagaattttgaggtgaactgactccctcggtcagatacaatctttttgagtactccatgtaggcacatgattctcgaaaggtaaagctccgccaaccttttgcccgtatatgtggtatgtactggtatgaagtgagcaaccttagtgagtcgatccacgactactcagatcgaatcgtgacccgacgatgtccggggcagtcccgttataaagtccattccaatttcttcccatttccattccgggatttgaagaggttggagtaaacctgtgggtctttggtgctctgccttcactcgttggcaaacatcgcagagtgcgacgaattcagctatttctctcctcatgctgacccaccaaaacttttctttgaggtcttgatacattttggtgctgcctgggtgaatggagtactgggtctgatgagcctcggtgagtatcagatccttcaattccttgtcgtcaggtacacacaatctttctcccatccagattgtgccatgctcatccttaaggaaatcccgagcctttccgactctcatgttctttttcagttctgctatttccggatcatttacttgagcggctctgactgatccacgagcgtaggccgtgcttccagagcggctacgaacccgtgttcaacaattcctatgttgagatgttcaaactcctgccgcaattcctcacacatgctctcgatgcatagagcagtgcagtaacttttccggcttaaagcgtctgccaccacattggccttacccgggtggtagtgaatactcatgtcatagtctttgattagctccaaccatcttcgttgtcgaaagtttaggtccggttgggtgaagatgtatttcagacttttatggtccgtatatacttcgcagcggttgccgatcagatagtgcctccagatcttcaaagcatgaaccaccgctgccaactccaagtcatgagttggataatttccttcgtgtggacgcaactgccgcgaggcatatgcaaccactctgccctcttgcattaggacacatccaagtccgtgacgggatgcatcgcaataaacttggaagtctttcatctggtcgggcagaatcaaaactggtgcggatactaatttcttcttgagctcctcaaagctcttatcgcactccgctgtccatttaaatttctcatctttcttaagcaactgagtcatgggtcgggcgattctggagaagtttccgatgaatcgacggtaataacctgccagtcctagaaaacttcgaatctgcgacacagtcttcggtggggtccacttggtaactgactccacgttcgatgggtcgactgccacaccctgagctgtaatgacatgacccagaaatttgacttccgtcaaccagaaatcacacttgctgaacttggcgtatagctggtgctccttcaacttctcgagtaccagacggagatgttgttcatgttcttcttcgattttgagtagataagtatgtcgtcgatgaataccacaacaaacttgtccagaaattctatgaacactttgttcatcagattcatgaagaatgcaggcgcgttagtaagtccgaaggacataaccgtgcactcatataacccgtaccgagtggtgaaggccgtcttcgggatatcctcttcccggattctcaactggtggtagcctgagcgcaggtctatcttagaaaacactttagcccctttcagttgatcaaataaatcgtcgattcgcggcaaaggatatttattcttgattgtgacctcgttaagtgcgcgataatcgacgcacatcctcttcgtcttatcctttttctccacaaaaatgaccggagcgccccaaggtgaagtgcttggtcgtatgtaccctttctgcagctgttcatcaacttgcttcttgacctccgttaattcgttggccgccattctgtacggtctcttatagattggagcggttcccggtgccaaatcaatccggaattcaatctctctcttgggtggcatggtagtgaggtcttcggggaacacctctggatactcgcagactatgggtatatcatccaattttctcaagttcttctctacggtgtccactgggatttccgtctcaatctgattcaacgagactcctttctttggcgagactagagatttgtacaccacggtttctcccttctcgttggtcagggtgactgtgcgattcgcacaatcgatgactcccttaaacttggtcagccaatccatcccaagaatgacatctaggtctttggattcgagaaggatgaggttggctagaaccggtgacctttgaatttctattgttatagaagggctgaattgaaccgaagtggagctattccctggggtatgaacccgcatcggtgtgctaagttcctctcttattaacccatgcatcccgacaaatttctttgagatgaaagaatgcgttgcaccagaatcaaaaagtactgttgcagggattgagttaacaggaaacgtacccagtacaacctctggtgctgcttgtgcctcctccgcagatgcgtggttgacacgagcctggataaaccttggcccggcacgcctaggcttcgggcatttgtcagcgaagtggccaagctcgccacagttgaagcaggaccctggttttgcttccgtctccttcttggcttgcgcgggctggcctgactgtgccgatgccactggtgggcgtggagctgcaccgcggttgggctgacctccatggtggttctgactgtcactggtgccctggtagaagttgctagggttgaacgggcggtgctgacggacgatcatggtggtaggtccaccctgctgtccgggagtgaagcgcggcctctggtgacttccctgatgtgccctgaactgagcggccttcctcttcctgtccatcttgttgcgttggtcctcctgacggattgccttgtcaaccagccttcaaagtcagcgtagtacccggatatcagctggttggtcagctcatcatccaggcccgccatgaacttctcctgcttatcggggtcggtacgaacatcctatggtgcatatcgcagtgaggcgattgaactcgtggaggtactctgtcacggtcctgttaccctgatggagtgcacgaaattccctcttcttttgtgccacgaccccatctggcacttgtgcctcctgaagctacggcagaactctgcccatgtgacttcagtacccggtgggcgggtggccatgtggttgtcccaccaagctgacgcaggaccctgaagctggtgtgtggcgaaagcgaccttctcctgatcattgcactgcaggagattcagcttcttctctattgcatggagccagtcatttgcctccatagggttggtggtgctggagaaggtgggtggcctgactcctaggaactcaggcaatttggattgagggggagggggaccaaagtgctggtgctgctgttcgacgtgctgcatcatcctctggtgcatttgctggtgttgttgctgcatctgctgcatcatggctgccatcatctgagtctgatgcgccataacttgggcaagggtcggattctcgggaagtggtggcggaccattgccggaatcactgttggggtgcacgccatcaacgcgttcttcgccgttgctgccctcgcctgtcgtgcggttgccagtcctggtgtagaccatctggagggaagagcagccggggtaaagaagaaaaacagatgctcaagaactaagctttattacaaaggaatttaaactgcaattgttctgatctgaattaaaacacttaaaagagcaagcaaccaatccttattaagacagccataccataggcacatgatatcgaccgtcgtctgacccaaacaaacaacctaaacacacaaactaacgaacaaaagctagacagtcggtaaactagtgggaaaacgagcataatgctcggaacggctcctgcggtcggtggagtcgaaagcgtcctcctgctcgtcaccaggtccctctgagcgactcctggagcctggcagatacgtctcgccgctgcctgactgcgagccactggagctgctgctgctgagatcgcggctgccactgggagtagcagacaaccaacccccggtgccactggctggacctctggcggctgacgctggagcgaaggagagagcggacgcgggagctggagctggagctggagctggagctgcaggaactgcgggcggaactggaggtgctgcgggagctgctgctggaggtgggtttctgggtgcaagctggatgcgcacgggtgccgtcgtcgtcttgcggggcgtggtgcggatccggactcctcctggcgctggaagaccctttagctgagcgttctccttcttcaggcgcgctatctcgtccttcaaagcgacgatcctcatgagcttcccatcgttcaaggccttggtcgccttgtgcaggtccgagtgcatcctgtccaatcccctcatcacagcacacatgtgaccgaaggtggtgtcgttctcgccagctgtcggacggaaggagctgacgccatcaccgttggctcgactggggtggtagcggtacgccgtgtcgtggaagatgtagttgtggcgctcccgtagtctggccatcatcaagtaggctgcctcctgacaggcgtgatctgctgtgcctccagatgcctcgaccgccatgttggcgaggcaagtctgtcacatcctgattttcgtttcaggatttataaattatttaataaattattaatagaatttatattaaatgttctttaatttacaagtgaagttaaatgtgggaaataaaatttcctaaataaaaaaaagcatagatggatttaatttttattaagtcctccatgattaattatactctctggaattttctcggatttttcggagctcaattgttaattttaatcatacaaagaaaagttcagcaattatttaaatatcaaattaatcaggtaatgatctaattataattgttaagtgattttcttgtttaaaatccttaaattataaattgttgtttaaaaggaattattagaaatgattttaaaagtttaaaagagaagatcttttcttttaatttgctaaatctcaacataaaaatgagctagataaaattttgttaaatactttgcttgttcctctattttctagatttttctgggaattatttgagcaaaggaagtatttttaataaatgaaacatcatttcacaaattatttttaattgaaaaagtttttaaaatctcctcctaggccgttgggccgaatccggcccaactcctctctctttctctctcttcccgcgcgcggcccacgccggcccagccgagccgcccgctcctcctctctccagccgctgacatgtggggcccacatgtcagggccgtcttcaacctccggccgccgcgccgccgaagcccgaaccctagccgtttttgcgccgccgtttccggccgaatccgaccccatctcttccaattgattgaggggttttgttcctctcggtctcctctttcttttcccccaagaatcaaagcaaatggttgaggattcgatccgaatcgaactcgttttgttttatctctaaaaaacgagtccgagttcttcccgattcgattcctctcgtttgcgacttgatctgttcgattcgagctcatataaaccttccccatgatctcctctttcgtttgccccctttcccgagtcctcccgtgcctcctagcgccgtcgcgacgagctccaagtccgccgccgccgccggccatcttcggcatcgtcgcgccgccgtctccgtcgtcgccgtcggtcgccgtcaccaccgttaggtgcgccgtgaggagaagaagctcggccgcccctccgttttcgccgttgaccaccggagcgccgccgtcgccgctaacccgagccgccgccgccttcttcttcgtcgccggccgccgtcgtgcatcattttgggtcggggtgagtaccaatgggttcgcctcgttgccctctacgcgtaggtggtctccgtttccgccgccgatgtccctagcgccggcgagctcgtcgtcccgagccggccgccgtcgctgacgtcatgctgacgtcaaccttagggctgacgtcattgtttccagggctgacgtcatcatccctttttccttttcctttttccttttttctaatagatcaaatctttggaaaatcataactaaataaccgtagatccgttccaggtggttcaagttgctaaattcttctaaaataaagatctacatattaaaattgtccataaattgagttaaatttatttaattctttttaaatgggctttaattagatttaatcttgtaaaattcataataaattcatttgaagtcagaatgaggccgttcaagtctcataattcatctaaaattatgatctacatgtttgtttactttttatgtactgttcatttggtttttattagtctttttcttcgttttgcgtgttagcttgtcgtttccgtcgttgcgaaggttcgtgagtgcgccggaagtgatcaagaagattaattgaagaccgattattgcaaggcaagtcacacagatcctaaacacaatcctttgagcatgttgatcctatatttaaattctctatttatttcaactgtgcatttattttcgaatgtcaccgggtggtgtgaacctattcctttgttatggccaatttgcattgaatgccctattccttgataccttgggtaataaattgattagcttgaaccttatgtattggtttggttcagctaaatgtcatatatatatatataattgcttagcaatgcttagaaacattagctcattaatgggatgaattatatacactacattattattatggttatatttaatggcagctcacgatggtcaatcgtgattggttaattaattatttgccaattaaaacttgataatggtgggttgtgagcacatggttttgatggttgtgctcatgacaattaaggaccggttcgcgagctactgttgtgaaacattaaccgtaccaaccacaagccagcgtgggcaacggctttatcttttgtatagcgtgattcattatagtgtgccagactgtgaagtggcgagaagtccatgggggtcgctggggagtccatgcctctggttgtagagggggtgattatgatccaggaatggtgcactgtggtgagttgtgttatgcaggggataatgtcacagcctctattcgggtactttccagtatcgcgacgcatggttgacatgatgttgaggttgtgtcttgtgggtacagtggtacacctctggccagagtaaaactattcgaatagccgtgcccgcggttatgggcgagttgagcaatgtttttcgtgattagtctcacacctctcacaataattatggatgtaataactggtaataatttgcttagctcctgctttggagattagatctgtatagccgggtatggttgttcaggatggttgggcctgagcagcatgggtgtgctgttcagtgttgattaaaattgatgattaattactctactgttttatttctctcaaatgttttgctaaatgctgcttttgcaaatgagcctatattatgccatcctttggaatctttgtgcacttgcatatttgctgtgtggcttgttgagtatgtcatatgctcattcttgcaataatcaatcaacctcagttgaagataaaggatccggaaggagaagacgtttggcttataccccagttgagctgcctgtgggagtggagccggagcttcgctagattttatttttccgctgcagtttccttcttggtgaggactaagtgcctcttaagtaagtatttatcggtttagttattatgatggatttgtatattaaattgtcagtttgtgtacctcggctgattcctggacgaggattttatgcacaaatcagttcggaaattattagtgaatttccgggcgtgacaagttggtatcagagccatctcgactgtaggataagccaaatggtcaaaccttaaggactaattttccgaaaacataatttgtgaaagtttctcttttcttccttatctagaattcttcgcaaatcgttttgtcgttctctcctcttttccctctttcaacgtgagtagttgttaaacttgatggagaaactcgaaggcgtcgatgttgtcaacttctgcaagtaaagtggatcgaggaagaaccgaagtgcccagatatcaagatagagtgaagttggatcctagtttagaacctatgccgccaaagtgtctttgaagaatagttagtaggatagaacgtttgttgcttgcttgtgtgtaggtatggttgcattcccgtcattggagtagtccaatgatgagtgtgtaactatactaggttgtttgcttaatcaacttgaacaatataatggtttacacacatcagatcagtgttaaactggttaaggtcttgtctttagtgtaacccctctccttctatcttctctaatctgcaacagatggtgaacactcgcactagtggaagtggaaacaataacaatgaagagaacccaacccttgctcaagtgctggctcaacagacccaattgatcaacatgttagtgcaacaaatgcagaaccagcaagggaacaacaatgtcaatcctccgccgccgcagaacaagttagctgattttcttcgtgtgaagccacctactttttctagcactaccaacccagtggaagcaggtgattggctgcacgctgttgagaagaagttggaactgctccagtgtacggatcaggagaaagttgttttcgcttcacatcagttgcaaggacgtgcttcagaatggtgggatcatttccggatgaacagagcagaaggacaaccaatcacttgggcggagttcactgaagcattcaagaagacgcacatacctacaggagttgtttctttgaagaagcgtgagttccgggcacttaagcaaaaggatcgtacagtgacggaatatcttcatgagttcaatcgtctagctcgctatgctccagaagatgtgcgtactgacgaggaaaggcaggagaagtttttggaaggcttaaaggatgagctgtcagttatgttgatctctcatgactatgaggattttcaggagttggttgataaagcaattcgactggaagacaagaagaacaggatggacaatcgtaagagaggaaggattgttttccaggaggcacaggatagtagccagaggtagtgtatcaagccactccaaattggtgaatctttttctgctggtcaaggacagtcacaacagttgggcatcagtggtgagattaactcagagactaatgcaagcaatgaaggcaatgatgagcaagctactcaatcagtgtcatttcagcaggatcagtctcaagaagataacagtaatggaagggagcagcgggtgtgtttcaattgttatgagccaggtcacttcgtaaaagagtgtccgaagccgaagcgtcaacagccacaaggccaagtcaacaacattgtcctcacaggagcaaatgcagtgccggttgtgtcttcaagtgttacaactcagccactagtatcaaagcagcagtagttttctttaaagccttagaataattatcgaagttatggaataagatagactgcagtttatctatgccctttttctttctagccgttccgaatctcgggacgagattctttgtaaggggggtagatttgtcacatcctgattttcgtttcaggatttataaattatttaataaattattaatagaatttatattaaatgttctttaatttacaagtgaagttaaatgtgggaaataaaatttcctaaataaaaaaaaagcatggatggatttaatttttattaagtcctccatgattaattatactctctcgaattttctcggatttttcggagctcaattgttaattttaatcatacaaagaaaagttcagcaattatttaaatatcaaattaatcaggtaatgatctaattataattgttaagtgattttcttgtttaaaatccttaaattataaattgttgtttaaaaggaattattagaaatgattttaaaagttaaaagagaag

SEQ ID NO: 25139 - DNA, 2255 bp, Oryza sativa
ctcctagcgccgtcgcgacgagctccaagtccgccgccgccgccggccatctcggcatcgtcgcgccgccgtctccgtcgtcgctgtcggtcgccgtcaccaccgttaggtgcgccgtgaggagaagaagctcggccgcccctccgtttttgccgttgaccaccggagcgccgccgtcgccgctaacccgagccgccgccgccttcttcttcgtcgccggccgccgtcgtgcatcattttgggtcggggtgagtaccaatgggttcgcctcgttgccctctacgcgtaggtggtctccgtttccgccgccgatgtccctagcgccggcgagctcgtcgtcccgaaagctcggaacagctcctgcggtcggtggagtcgaaagcgtcctcctgctcgtcaccaggtccctctgagcgactcctggagcctggcagatacgtctcgccgctgcctgactgcgagccactggagctgctgctgctgagatcgctgctgccactgggagtagcagacaaccaacccccggtgccactggctggacctctggcggctgacgctggagcgaaggagagagcggacgcgggagctggagctggagctggagctggagctgcaggaactgcgggcagaactggaggtgctgcgggagctgctgctggaggtgggtttctgggcgcaagctggatgcgcacgggtgccgtcgtcgtcttgcggggcgtggtgcggatccggactcctcctggcgctggaagaccctttagctgagcgttctccttcttcaggcgcgctatctcgtccttcaaagcgacgatcctcatgagcttcccatcgttcaaggccttggtcgccttgtgcaggtccgagtgcatcctgtccaatcccctcatcacagcacacatgtgaccgaaggtggtgtcgttctcgccagctgtcggacggaaggagctgacgccatcaccgttggctcgactggggtggtagcggtacgccgtgtcgtggaagatgtagttgtggcgctcccgtagtctggccatcatcaagtaggctgcctcctgacaggcgtgatctgctgtgcctccagatgcctcgaccgccatgttggcgaggcaagtccccacgtaaccatggacctccaagcggacacggtgaggaagctcgccactgagcggtggaatggtcgtgtactccggcgcgtcggggtagcccaccaccagtgtcatgcgtgccaactctgccacgaaatcgatcatgccttctccgcggtggttgggtgggtgaccggccatctagagaagacaaaggagtaggatcaatgcatgctcaaatccaaatttaaataaagcaataaaagactcaaataagggaatcaaataagagcagaattttatgcatagatcattttacatgagagcgaataaataagacagactcacataacgataaaataatgagaaattagatacataataataataacgaacaaagcataaataccttgcaacccatgttacagagctaggacctaatgcattgcacccatcaaaccccaactaactgacgaataaatcccaataattttactaaaaccctagactgactcgttttgaaaaatctcacttaaacgagcgaccaagatttttcccttgaaccacaagaacagatccccattttcccggaacaaaaccaattgcaaagaacatatgcaatgacaaggattcagagggctcttaggtttttccatttggcttgtcctacggtcaaggtcggctctgataccaacttgtcacgcccagaaattcccgaatagaattccaagcagaatgtgcaataaaatccccgtccaggaccagccggggtacacaaacgacaatgttgacatacagatccacgtcttacaaacatcataaagttttacataaatgcagcggaaggaaagaaagacaacaggagctaagccttgactaaactgcagcgggaacaccactccacaggcatcctcgacggcaaggacgaagcctactcctcggagaacccttcatctggtccgaactcaaactctggggttgggaaaagtagagcaagactgagtactacccactgtactcagcaagtcataccggaatagaggtatgatgcagggaatcatcaaagaaaagctaaagtggttcctttgcataaagcgagcatttataaacagagatttcaagatttaaccagttgtaataagtaattaagcagtattaatcatccactgt

SEQ ID NO: 25140 - DNA, 628 bp, Oryza sativa
ccgaaactccttcatcagtttttggcacttctcattataaactacaacgtatcattcttacactcatattctcatgccaactgactgattactaacaaagaatcccccatgatttcaacagcatcggcttcaacctccttgagcaattgcaaccctttaagtactgcctcatactcagccttattattagtcgcataaggtttgatagtataagcaaactcaaaacatgccccccgaggcgaaattatcctttgtgtagacgttcgaatcctccacgacgccctcaaaataatagcttgggttctccatcttcaattggctgtatatcagaatcggatacttttaaaaaatctccatcccaaacttttccagataaacaatcaaggccatccatctcccaaagagctaaatcggcacaagcaacattgactgacctgtcggctggtacgatctctatcttgttgccttgccattgaatcaagcattggtgcatggtcgaaggaatacaacaattagcatgaatccaatcccttccaagcaacaagctataagaacccttcccatcgatgacaaagaatgttgtagggatggttttactgccgactgtcaactccacgttcagaacccc

SEQ ID NO: 25141 - DNA, 660 bp, Oryza sativa
gcaggaaaggctattgcaatgctacggaaggacgacagttgccattggaattatgcaaggaatttgaaagattaaatttgggaattgtcagtagaggtttcgttgcagccttagaagcgaagcccactctaattgatcaagttagagaagcccaaattaatgatcatgatattcaagaaatcaagaagaatatgagaagaggaaaagctattggtttcttggaagatgagcaaggaactgtatggttgggtgagagaatctgcgtccccaacaacaaagatttaaaagatgcaattctgaaagaagctcatgatactttatactccattcaccctggtagtaccaagatgtaccaggatctcaaggaaagattttggtgggcatgtatgaagcgtgaaatcgcagaatatgtagcagtatgtgatgtttgtcagcgagtcaaggcagaacatcagaaacccgccggtttgttgcagcctttgaagattcctgaatggaaatgggaagaaatcggtatggattttatcactggtttacccagaacatcatcgggccatgactctatttgggtgatagtcgacagacttaccaaagtggctcatttcatcctagtaaagacaacatattccgggagtcggttggcggaattgtatatggcaa

SEQ ID NO: 25142 - DNA, 1120 bp, Oryza sativa
tgggaggctcaggtcgaggttcacacacgagttccttcagagtcagactacagcttcctgacatgccaccgtcgtgacttaccgaagaccgcgatgcaggatgcagcccgggaggccttcctccgacttagctctatccaccgagctgagttggcgagtactgagtttgctcaccacccgtttcgagaggagagcaactccgtctgcacggctcaggacacaccttgctgctacaacccgatagtgactcgactgtcacgatgggctgaggcagtagacgacttttacgaggaggctctgttagagatcaacgaccagcagaggcgtgtgggagagttagagaccgaggtgactgacctcacagtgcagcagcttcagctagaggaggagcaccaggcttggggtagtaagatagactcaatgaaggcatagctccaggtccacggcgaccggttccagcagttatctaaccagtacaatgatcgccgcgggatgatggatacacttgaggagcaggtgagagagagtcaggagcacgtcagccagctggaggagcagcttcgagcagccacggtcagcaccacaggagcttctacttccacagcagtagggtatgaccgctactccttcctcaccacaccgtacccaccagcgttccacactcttttgggagaggttggtatgctggctactgagtcagcaccttacttggtggacccgacagtgacacagccacctgccccggagattgtgcacactccactgatccctacaccttctccgcagctaggttcgagtttggagactccgatccaggtcgactccgagacagaggggaccgacaccgagcagagatcgagccagacatcactgatccttcagaggatgagacccctgttccccgcatcaccttcctcggacgccctcacaccctcagcactgcccgcaagagcacacgacccccgggcaagaagcccaagccagatccagaggccactacttctgagccgtggggactcaggtttgcctgtgccagcgaccaccctctacctgccccaggatcctgcggatggttggatgactagactggaggattattgcagcttcgatctcgctttag

SEQ ID NO: 25143 - DNA, 3190 bp, Oryza sativa
aaagtgatcttcgtagtaaaccaactggagggacccgctggtgattggtgggatacttacaaggaagctcgggaagaggatgctggagaacccactgggaagagttcactgcagcatttcatgagaacttcgtgcctgctgcggtaatgcgtatgaagaagaacgagtttagaaggctgcaacaagggaacacaacggtgcaggaatatctaaaccgattcactcagttggcccgctatgcaattggagacctcgcaaatgaagaagaaaagatcgacaagttcatagaagggctgaatgatgagttgcgtggacctatgattgggcaagatcatgagagtttccggagcctaatcaacaaggtcgttaggctggagaacgatcaaaggactgtagggcacaaccgcaagaggaggcttgctatgaattgcccacctcagggagtgcctcagcgacacaagggagccacttcgtctgggtggaagccccctattgtggcaaccaaccgccccgccgcacctagaaatttcaacaggccggttgcgattcagaatcgcacccctacaccaactctggctgcccctggagccaagaagaatgtggactgcttcaattgcggggagtatgggcactacgccaacaactgccctcatccacgcaaaactcctgtccatactggcgctaatgcaatgactgttagtggaactactgcccctgctgccggacgaggactattcaagactccgcaaactaacaggaccgctaccagatttggacgcggacaagtgaaccatgttcgagctgaagaggcctaggaagatcagggcgtactaatgggtatgttctctatcaattctaccccggttaaagtcctctttgattctggtgcatcgcattcattcatatctttgaaggctagtcaaaaacacaacttaaccctagtgggacttagaaagcctatgatagtacactcacctgggggcgagataactgtgagtcatgcttgcatagacgtacctattcatcttagggatgtggtgtttccctccaaccttatggttttgataccccagaccgtgggtgtcatattgggtatggattggttaacaaagaacagaggggtaatcgactgtagacgtagggaagttaccttgaccacaccctggggatcggatatgagagcaaccatggatcaagatcctagactaaccgaacatgccggaggcatatttaccatgctacccctgaaaggaatgcctgtagtgcaacgatttcccgatctgtttctagaagatttacctgggatgccaccagatcgtgacatagagttcattattgatctgatacccggaactgctcccatatccaagagaccttatcggatgccagtcaatgagttggaggaacttaaaaagcaaatcagagaattgcaagaaaagggatttgtacgccccagttcgtcaccttggggagccccagtgctattcgtcaagaagaaagatggtagcatgaggatgtgtgtagactaccgttcactaaacgaagtaactatcaagaacaagtatccactaccatggattgatgatctttttgatcaactcaaaggagctaaggtgttctctaagattgaccttcgatcaggataccaccaattgaaaattaggaccggggatatacccaagaccgcgttttcaacacgctatggattgtatgagttcacagtaatgtcgtttgggttaaccaacgccccggcatactttatgaatcttatgaacaaagtgttcatggattacttggacaaatttgtggtagtattcattgatgatattctaatctactccaaagatgaggacgaacatgcggaacacttgcgattggtactcgagaaacttcggaagcataaattatatgcaaagtttagtaaatgtgagttctggttaaaagaagtcgcttttctaggccacgtaatctcagccggtggagtagcaatggatcctgctaaagttgaggccgttacggaatggaaagcacccaaatttgtgactgaaattcggagttttataggcttagccggatactaccgaaggtttattgaaggattctctaagatagcccgaccaatgacacaactactcaagaaggaaaagaagtttgtgtggttagaacagtgtcaggaaagctttgagcagctcaaagaaaagctgacctcgtcgcctattttagttcttccggacatctggaaagactttgttatatattgtgatgcatcaaggcagggactaggaggagtactgatgcaggacggaaaggttgtggcctatgcatcacgacaattgcgaccacatgaggaaaactaccctacccatgacctagaactcgcagctgtggttcatgcgctaaatatttggagacactatttgattggaaaccattgcgatatctacactgaccacaagagtctgaagtatattttcacccagtcagatctcaacttgaggcaaaggcgatggctggaattaatcaaggactatgatctagaggttcactatcaccccggcaaggccaacgttgtggccgacgctttgagtcggaagagccattgcaatcatctgaggacggaagggatggctcctgagcttaaggaggaaatagcccaactaaacctacatatggtacctcatggacagataaacaacctggacattcaacctcttttgagaacccaaatagaagaggcccagaaggacaacgaggaaatccgagaggtgaaggaacgtctagttgcaggatttgcaaaggaattttcaaccgacgagaaggatgtcctatggtataaaaagaggatttatgtacctgaacagggtggactgagaggattaattctaaaggaagctcacaaatcagcatattcattacaccccggaagtacgaagatgtaccaggatctgaaggaaggatactggtggcccaacatgaagagagatgtggcagaatacgtagcactctgtgacgtgtgccaaaaggtgaaggctgagcatcagcgaccggcaggtttgctgcaaccccttatgattcccgagtggaaatgggatgagataggtatggattttattgttggattgcccaagaccgcaacagggtacgattccatctgggtgattgtggatcgactcaccgagacggcaagatt

SEQ ID NO: 25144 - DNA, 7204 bp, Oryza sativa
tttctccgatgaggggaacgaaaaggtttaaggtcaaaggaaaactagcgccaagatatgtgagaccttttcaaatcacggctagacgaggagaagttgcataccagttacagctaccagaaaatatcgccgatgtgcacccagtctttcatgtgtctcagttaaagaagtgcttgcgagtgccggaagaacaagctacgttggaagaaattcatatcagcaatgatctcacgtatccagaacacctagtccggatattggatgaagctaaaaagaagactagaaccaaagtgtggcgtatgtacaaagtacaatggagtaatcacactgaggatgaagccacttgggaaagcgaagaattcttgaagacagaatacccccacctattcgaaaacctgtaagaaatctcgggacgagatttatttaagggggtaggtttgtaacaccctgaaaatttgaccaataaaaacaaaactctaaaaatacgggccttcgaaaacttttaaattaattgcatcatgccgatcttattcgcctattttatttggatttgatttcgaagttcattaatcgtgagtaaagaatagttaattaggaataaaccctagaagtaaattggtaaaataaatataacttaaaataaagattaggtgtggatagaaataaataaaatattatcacgatcatatttgtatcaattaaatttaaatgcgatggaataagaattaaccctaattaaaaattcaaataaattatataaataaaatatgagtaatattaatctagggtgaattcattagttgagataacacaaatattgagaaaaattcatatatgcaaaaattagaaattgtggaaccaaatttatataagaaatagactaaaatgagaaaaataggaaaaagacactgttcattgcactctaggtgctcgatgtggttctgtagccctgcccctcctccatcgcctgtccctagccgccccgagccgtgccgacgtcaccatcgccgcctgccgtcgcgtcaccgtcatgtgcattgttgctgtggtggcttgttgagtacgattggtactcacccttgcaatatacaaacttaatcagtggtcggagatgaagcttcggaggatccctatgcttactaccaggatggtgatgaagacgatggcgctcagtaggtcttagttacggtcgttgcctgtggcaatggcgtgccgctgccttaactccgctgccttacctacttctgtttttggaatgtattccggaccacttggtccgatgatttaagactatgcctgcgggcttatgatgtaataattcgttctagacactcgtgtatgtgcacttggtatttcagctatgaattcgtgtgtaccagactacttgatccagggaaatggtactgtttacacgattgatttctgttataaaaacgggggtccacacttacccaatcggtgcccaaccgtatcattacagataacgacacccagttcaccagtgaacttttcggcgactattgcgacgacatgggcatcaagctgtgctttgcctcgcctacccaccccaagagcaacggccaagtcgagcgagccaacgccgaaatcttcaaaggactcaagaccaagacgtacaacgtcctgaagaagcacggggattcatggctcgaggaactgcccgccgtgctgtgggcgaatcggaccactcgaagtcgcgccccgggggaaacaccctttttcctggtgcatggcaccgaggcggtcctaccttcggagctttccctgggtttgccacgcgtcacgctgtacgatgaggccaaccaggatgatctttgccacgacgacctcgactatttagaagagcggagaaggtgcgcggccctgcgagcggtgcgctaccagcaaagcctgtggcgctaccatcagcgccacgtccgggcccgatcactgcaagtcggcgatctcgtcttgcgccgcgtacagtcgcgcttggggctgagcaagctctcatcaatgtgggaagggccatacaaagtgatcggcgttccccagctgggctccgttcggctaaccacggaggacggcacggcgttgcctaacccctagaatatcaaacacctccgccgtttctatccatagagtcgcgcgtcttttgctttcttggaactcaggccaagccccacgctaccactgttaaatatgttgtatcttttgtcacgaccagaattaacccaacgggcgttccttacgtgcgtgtattattccttgtcccaggaggcaaggtacaccaaaagttgatacatttcagagtttatcaagcggaagcgtaaatagttaatttattacatgggcggcgaaggcccagcacacacaaagacaaacgggaaacagcagaagactagggcgacgaccacaggcgcttgacggcaggcacgagctagacaccaaagccttcatcttccaggggctcctcttctgggtttgggaaaaattgagcaagactgagtacaaccaccgtactcaacaagacacacccacaagtgcaggataaatgcaagggagtacaagggggttataatataaagggttagggtttgcagcaaacagcattaaaagacacttagttgctcaaagctattttgtaaacacgattccagagctatacaatattattaatcaaggccgtgaacccacatgaaccagccttaacccaaggcctacgatgattcagaccgaactggcgacccgaccatgggtcccagctcgtcccaagccaacccaggccaaccattccatattttaattgttaagcaagttttaagaattaaaacactaacttgggtacattgctcggcttgcccataactgagggcgcggctattcgaatagattatactctgatcagaggtgtacatctgtcacgcccggaatttctatccaaaattccaaacgcttacatgtgtgtgaaccctcgtcgaggaatcagccgaggcacacaataacaaattgataatagagtacaattattactctaattaataagcgaataaaatgtcattacagaggtagatagtttctctcaaacaataaagatctaagcagcggaaaaaaaagataaacggcgcagacggctccactccacaggcagcttgaccaaggctacacctaatcctccacaccatcagcctcattgaagaactcctcctctgatgaatgattgcaaggtgagtatatgacatactcagcaagccacgcagcaaatatgcaagtgcacaggataacaaaggatggcatagtagggtttcatttgcaaaagcagcatttagcaaacatttcagaatttaataaaacagttaagtattaaacaatattaatccaacgctatacaacataccctgttgtataggcccaaccattctgaacaaccatcccggctgcacagttctatctccaaaccaggaatgtaccattccaaaccaggagctaatcaaattattaccaattatagcatcatttactatggtgacaagtgtgaaactaatcacgaaagacattgttagacccgctcataaccgcgggcacggctattcgaatagttttactctgatcagaggtgtaccactgtacccacaagacacaaccccacatcatgtcaccatgtgcctcaatacaaccacggtatctcggaaaggagttgtgacaataccccttatacaacacaatccactgcagcgcaccttcctggatcataatcacccccttataaacaaggcatggctaaaagggcatataaacttttcccaaatatccatttaaagagcatataaacttcaaatggccataacttgtccatttgaactcggaattggaccgttcaagtctctaatttttccttaagaagtcaagaacccatttttgtgctttgtttctgcttgttatatggagtttattagagtaaaagcctttttcttttccgttggtcgtgtagacgctgcagcttcggaagatccgctcttcgtggaagttgaagccgacgtttgggaaagcgagcaaggcaagtcacatcatctttgaacatattgaatcccagtttgtaaaattatgttgatttaaattattgcattaccgctttatttaaattcccgcgttatcactgttttatctagccatgcctatttacctttgttatgaccttattattgttattgttattattaccttgttcaccctagaataaacaaaacctcaactagtggacactttactcatggtaccactagtatgaatttaggtagatgcttcgctggttagttaggcaacattaggtggttttacaactctagactatgggaatattctcatcacctggacactacggaatggttggattattgtggaattggattcatacctccccctctattcaatatcctcaaaatggttttaggctgggcttggggtccctggttttgatagtagcacctcggccatataaggatcagtcttcgggcctctgttgcaaagcactaccgtacttccacatgtctagtgggtaatgcttagtttgtggctcagtctggttacaaacaaaagtacatggatggagatggacgaagtcgggggtcgatggacatctctaggacaaatgacggctacacgagctgcggcccggtagtcgagatgtcatggcacagggctggtgtcctgctgctaggggctcagtcctgcctgcctgtccggggggttccggccgtaggtgggattgggtcggtactcttgtctatggctaggatgggttggaaactatgtcacgtcttccgtctgtataccgtggtggtatgtggcacgtggtcgcacgtgaggaagatgtgtcttgtgggtaaagatgtacacctctgatcagagtataatctattcgaatagccgcgccctcggttatgggcaagccgagcaatgtacccaagttagtgttttaattcttaaaacctgcttaacaactaaaatgtggaatggttggcctgggttggcttgggacgagctgggacccagggtcgggttgccagttcggtctgaatcatcgtaggccttgggttaaggcaggttcgtgtgggttcacggccatgataaataatatggtatagttctagaatcgtgtttacaaaatagctttgagcaactaagtacctttaaatgctgtttactgcaaaccctaaccctttatagtataactcctttgtactcccttgcatttattctgcacttgtgggtgtgtcttgttgagtacggtggttgtactcagtcttgctcaatttttcccaaccccagaagaggagcccctagaagatgaaggctttggtgtctagctcgtgcctgccgtcaagcgcctgtggtcgtcgtcctagtcttccgctgtttctcgtttgtctctgtgtgtgctgggccttcgctgcccatgtaataaattaactatttacgcttccgcttgttaaactctgaattgtattaacttttggtgtaccttgcctcctgggacaaggaataatacacgcacgtaaggaacacccgttgggttatttccggtcgtgacatgagcccacaccacaacaatctcaagcaacacctcagcagcgaccatgggctgatgtgataggtgatgtaatgagggagcaatttgggcttaaaccaaaggagactggaaatttgtaccgacaaccatatcctgaatggtttgaaagagttcctttacctaactggttcaaagtacctgatttctcaaagttttcaggacaagacactacatcgacttatgagcacattagccgatttttagctcagtgtggtgaggcatcggctgtagatgctttgagggttaggttattccggttgtcattggctgggttggcttttacttggttttcttcgctgccacatgggtcgattaacagttgggccgatttagaaaagcagtttcatagttatttctatagtaggattcacgagatgaaactgtctgatctcatgtcaatcaagcaaaagcatgatgagccggtacatgagtatattcaaaggttcagggaaatgaggaataagtgttacagcttgagcttgactgatgcccagttagccgatttggctttttaagggatgattgctccgatcaaggaaaaattctcatctgaagattccgaaagcttgtcgtaccttacacagaaggtaggtttgcatgaacaaaggttcgcggaagctaggaagaactctaggaagattaatcatgtttatccttatatgtatggatcggatggtgaggatgatgattctgaaatagctgcagctgagtgggttaggagcaaaaaggttataccttaccaatgggtgaaaaactcaggaaaagaggagaggtatgactttgacataactaaggctgataagatatttgatttgctagttcgagaaaaacagattcaacttcctgctggacatacaattccatcggctgaagagttgggcaaaaagaggtattgtaagtggcataattctgggtctcatacgactaatgactgcaaggtcttcaggcagcagatccaaacggatattgagggaggaaaaatcaagtttgatgattcgaagaggccaatgaaggtcgatggtaatccttttcctgttaatatggtacatacagctggccaatcagccgatagcgtccgtgcaaagggttttcaagtgaattcggctaagataatcaacaaatatcagaggaagtatgagaagcagcaggagaagcattatgaagaacacgatgatggttttgatcctcattggggttgtgagttctttagattctgctggaatgaagggatgaggttgccgtctatcgaaaactaccttgggtgcaatgatatcattgagagctcaagtcagtcatataataggagtaatcggctgaggcaggaaagagtgtctgttcgtcaaagattgggcccagtgaatcaaggtcgtggccaggaggatgacgtagtcaggacaaatcaatggtgtccttctagtattttcatgaagaatcagaagagaagggttcaaagattgaggaacagggagcgccttcaggaggttgaacaagaaattaaccatcggctgaagaaagcaaaaccaagacaggaattgcgtgttaagaatcagattcctatagccgatgatgtgtagccga

SEQ ID NO: 25145 - DNA, 1780 bp, Oryza sativa
ttcccaagaaaattgtatctgatcagggaagccagttcacctgtcatttctggaagaaactccaagaagagttgggtcccgattaaatttcagcaccgcgtatcacccgcagacagatggacagaccgagcgtctgaaccagatcctcgaagatatgcttcacgcatgtgtcctagattttgggaagacctggggtaagagtctcccttatgccgagttctcctacaataacagctaccaagccagcatacaaatggcaccctatgaagcgcgttgtatggccgcaaatgccggacaccgctattgtgggaccaagttggggaaagccaagtgttcgggaccgatatactgagagaagctgaagctaaagtcagaaccattcgggataatctaaaggtggcacagtctcggcagaagagttatgcagacaaccgacgtcgtaacctggaattcgcagtggatgattttgtgtaccttcgggtcacgccattgcgaggcgtacacaggtttcagataaaagggaagctcgcaactcggttcgtgggtcctttccgtatcattgctcgacgcggagaagtcgcttaccagttggagctgcccgcatccttgggcaacgtgcaagatgtgttccatgtgtcgcaactcaagaaatgccttcgagtgccatccgagcaggccgattcagagtaaattgaagttcgcgaagacttgacctacgtggagaggctagtgaaaatcctggacaccatggagcgcaggaccaggaaccgggtaatccgtttttgcaaggtccaatggagcaaccacgctgaggaagaagctacttgggagcgtgaagacgagctgaaggcagtccatcccgatctcttcgccggttcttctgaatctcggggttgagattccgtttaaggggggtaggtttgtcatgtcccaaaacgaccctaaaatatatcctttaaattatgcctagaataattaaaatccatgtgaaagcctccaaaaattaaaatgtgcaaagtaaaagtcaaacaaggcttagaggatttttgtatatttcctaaaagcctaaaatgcgtaaataaattttagtggaattttcagagcacaaataataattattaagaaataaacaaagttgaaaaagttttataaaaagaaaaaccccaaaagtaccccttccctcacttgggccggcccggcccatctctttcccccctctctctctcctctcccccgcgggccattcggcctcccaccccgcgcgccgccgccgccgccaaatccgccgaatcccgccatccccgcgtgcaataaagtggggggaaatactccccgtgatcccctctccctttccccccatttttccctctctctctcgtgttcaaacgggtggatttgcccccgcaaatctcgctggcgccattgacggcggccgacctcccacgccggtttccttcctccctggccgctctctcccccttccaaccctatttaaaccctccccgcacctcctccgtccggttccacctctcgccgcccttcctcctcgccggattcgagctcgcgacgtcgctctctctccgccgtcgccgccgagctccggtccaccaccgtcgtcgccccggaccgcctcccacctcggcgccgcctccttcggcttcaccgcatcctcgccgacctcgttcacctctctgtttcggtcgccgatagccggagcgccgccgtccccgtcgaccccaggcgcgccaccgcctacctccgctccggccgcctcctccgt

SEQ ID NO: 25146 - DNA, 2710 bp, Oryza sativa
tggttcatgggcccatgtgcttgtagtattttagtccctagagcctttcttatgctattattgttttgatttattaccctctgatattatttatgtattttcaacaattcttaaactgtgtataaattctatttttaatgaggccttgaaaagttgtctgaatacattagatgtctaaacaattggataggttaatattgtgattgcattggaagagagaaacaacaacaataaagaaaatgttcattgtggaggttactagtgtgttcctctatgtgttcaattggtcattcatgcatacgaccataatgattaatgaagagatcagtagtagtattgtaatacaattcaagtactttctcttttggaaaccaaataatccaaatttgcatgggttctaccctgtttattttgaaatacataatggacctaatttcccacctcgtagatttgctatgaggaaatatgctggtcatgtgtgatctggcatattttctgggcttagaaatgcccaatctctctgctatactgttgctggttttagtgacaatccagccgatcgtttttggtctataagggttgcttgctttactcctttacctgctgcctgctggaatgcacacatttctgctttctccaatgttctaaaagtgtcatgcttgttgtttgtaattgatgcatctatttggatcaatatccagactcctttgagtaatctatttgtacaaaattttcttcatttgtttgccaccttgacaattttctgcttatttaggtgtattacaagtatccttacaatcatgtctgctgagcaggatcttgtaaagggtaaagatacattgatgccattggttgattttcaagagaagaaacgtacaggatggaggcaactgaagatttcgccatctggagtggtgaaatatctcagaaatacatgctatgaacatttggcaaccttagaatcagatatctttgctagtttgatacaacatatccttgtaggtgattgttgatggtgcttatgctcttcattcaacactgaggtcactgcttgatattcgtgttgctgtggtaaaaattataattgccctaaatatttttcattatagaacagttattttatctcaataatttcacccatgaacttcaggttggtggtgttcattttagccttctgtctaaagtccagcatgatattggagattcttgctcgttggactatctgattgatagcatatttcccttgtttagaaagcatattgagccagacttgcatcatgctcaagtatacatcttgtaccttttttgcctttttatagtctgtaggtaccatttgattcttttttatttgagttgctacttgctagtgcagattagaatcgacaacagctttgtctgctcattccgagaaccatactacaagcttaaatgcaaaaacgaggtcagcattggtttccggtcggtagacaacatattatgtatctaactgaagctttgtctccttttcaactgtttaagctttatgtttgtttcatggctgtagtttatttaatgcaacaagtcagcaagcaaccacacttaatgcaaaatatgccaaagctttgaacagggatatatgatttgtagtttcttgaaatctacatttatattttttgaaatggaagcatgtgtttttattatttgaaatggctccaaaatgtatgaggtcacttcgtgtcagcatagtttgccccagaaattagcgttgaatgaggctctattttactttattttagtttttagtattccaacaaaggaggttctgcataagagttgacaatcaagatatgctgttactaatgcttgttttttgcaccgactattttcaccttcttttcttctttaactttgcttatgtctttgtagttaccagatggacataatttgtatttttttaatcaaaatgaaggagaaactgagaagtgagtcatatatatcacttaatacatttcttcatgaatgttcatatatacttctagatctgattggttgatattcaatccccttatacttttatcaagcttatgtgtgtggatatgtccattttcattttttttgtggggaatatgccccttcaatttgtgatagtttctttcttatgtattttcagctttattgagatgtaccttaggccaccttttgcttccgaggaaataaaaattgatgattggattaaagttaggcaatgtggaataagatattacttgtctcttggggatcagaggattgtggacaaatactttattatccgtccaaaagctgagtttgaggtacacaagtgatcttattatcttgaaatttggggttttacatacaagtgtaatgtttggacgtaaccaaaaacaataagggtgtgctgatgtgttttgcatatgtacttttagtttccttgcatttctctgctactacatattcattgactacagtacaattcttactccatgttgcttttacctccttaaatattaatattttttatattctgatactttggggataaatcagctactattgcataatgtaaataaacctattcgacttttcatcatcatgaatccatttgtttctgatctatcatctatgaaattcttcaaactaattctatactgatgatagcgtgtaggatcgaataattttcctgcattgtagttgaagtgcagaaccatgcagt

SEQ ID NO: 25147 - DNA, 4085 bp, Oryza sativa
tttcaccttttcatataaagcatattgcagactgaggtgtatcagatcacccttctgcgacattgattagaagaattgtcttcaattcattcaattcattaacatacaatggagttatgtaggttgctggagttttaccaagaaaattttgaaattggagttgaaattgttttttttttaattcagttgagttatgtatttgcagtgaaattgactgatgcataatttatattgatcttggttgataagtttatagctatgtaaattttctacccttatcttttgaagtgaataatatgtttatgaattccaaatgatcttgttctgttctcgataaaacttctatgttgcaacctttaggtttattttgatgtttgttgtcattgaactttggaaaaaaaatgaatatgtaactggcttgcataatttagattgttgcagcagaagctagaaagctcggtataaaggggccatggattacgaagtcataccttgaaatgatcctagagagcaaaggtgcaacatttttgttttcatgttttttattttcaataatttctatccactaataagtttcatgttggttgtcaggggtcccacgacttaatacgccaccaccaatctcaaggaaattactgactgaaagtcaagaaaaaaaaattgttgcaccaaagccaattcgtgtttcgaccgaaaatgttgcaaattttgatgactttgcacaaccatggacgaggtctccacccaaaaagtttgaccaggagcctgttatgggaaaatggcagttcaatcaaggttttaaacttgtgctttcatttatgatttttgccttgcatattctgttctttaatgctaaaacaaagggcattttctcttgtcattggatatcatgtgcagcccattagggcccatagagtggtctgcctctctagggctggtggtactgtgcattaatagtacctacttggttaattttcgtgcgtggatagttcatgtcaggtggtcttattagagataaggttagacttataagttagttattttcttaatactagggataggtttcttaatggtcaagctaacacatctatatgacggggtttgtattttactcatcaagcaagtaataaacaagagtatttagtcttccccttctctcctgcccttgtggcgtggctgcctcaatggcaccgctgccacttgggtccagggatacacaactagaaataggcgcaagtgccctaatcccaaccatgcctattacggagtacattggaaaccatatttatttattattttttctgtagaaaatccattgaatatattcttacacttttgcagattcttcttcaggaagtaacatccagttagctccactgccagactcctatgacttagataggggtcttctcctatcagttcaagcaattcaggtaaatgaaaccacattctatttttttcatcacagttacgcattactgatctgtaacatattccattaattgttgtctttcaggcattgttggagaacaaaggatttcctgtcattgttgggattggtaataacatctttaccgttaataaagtagcagtagttttgtgtttactaagaccaagcatctgcttgctgtgaatgataaataactaaaacaactcactctactttgctggggcaacttaaaatcatttagtcagacatctgcaccagatatcccttgtgacaagtctcacttgcaatgactaccagtttcattaaagtgatatcagagcatctatatctccaaatttcacatgatccagtttttaatgtgctataatggtatgcttgctgtgcaaaaaagagtgcctgataggttgtgcctaatctattcctatacacctgttattttaggattaacttgtattacaattctctgtgggtttgttgtaccagttgctggggctacatgtcatgccttttttgtaatatatttaagttatggggcaattgcacgtttgacgctgttttgaaagctaactaccagtttgactattttctcaactttgcttatttgaccccgcttttcaaaaatgaacattagctatgaccctattctatcaggccaacctaacggtgttaacttaggggccaaatgccgtttatacccctgctcattttgagtatactctctgagtttttatttatttggcttagttttgtgtactcggtgtatgtgatgaaagttttaataaatttgacttggaattgacaaattgtgtgtgaatttgagttagatttgataacttaagcaaagatgactgaattttaataaaactttggaaatatattatccatccaattgcacgctgaagaaagaaaagcatatatgctatttcacatccaacaattgccccaagcaaatcacgaagctcaaatttgtgtcgaccccaaagcaaaaaaaaaaaaaagtgtgaaattaatacatgtaaaacaagagagattattcaatcagatcagcaaaacaagagcaaagcaacttccagatctagtagaacaaggtatagagaggaggtgtgggtagagcaagagcgagcaaggatgtgggccacatgagcgcctcacgcaggacctgtgcctccggctgagccaggcaagcgttgcacgcttccgtccacacggccacgcactccatccacacagcaagcgccggcccgcgcgtttccccatcagcgccgcaccatccgctgcttatccacgcatcgccaccaccgcctctacacgcgcccgcgccgctgctcctcttccctctgtgcgccggcgtcgccgctcctccttccgcgcgccggagctggccctccctcccttcctccctccacacggcagcagccgtcgccgcccatccctcctccctccacgcggcaacagccggcgccagctccgctgctcctcctgccacgtgctggagccgtccctccctcagcgcggcaaaagccggcgcgctgctcctccgcgaacaggcgccgccgcctgtccgcgcgccggcgctgcccctcccttcctctctctgtgcggcagaagccgccgccgctgctcctccatacgctggcgcccactgccgtccctctctttgcttgccagcaccgctgctcacctgctcctggtccctccacgcgccggccagccacgccaatgtgggataaaggttgggatgaggggtattttggtcagttcatgcgagtaaaattatttttttttctttttctaactgaaaccctaacggactagtaaaaacagggtcagatggtggcttcgcttttgaaaaacagggtcaaatgagcaaacctgaaaaagtagggtcaatttggtagttcggcttctaaatataagcaattgtcccttatttatggcgaacaaccatctattgtgaaaatgtgtgctaaagcagacaataaacataaatgggccttctggcagattactgagcgattatttgcgccccatctgtttttttactagtccatgtatgtgaatacaagaattcttctaagaattttatattgtatggaatagattgattctgtaataataattctgttaaacttgtgcaaaaatgatatgacccacacacccagcaaattacatttactgactatgctgtcgctgtttaagttgatacactgtttatttgtaggtggccctagtggatcaggcaagacaagtttagctcagaagatggccaatataattggttgtgaagttataagcttggagagttattataagcctgaacaagttagggattataaatatgatgagtatagctcattggatataggtttgcttactaaggtgattcctttttatattgattccttttctgtattatcatgtgaattacaaattcctgtgcataactactagaatcttaaatatttcaagcatgcttccaaatttctatcttgttctaaaagtcgatgcaaggcgccgcctaggcacttggtagctgccacgattaggcattagatagtgcattaggaggctaacctactttgggcgctattgtgttgctatttttctctatgtaatatgcttgataatttcttgg

SEQ ID NO: 25148 - DNA, 870 bp, Oryza sativa
ttggtggagtacattctcatcttattgcaagaatacagagagacaagaatcgtgcaggcttttctatttctcagagtgaaattatgactaccgtgtttccgctatttcagcaatacatagaaccacatcttatcgatgctcatgttggtacaagaaacatgaatttgacctatttgatatatatttatcatttatggctttccattatcatgtatttagtaacttgtttggactcacgcaatgttccttctccacgtgctttgcagcttaagattcaaaatgactttgaccctgtgctctctcctgaaagctcacttttcgtactaaaaagtaaaaaacaggtaagtttgagctttatattgttcatcttattattacgttggtgattatttatctatttttgtttcatgaataggtatcttatcaagacatattgaaagtactcgatgctagtaaagcctgcagctgtgtccagaattttactgatgtgtatctaagacttcctggcataccgttgagtggacagctgacagaaggcgagtgtattagggtccgaatatgtgaaggaagatttgcactgttaatacgagaggttagtttaccttttgcataccatttatctttgtgttttcatgagacagtcaatgacaggctacgtttttcctttgttcatttaatggtagcctataagggaaggaaattttattatccagccaaaggttgattttgacattagtgccagcactgtcgcaggacttcttaagcttgggtaagtgatatgctttatgatgttaattattaatttagctgattttctagaggtctttttattgagattgtatgttttatcaaaatgtgtaagtcattcta

SEQ ID NO: 25149 - DNA, 4315 bp, Oryza sativa
ttttaccattgttacaactatttaatcctcctgatgggcaactctatctcaatacttctgtgtccaacactaaatgatgaagtccctaacattcttttcatgaagtccctaacattacgtgtccaacactaaatgatcaaagaagttacctagttggatcaagtaggaactaattagttctgtataaatccctagcatttttttgatgaagtccctaacatttttttttatttatgaaatccctaacaactttacaaaacataatattgtggtttaactaatgtttgggcgaccctccaagaaacatcaaacttgataaataggtgtgattgtagattagtcattagtgactgtctgctgatactctgaaagataactttgatatataagaaaattttcatgcactagggcatatcttgaaatttgctcatatgcttacttccttttctaatagttaccgagctgtggcatatattgaagcttctgcaacgatttaccaagatggaaaggttattatttccatcaaatctatatttcttttcattctttctgtataataagttatgagtacatgcatttcatatgatcaatgtgtgatgtttctttatgaggctcagttcctttcagctactggttactagattatcatgggcccacttttcaaactgctaaagttgtcacagaataattgtatatctaccattcaaattttgtcccaaaaaaattgtatttgtaataaggtgatacccatccaattagttagaaggagatattctgccttctgccctcccatcattccttctccatctgcctcaacctttcttttgttctatgcatgtagggttattgtggccatttgtgtagaaatacaattattttgggacggaggtagtatatggaagttccttcaaaaatttaagcaaattcatttttcatgtttgtaatggttaaacttaattaatctagcactcattgggtgtcttcgctggtaagccaacgagctaattgctctaccatctgaatagaatgaagcgtaagtcttatagtaattgttgggcaagttattataaatgaaccatgggatgtgctgttataggtgcatttccttgaactgtgggtagtgtcccctcctccggtaaactcaaaaaggcaggatacaatctttgcgctgctgccgtagtttaaataatgtatctttggagacactctttgtctactttctgatgttttggctgatatggccaaaaaattgtcagcaagtgctgggcctgggctgctggctaatattttcctcaaagatattgatatatagaaatcatggaaaatttcacctagtttgatgcatttttatgaaattttagacatagtacctaccaaatattccttcagaaatttttgagtgcttcctctgtgtgtatggttggttctgatttatattgtgaaacagtcaaatgaatggagtttaagttactgttgttgactcactatatatagtataaaatgatgcggtttgaagtatttgtaaattaaaattgttttggttaacagttgtgcctcaacctgtactctacctgtattgatatctatgcagaaaactatagtccctctgtttttaaatatgacaccgttgactttttaagatacatttaactattcatcttattcaaaaaaatgtatgtaattattatttattttattgtgacttgatttatcgttaaatgttctttaagcatgacttaaatttttaatatttgcacaaaaaaattgaacaaaacgaatgatcaaacgttagtcaaaaagtcaacggcatcatatattaaaaaacggaggtagtagtattcatatctgttgaattgttgaaagaaaaagtttattcaatgaaagttctggtatgctttaggaatagtgacactcgttgtatatgaataaatttattatgtatgtttgggtcgatggaataatatttatttgcattggaataattttcaccacttttttttgagtgttctcatacttgttgggattaggacattgttgagtgttctcatacttactgggattaggagtcagatcaggacattgttgttcccagttgcacagaatttgaacagctaatatttttctgatttgaagctgctttatgataatgcctactttttccccatatttctcatttcataattgtaatatttttacagaagttagttaacattatgatgatgccagcggatttcctgtttttgcaattgtcattggttctggaaccactaacttctaaaacgtttgtttacttgattgaagattcttatagaggttgatagtctacaaggtgagacaaatccgtatcttcagattaaaggaacgaacaaggaaatagtttcctctgctgcatctgcactcagcttagatgattcatacacgacaaaggtctcctagaaaatcctagctagttaaattgattaatttgcacacacattattgcatatcagtttcatgattttattctgctctgcagagctatcttcaaattattctggagagtttgccagcggatgaaaatgttcatactggtattcataaccaacaagctgctaggctacaagaacttgttgagtttatccagtcacaagtatgttaattcaaaccaactagttgtaaatactactgttacattatgggatattttttatggctatgatttagggtagtcagaacataagtatttgttctttacaactgtttgtgggagaacatactagcaaattgccttttgtgttggacgcggttatgtttcgtagtgtggtcacctggtcggtggtttaaaataggccattgagcatggttgcttgattggttcaagtccatgtagcatgcttatccatacattatttaccaaacatcagacagttaacagatgattttccaaaggctgtatcatgtttaactgtagctattttcatctaaaaaaaatgtctattggtcctttaaaagaagttagtgtcagtggtagtatcttcctctccacatcttatacacttatttttatgaattcaatgttacttttattgtatgttgtaaatgtctccatcagctatatgtatgagtatgtgcatgtatgctatgacgtgcaccttcctatatcaaaaagttatgttacttttaatcatttaatgtatgctgtaaatgattccatcagctgtgtgactgcatgtcatgcgctagttttgatttgaggattctagttacttcgttttgtttagtttacaacttgtagtatacttattcgagattttcctcgacggaactgtaatagcagatgtgtttgtatgatcagattctatggctaattagctattgttctttcttaactttattctcatatattgaataattctgtggtgcagggaggtagcttcaattcagatttatcttcacctacaagagaagtttcttctacagatagtgtgcttgatgatgtgcaatctaggttaaggaggcttgagagatggaatacaattaatatggtaatttctctttattttcagatgctgttcaagacccatattctttctcaactgccttaagatttaattcagtttgcatgcgttggcattatgttcgattaaacaattaaatattgcatatcatggttcatcagttaaaaccccttgtgttctgcaggttttatggactatattactgtctgctcttgttggatactcactcttccagaaaaagacgacgctaaggcgctgacaattcatacatttgaccccaacttgacctcactagtgctgctttcagcactaatcctaataaggtttgttttcacgcaatacctgtgaccggtctttcagaaaatgtgctgtcgacatttactttgatcattttcaggacttttcgctctttgatgcgatgtgatgagaagaatcctcttgagttagcaggtggactgacttgttcaatcatgcatactacaggtaaccgcagttttagttgcaagttactaacgaaaaagaaaagatgtatatgatacagttgaatgtttgctacaaagtctattcttgggagggtaccggtttctactgagctttgatttgttgagtcccatgccacagttttcagaatggacttgtatcgatacgagtaccacatggttaattggcgatggaaaaacagatgggatatgttgcgtccgtaggaaccaggatcctctaacttattaccctctgacttaactataacttcaagtgactgatatatgagcctcagttcgtgggagaggctcatatatcaacccacatgagaggaaaaa

SEQ ID NO: 25150 - DNA, 3075 bp, Oryza sativa
aaatattgtggaactcacatgtcagtgagtcggttaccctctctctttgccatcttctctcccttcctcttctctcgcatcgtcggcgtcgtctgtggcgacaatggatgcacctgtcccgtcgaggcgagtgagagaggtggcaccaggagctgagctcgtgggcgcacacggtggcgtacttgaaccatggtgctaggtcggtgtacaacatgagcaggtgccacctcgctgcatccagggtggctccgccacgaccacccgctcctcctccccaatcccgcacctgtgtcaccgtagcgcacctggacgatgtggccatcgctcatggttagggatggcaacggggctgcgcccgtcgggtgcgaccaccccgtacccacccccgcagcagaaaaaatcgaacgccaccctccccatccccgcacacgagtgtagatttcccccgtccccgtccccgtccccgcaacgggtacggggcacccaccgggtctccacacacaacagcaacaaccacgacagcaagccgagcagcgcagaacaagaggaagcggcgtggtcgagcacgcagtgcgcctggggccgccggtcgtcgatctattggctggcatcgaggcgcaggtgcagcacggatggcggacaaaatggggtcgcggcaggcaggcaggcggcgcagtgcagaggcggcggcggcatgtccgcgtgtggactacagcgagatgagagaggaaagaggagaaacgaggaagggaggcggctggtcaggacttaggaatgagattagggttgcgttgatttttactggagagctcttctccgcatgggccttgggccaaacaatgcatgtgaaacgaaattctgatgggccacctattaaacaagaactgcatatcagccccatgggttaacgggtacgggggcaagataacggacctgcacccgctccacccgacgggtgacacttttgcccgctaagagacccatggggacaaaaactgaaccacaaacagcccctaatagagtaattacccgtcgggttccgggtttcggggcccattgtcatctctaatttaccccaactaacggcagcaaatatattcaataaaaccagtgaaatacacagagagagagagagagagcacattatacaatttgttaacagctttgtcattgatctttgatcgaagtctctacaagtaacaacaatatatattactccctccgtccaggtatataaggtattattgcctaaaatagcataaattaagaaagagtaagcagtacaactatgaagtttgaaaaagcatctttggcacaataaacaaagtagtactggtaagtagtactttcaagtacattctttgtaattttttaagtttttggcatggatggtactccctccgtcaaaaaaaaaaaagaaatttactggatgtgacatattctagtaaaacgaatctgaacaaatgtatgtagcactaggatgtgtcacatccagtactaagttggtttttttggacggaggaagaatgaagtagtagtagtaatatcagaccttttcagcaattgattgatgggtggctggcagtcctgattgctttgggaggagacaaatccactatgggtgtgtttagttccacgccaaaattaaaagtttgactaaaattgaaagtttgaagaaaaaagttgaaagtttatgtatgtaggaaagttttgatgtaatgaaaaagttggaagtttgaaaaagttaggaactaaaccaggcctatatttgtgggcatagctagggggcaaaatcccctatacttttagacagagggagtaaattttagttagttacatgcttcaaggccaaaaggctttaactcataaaactcataaaagttatatgtagatcataatattacgccgactgatgaacccctaaaattaattatgcaggttagattttgacttagtctaagctagatgtggatatatataaaagtttgggttatccgaagtgacacaaaggtaaaaattaccttagtacaaagtagacatatctatctatctatctattatatactaaaagtccattaaacttcctacaaacgctctcaagacgccacatgggattcctacaaacgctcctaaatcgtcacgtggcaatctaataaattggtggacccattatttcttactatttaatttatcaaatctatcttaacaaaaaaaacataacccacctccctatctttcctgcccggcccacacctacaaacgctcctagatcgtcacgtggcaatctaataaattggtggacccattatttcttactatttaatttatcaaatctatcttaacaaaaaaaacataacccacctccctatctttcctgcccggcccacaccttccaatgtgtaccgtacgacgtacgtaaggtacttacatgcctcctccctcccctcctgctctcccccttcttctttttctttagttattaaaatattaaaaaattaataaatttaaaataaccataatttataaaaaatgtggttaatttttaattacacataaaactttttattcttccgtattattctatccattgtggtccattaacgattcaaaaggcaatataatctgtaatttaacttgtaagaaatatttagtttttatcatatccatgctattaaaattattatataaaatagaaaaacatgataatgtatcatttcacaaaacatgcataaataaattagatctactatacgaaaaaataaaaaacttatccatcacatggtattctaataaattagagaaaaattctgaaaaaaaatatataaccatcagttttcatttaaaatggtggacccgataatattaaccattagataaaaaataaatctccttcacccttccctcctagccggtactaaaagtccattaaatttcctacaaacactcttaagccattatgtggctttctacgaacgctcatacatcgtcatgtgatgcgataaaaaattagagaattctaagaaaaaggtaaaacatctaatacttaaactctggattcgttattttggaccatta

SEQ ID NO: 25151 - DNA, 9862 bp, Oryza sativa
tctaagtcaaactttattaaatttgatcaagtttataaaaaaattagcaacatctaaaatattaaattaattttattaaatctagaattgaatatattttgataatatgtttgctttgttttagaaatactactatatattttctataaatttgattaaactaaaaaaagtcaaatgacctataatataaaatgaagggagtaatagactagttcataccagttttgccttcacactaacagtactgggcattcagttcactgatatccctgctctcattgcaccagagcttttcgttggagaagcgtagtggtgccaagaaatacatgatgcgagcaagagctctcggttttggatggagcggctatccctacggaggtctcgtctggatacaaaaccatccggattccaggtttgtggttggtgcacaaaaccaatgaagaaatcccacattatatgtgttatttttgcaaggctttacggaattaaatttagaaatatattgtttacctattttttatttaaattgttcggggtgtaattattttgggagaaatatattatcaatatcgcttcgcgaaaacgaggacgtggacagtacgtggcggcgcgagaccgagcggtcttgcgcagccataccgcgagaccccgctgaaccagtcggcgatcccggactgccatgccaattcatatggttaattaattagtgattaattatcatcataaatcaggtaattaatcactaattagacggcaccgttggacaagaagttcggtctcgttggttccttatgcgagaccgttcggtctcagctgtttcctcgcacaagaccgtgcggtctcgcatctttgccgtgcgagatcgcccgtgtcgttacgcctacatcatttttacgcaacggttatgcgaggtcgacggtatatttccgccaaaacatttacattccgaatatttataagaaaaaaacaaatcaacagtatgttttcaaatttaattctggctttatgtaaatatcatttactactatctccgtcccaaaatgtaacacctttggctatgaatctggacgcacggtcatccagattaatagctaaaaatgcttatatttgggacggagggagtacaaaatatcatgcatttccttcttgaatactaagagtattatcatccgtagaaatgatcttaagtgttgatttatgaattctgctatcagtagatatggtccatattgattagaaaatctagattggttctactaccacagaacattgtaaacatgtctttttttttgtcatgggatgtactccttgttgatttttctctcccataaatagcagacaacccttctgacgattatatgtccattattttcccttctttatttctaggttttctgaggtggccatcctctcccacttgtgttggttggacatctatggtatcttcaacacaaagcatctctcaaacggtacatcctacggagcttatcttgtgtacaatgtccaattcttgcacacagaagatcaaaatggaggctacaaagaacaagatgcaacagcatctgggtcatcatccacctccagcatttgcagtcatgaatgcaaccatcttatgccgcagaaacatctgcgctcactgttgttcaacatggattatgatggatcatcatttgtaaaaaccaacaataaccagaagaaagaactgaaatatgtaggcatttgtgtaagaagtgatggatggatggagcaggaaattagtacagagatatcagtggtaaaacagaacaatgaagagaatggagacatttctattgagtttaggggcttaaccggatcgcaccaatgccaaattattgtagaggggatcgaaattaggccgaaaaactaacggttctccagttcatggataatcatgtcagctttcctagttggcgcagacgccaaaaatcttgggtactttcttatatatcatgaaaggtttatatttgggtaatctttggaaataaaacagttgatgatctaaaagtagtggagtattcattttgatgatctctacctttctctcttctttgttcttccaccgctggagaagtgatcttcagatctagtttacaacgcctttagtcctaggttacaaaccgagactccgatgagcattttttaagtaccggttgaaataactgggactaaagattcatctttagtcacagttggtggtgctaccaactttagtccagattggtgttaccaaccgggactaaagttctttttctttctttttctattgttctttgctgcttgcatctattgattttgagccgaaatcaccgacgccgtcaccccaaatccccacaaatcatccacaatttataggcccatctataaaatcatccacaaatcactggcccatccacaaaatcttcccaaatctaaaaaaatctataataaaatctaaaaacaaatcagtcatagccagcagacgggggtgaggaggaggagggccccgcccggccgccgccgccgcctcctccaccgggctgccacccggccaccctcccatcctatcgcctcccctcccgccggatctggcagaggggaggccgccgcctcgtgcgccgttgcccgcctctcccgccggctcctctcccgcccgatccgacgcaagggagggtgtcgccgtggagatgggagagggagaggggaaggggaggaggggatcagacgagaggggagggggaggaggagtggaggaggaggagaagaaggcgtgaagaggggaggaggaggaggaggaggggataaggcgttgttgccgatgccgagataaggaagagagagagagggggagagagagtgagagatgccaatgacgtgggagagagatatctaatcccggttaccaaccgggattaaagatataattttttttgtcccggttggtaacgaaactagactaaagatggacttttgaaccaggactaaagatgaattagtcccagtttgttgaaaccgggactaatgtgattgtggagattatggatatcccatatctacacggcgatgatatttgggctgaatataggataccgaatatagatagaatatcttatttgtatctcgggtttgtttctcaacttgtacatcaaggaaataccttgagacttagtcggttacgactgtattttatctgtatctgcatattccgttagggatatagattatcttttgtaacacggactccctcccatatataaggggggtccgggtgcctctaggggcagaggttgattttctccaaattatacaatcaataagacactcggcggattcatccccggacaggagtagggtattacttcttgaataagaaggcctgaacctgtataaatcttttgtctccaaacccatacacttctccagcttgatagccacccccttttattattgccgaaatctagtttcgacagttggcgcgccaggtaggggttgcgtcaagcttttcgccgatcagtgcaatgggttccgtctccggcatcgacgacctcgtcttcccacctgggcagacgtttcggttcggcagcctcgacttcgtcaccaacaacttcggcaagatctctctccttgactcggtgtcagaccagtcgggagagaaccggatttcagtcccgtttggactcccaaacgcggctgaaagttacttcaagaccatctcaatcgagttggcttcaaaccacttgggtgagatcgcatcttctccaacgtcaccagatcaagatgatggggcttacccaccgatcctgatgaagctccccgacgatttggcggccgtctccatcacgacagcgtctccatcccgtaggcctaggcggaagtcggcttcaacaccgatttcgcctagcttcagggaagtcggcgtcatcctccaaccactcggcacggtttcgacggatcagctggatggctactacagctctcccaccgtcgactcgcgccccaccgacatcgtggagtacgacgagtttagctctcgctacaacgacccggatctcgacgacttcgacggaagcctagatgacaactacacccctctctacttcggcgtcttcatggccgatgacgagacggaggagcaacgccaagcccgggagaccgaagcacgtcgcgagactgagcgtcgccgactggaggaggagcatcaagcacaagaacaagaacggctacggcgtgagcagcaggagcgtgagcggaccgcgaaggaggctgaggatcgacggcagcgagctttggaagcagggcgccgagcgcgtgatctcatcggccaacaagatgttgaagggacaccggttttccgcacccctcaacagaatgcggttgccgcgatcaccctcctcgacacccttctcaaggaaaacgagctcaatcaatctgatcacgtcgtcaacatcttgaaccagacgaagaccatgattgcggcttcggtcccagttaactccgaaagcgtccatacgccgaccggcagccgagtcccccacttccgatctcatgactaccgtcatccaagcctcagcatcaccggcgcaggatccaatcgcaggagcaggggtcacgacgagcggtccgttcactcacctcccgaccatcatagggagcgccgagtggaacggcctcgctcaccacctcgtcgccgccccgtcgatcttcgcgacacaatcatacagcgccgagcagctcgaggccatcatcattcgccggaccgccacgacgacgaccttgacggagtagcagccttcaccgacgacctgcgtcgagtggattggccagccggcttcaagccgactggaatagagaagtacgacggtaccactaacccagaatcgtggcttaccgtctacggtctcgcaatccgcgcagcaggaggagacagcaaggccatggcgaactatttaccagtggctttagcggattccgcccgatcttggctccatggattgccccgtggtacaattggatcttgggctgaattacgcgaccacttcatcgccaacttccaaggcaccttcgagcgtcccggcacacaatacgacctctacaacgttattcagaagtccggagaatcccttcgagattacatccgacgattttccgaacaacgtaacaagatctccgacatcaccgacgacgttatcatcgccgcattcaccaaagggattcgccacgaagaattggtcggcaagttcgggcgtaagcctcccaggacagtcaagcttatgtttgaaaaagccaacgagtacgccaaagccgaagacgccgtcaccgcatcaaagcagtcgggtcccagttggaagccaaacaagggtacgccggctacgggaggaggtggaagtaacaaccataaggaccgcaagcgtaagcctgaggaacttgtcgcaaccgccactcactcttctcgacagcgttcgcgcgtcaacacgttcgacaagatcatgaactcccaatgcccgcaccatcctaactccaaccacgtggccaaagattgtttcgtctacaagcagtttgcggagcaatacaccaagactacacggaaaaactctgacgaagaacaaagcacgtcgaggaagaaggacgacggcgacaccccggcaggatttcaagaccaccgcaaggagctcaaccatatcttcggcggccccctggcttatgagtctaaaaggaagcaaaagttgactgaacgggagatcaatgctgttcagcccgacacgccccagtatcttcgatggtcagaaattgcaatcaagtttgaccgctcggatcatcctgaccgagtggtccatccggggcggtaccccctggtactagacccagtggtccgtaatgtcaagcttcgcagaaccctcatcgacggtggcagtgcactcaatatcctcttcgctaagaccttggatgatatgcagatccctcgctccgagctaaaaccaagcaatgcgccttttcacggagtaattccaggattatccgcaactccactcggccagatcatcctcccggtcacttttggcactcgggaaaacttccgcacagagaatatcagctttgaagtcgccgatttcgagacagcataccatgccatactcggacgcccggcgttagccaagtttatggccgtcccgcactacacttacatgatgatgaagatgcctggtccccgaggagtcctatccctacggagcgacatcaagcaagccgtcacatgcgacaaggagagttgcgacatggcccaaacccgcgagatggcgtcagcccgagaggatatccgactggctgcagccacggcgagcgaaggagaagtgcccgctaccaagatctcaaaaagtggagaaagcgaagccaagactaaaaagattcccctagatccttctgattctactaaaactgctgtaataggtgccgagttagattgtaaataggaaagcgcgctcatcacctttcttcagaacaataaagatatctttgcgtggaaaccatctgatatgcccggtattcctagagaggtgattgagcactccttacatgtcaaacaagatgccaagcctatcaaacaacgactccgccgattcgcacaagacaggaaggacgcgatcaaggaggaattaaccaagctgttagcggcaggcttcattaaagaagtccttcatcccgactggctggcaaacccggttctagtacggaagaaaacggggcaatggcgcatgtgtgttgattatactgacctcaacaaatcttgccctaaagatccttttgggttgcctcgcattgaccaggtagtcgactcgaccgctggctgtgagcttctcagttttttggactgctactcggggtatcatcagatccgactgaaggaatccgactgcttgaagacttcattcatcacgccctttggagcatactgctacgtcaccatgccgttcggactaaaaaacgcaggagcaacttatcaacgtatgatccagagatgcttctcaacgcagatcggccgcaacgttgaagcctatgtggatgatgtagttgtcaagaccaagcaaaaggatgatttgatctcggatctagaagaaaccttcgcgagcatccgcgctttcaggatgaaattaaaccctgaaaagtgcaccttcggagtaccgtcagggaagctgcttggttttatggtgtctcataggggcatccaagccaacccggagaaagttactgctatcctcaacatgaaaccgccaagtacccagaaagatgttcagaagctgactggatgcatggcggcgctcagccgatttgtttcaagacttggcgagcgggggatgcccttctttaagctactaaagaaaacagacgatttccagtggggacccgaagcacagaaggccttcgaagatttcaagaaactcctcaccgagccaccggtcttagcctcaccatacccgcaggagccgttgttgttgtatgtagcagccacctcccaggttgtgagcacagtcttggtcgttgagcgcgaggaagaaggccatgtccagaaagtccagcgaccgatttactttgtcagcgaggtcctagccgactccaaaacgaggtaccctcaggttcagaagctgttatatggtattctaattactaccaggaagctatctcactactttcaaggtcactcggtaacggtggtcacatcatttccactcggtgatatactgcacaaccgcgaagcaaatggacggattgctaagtgggctttggagttgatgtctttggacatatcattcaagccccgaatttcaatcaagtcccaagcgttagctgattttgtcgccgaatggaccgagtgccaggaggatacccccgcggagaagatggagcactggaccatgcattttgacggatcaaaacgactttcgggcactggagcaggagtagttttgatttccccaactggagaaagattaagctatgtgctttggatacatttttcggcatcccacaacgttgccgagtatgaggcgctccttcatggactgcggattgcaatttccctagggataaagcgtctaatagttcgaggcgattcacagctggttgtcaaccaggttatgaaagagtggtcctgccttgacgacaatatgatggcatatcgacaagaggtacgcaaattggaagacaagttcgatggactcgagctcagtcacgttcttcgacacaacaatgaagccgccgacagacttgccaactttggatccaagcgcgaggtggcgccctccgatgttttcgtcgaacacctttatacgccgacagtacctcacaaagatactactcaagttgcgggcactcatgatgtagctatggttgaagccgattggcgagagcccctcatacgatttttgacttctcaagaactcccccaagataaagatgaagccgagcggatttcaaggcggagcaaactttacgttatgcatgaagctgagttgtacaagaaaagcccttcagggattctgcaacgctgcgtatctttagaggaagggagacaattgctgaaagacatacattctgggatatgcggaaaccatgctgccgcacgcaccattgtcggcaaagcttaccggcagggttttttttggcctactgcagtgtccgacgccgacaaaattgtgcgcacgtgcgaaggttgccaatttttcgccagacaaattcatctaccagctcaagagttgcagaccatcccactgtcttggccgtttgcggtttgggggctcgacatggttggcccgtttaaaaaggcagtcggcggttacacgcacctctttgtggccattgataaattctccaagtggattgaagctaaaccggttgtcacaatcacagcagataacgctcgagacttcttcatcaacattgtgcatagatttggagtgcccaatcggatcatcactgataatggcagataattcactggcggagtttttaaagacttttgtgaagactttggaattaagatctgctatgcctcagtggtgcctcccatgagcaatggacaggtggagcgagccaatggcatgatacttcaagggattaaagcgcgtgtttttgaccggctaaaaccctatgccggcaaatgggtgaaacagctgccatcagtactttggtctttgcgaactacacccagtcgggccacaggccagtcaccttttttccttgtttatggggcagaagcaatgttgccgagtgaagttgaattcgagtctttgcgctttcgaaatttccgtgaagaacgctacgaagaggaccgagtggatgacttgcaccgattggaagaagtccgcgaaacggctttgattcagtcggctcgatacttacaagggctgcgacgttatcataatcgcaatgttcgatcccgtgcctttctagtcggcgacctggttttgaggaaaattcaaactacacaagatcggcacaagttatctcctctatgggaagggccatttatcatctctgaagtcacccgaccaggttcctatcgactcaagcgcgaagacggtacacttgtcgacaactcttggaacattgaacatcttcgtcgtttctacgcttaagcttatcattgtacttccctatcttgactgtcaacatcaagttttcttcttgacgttgtcagtcaggggctatcatcataataatggagtgtgattttttatcactttaatttgcttacttggtctatcattgccttgtttggtttttctacttagtctgcgaggactgaaagtttttaatagcttatttggttttaggctccaccaaagcttgataaaagcttttaagaaatcaa

SEQ ID NO: 25152 - DNA, 2724 bp, Oryza sativa
attcctgcagcccatgcctccatttgctacatttatactcagtcagaatcaggcttttcatcatcagagttattactacttggctgaaggtcggtattgcggaattgatctacaacgtcacttgcaatcttgtcagccgcgttttgagcattgctgataagatcaagagcagcttcttcgcttgtcccgtctgcaaagccatcaatggcgtcaatttcaatccttgggtacaaggatttggtcatcgccaatgccatgctagctcccatacttccagctttcttgatattcttgaaatatacatccggagcaactctcagcttgtcgaagatttcggttgcgtcgagtgcactcggaccactgttattgaggaacatagcttggacgagtggtgtagcgacattagcgacttcatctcttgctccttcaagcctcttgatcttaccaaccaggacgtcaaattgagcttgagatttgattttgcggtctacaaaacacatttatgatcaaaatctactgcattaaaaagagagaagttcagattgttagctggcagtaccttcaacctccttcaaggccgagtccctttgcgcagccagtcctaccttgtctctttccagggctttaatttgtttctccatttgagccattctggcggcttgcgctgtttgaaatccaaatggttgaggatacagttacgacagcgtaaattaatggggcagatctagagattaccttttgatgaaccactcagctcgaagtttgaatcctggagctgagcaattcggtcccttaattccttctctgtctttttggcgagctccttggcctcatgtagctgatccctaactgcttcaagagttcccaaatgaggaaccagcttttctaaagttacggtcttggcctcattgcgaagatggattctctgcatgatgattcatggtttagttttgctgaagagaaaacaaagtcatcaaaggcagtcacccggaagatttacattcacaatgcgagtggcttctccaagtgccttcttcagctggcacacttcctcatcttctttttgacgatttatgacgatgccggcagcttgtgagttctcgtcccaccatttgagcaagataggaggacgagagtcatcagtcacctttatgcgaggaatttcttcttcgtcatcgcctggtggtcctgatgtatttccaagacattagacaaataagctgaagttatttaaatcggcatcacttgagaagatgagttacttgaggatgttcctagctgagcgtggggagatccttgttctttatctggagacccgatcatcgagtcgttaccagcctccggttcttgagaagttgtcgtctgcgcttcaacttcgggagtttcttgatctagacctacatccgactggtttccagtcgggggctcttgggttgttgtagtttcagttgctgccgactggtttccagtcggaggctggtcactcggattggcattatcacctgaagtatgggcgccagtcggctggctttcggcagtcggctcagaatccttggatgaacttggttctgtcacagtcggatcaggatcttttccagttggatctatgtcggatggtttcctgcaaagtgttctttcaatattcagtattatttccatgagagaagcatgtcgaagtgaaatggtaccaagaggtttatacctggaagatgttctaatctttggccttggacgactagccagttttttcctgggagtggtatgctttgggagtttattgggcgagcctttgtccccagatttgttgccgtcatcaccttcgtcgtcattaagcaccagctttctcttgcgagaacttatctgcccagtcggattggaggtttgaggttgcggatctgatctgattgtcggccctccacctccctgaacggtgtgctggcgaggagaccggcgctgagtgattggggggtcagacttcatcaatacatattcctgaatgagatgcctccacggttagttaactcaatatgaagacaagattatgttttggtcatgagttgaagatttcggatacgtacctgcggaggcagattgaatgcgttatatggcacaactggcagctgatgtgagtagctgacgacgatagcgtttgagaagattttatacattctctccttcatgattttaaaatccagagaatctggttcttcacgattaggatcatgattgccatcaaactcgaatgctgcacgggatctttctttaattggtgccagtcggcatttgatgaagtgccgagtaatctgctctccttgtaagccttgttctttgagttttagcatgcgatccatcagctccaaggcttgggctgcttcatccccaatcggaagcgagttccaggtatcttggtacaccggaggaagacaagagtactcgggaagagcaggctcaggattctgaatataaaaccagtttgcatgccaccctttgtttgaggtcttgaagggcatagagaaatacttctggctcagagtccccctcagctgaaatccggcccctccgactacacatggcttactcttgtttggttggggcttgagaaagaagattcggcgaaacagagcgaagtggggcttaattcccaagaaggcttcacaaacatggacgaaattggcgatgtggactatggaatttgggtttaggtgatgcaagctgattccatag

SEQ ID NO: 25153 - DNA, 742 bp, Oryza sativa
ttcccccatttgtatccatccatcaactctattctccaacaacaaccactagcccaccctatcaatggtagtagtacaatggaacagagcattcaagcccaccatttgtcacgccattctgacctagtgacctgccattaaagcaagcaccctgcacgtatccaatccccacccctccaaaaaaaatccccaaaatcgaaggaacgtgcgggcacggacctggaggttacgagcgagggcgtcgaagtcgatggcgtcaacgtcgctgccgtcgtcggccccggccaccgtgcggtagtcctccatggagacgatcacgacgcaccccagcaccgacgccaccttctccgccaggctgcgcccggcacaaagtgcacaacaccaccaccaccaatcagcaacagcaaccagcgcgcggcgggaaggaggggagcggcccgtacctggtcttgccggagccggttggcccgccgatgccgacggtgacgacgaggccgtccttgcgctcacgcagctcctggatcgccttgacgaggaggtagaagccgcggtcgaaggactggggatggaatccaagccaagccagcacagcggattagaacagcaaaatggaggaaggatcgagaaggttggggagggggagttaccacgtggagggggagggactggaggatggaggaggcggcggcggcggaggcggaggcggaggtgggggagggaggggaggaggggtggtggagga

SEQ ID NO: 25154 - DNA, 12330 bp, Oryza sativa
ataaaaaatgctccaaataattaagttgtcacaacttcttaatttattgtatcaaaattggacctgccttaaagttattgtatttatacgatcacttataaagttcttatactaaattgcaccttcttgccaagtggttgcactagaacgctcattttttaaattattataccaaattacacccacctaccaagttgttgcactgtgagtgcaatttactcaaaaaactataatagactcagttgaaactcgtctttgccggattgccaagccacagggctaggatatcaaattaatccataccttagcaaaataaaagatgacacggtgtcttttgttttattttaacttcattagaatatgttttatattcagtaacgccggctatttctaattcaggatacatactctatgtcccattttggttctgattaaggtgcagattcttgaggccataatagtataaccagcgatggattagaactgaacttgaaaaagttaaggtttagcccgtcaaggatattatatgggatgctcaagctatagaacaatacaggtaaaggttttcatatatcttatatgtagtgtcgtgtgtatgaaaagcgaaatcaaatttggattggagtcaaatttccatatggcacactctaaattattttgtttatatattttcatgcgacgtcgccaactctcttggtgggcgtccacccgtgcgacatcgccgtggctgaaccagaaggccaccaggcaatcggcatcagacccggtgatgatgtctgctcgacaaccttagccgcgtgtaagttttttaaggctatatgtttgtagtgactatctatatatatttgttgacaaacaaatttgtcagatgtaaatatgatataatattagcgtaattacatgtaattataatttgtgaaattgtatataactttccaaatttctgtgataacatgttatttccgcgaagcggttgtcgtggaaccgaatcccctcacccataagtgtgcaatgatttttttcccttctcaaaattttgaaacaaatccgatttaaaattatatgaaagttatattatagttacaatataattacagaattatgttgtatttacatttgacaacgacaaatgtgcaaaatcgcttttgtattttttttccgctatatccacacaaacttcacaccgtttctgcaatgctgatatactaaagttctctgcatattggccgtttctgcagagcaggcggtagattatattgcgctggatgaatggatccaacgctggtatactgcatagtgcatacatattcttctctaacattactatggcaacttgtactgatgtgctttgacctaacattacatttgacaacgataaatgtatagcaaaatcgcttttgtatttttttccgctatatccacacaaacttctctgcatattggccctttctgcagagcaggcggcagattatatttgcactgaatccaacgctgatatactgcatacatattcttctctaacattgctacggcaacttgtactgatgtgctttgaggtaacattattttccgacattttcattgcgggatataatgaacgaacaacatgcatattaagaagctaacaattatcagttataataacaatatgtaatcaaactgtttcacgatccagattaataagcattgatattcaaattaagcgtggtcttcctctataggatcgatcttgcaaattactgcgattttacctttcttttgtttcttgaatagagagactcgaagccaattttctttcatctctggttgtttccattctctaggtaggatattgcactgcacccttctcagagtataagtccaaagccctggatgcaataggagagacagtccacgatcgtacacggctcaaaacggtccaaccgtgtacgttcgatgcttccatctgcaaggctataccgttctaagtttccacagtatccgaagtagatggtatcagcagcgacaaatggtaaggtctccgccgacacggagatcgcgcgggacatgctgatgaacagggcgcgccagttgaaaccctttaccgggacgaggatcccggcatcgaaatccaccctccacgcctcgtacttcctgctgcgctttgttctgtagctaccatcgtcatgagcataatggtctggccaaagcatccgctgcaccagaatcagctccccgcccttgtcaaccaagtgaagggtgctctgcaacgctcggctggaatggatcaatgaactctcaatcgccatccgcatctgcggcggcggtttccggcgatcatccgaagcgatatcgagctccattattcccctgtcggtggcgcggtagaagcgactgacgaatggcagagccgcgggggaggtgttgtacgtgctgttgttgttgtcgtctattaagttgcatgcaccagccagttgcacctagaagcctaagctgatagggaaaggcggacaattcactttatacactccaacactccccctcacgcgagaccccctcaagtctcaagcgtggaatattggagtgtgctgcaattattttatttaattgcgcgccagccaggatttgaactcgagacctctggctctgataccataaaagtgtgataggctcaacacgatagattggattatcacatatggtagagtacatataggcacatgccttccatatctagcaaccgatttatagaaacaatatcggagaagattaaggaaggatggcaagggataaacacaatctaacacccccgcagtcggaacgtcgtgggaacggacattcagactggaccgaaactccgagaagatggcactgggcaaccctttggtgaagatgtcggcaaactgtgacgtagtaggtacatgtagcactcgaacagatcccgcagcgacgcgatcgcgaacgaaatgtagatcgatcttcacatgcttagtacgctgatgttgcaccgggttagaagagagatagacagcactaatattgtcacagaaaaccaatgtggatcggctcggaggggtatggagctcatgaagaagctgtcgaagccagcaagtttcagccaccgcgttggccacggcacaatattctgcctcggcactggagcgcgatacagtaagctgacgtttggaggaccaggagaccaagttgtcgccaaggaacacaccataacccgaggtggatttcctggtgtctggacaacctgcccaatcagcatcagagtatgcactcatccaatcagcatcagagtatgcactcaagtcaacagtggaggagcggcggatgtgaagaccataatcaaccgtgccacggacataacgcaagatgcatttgagagcagcaagatgaggctcccgtggatcgtgcatgtgaagacagacctgctggacagcataagagatatctggcctggtgaaagtcaggtactagagggcgccagaaagactccgatagtccgtgggatcacgaactggggcaccatcagcggcagagagcttggcgttggtgtcaacaggggtagcacatggcttgcaatctgtcatgccagcacgctccagaacctcgaggcagtactggcgttgactgagatgaagaccagaggactgccgagaaatagagatgcccaagaaatgatgcaagctgccaagatccttcatcgagaactccgactggagagcacggatggtccaccgaagaagtgcatcagaggaggctgtcagaacaatgtcatcaacatagaggagcaagtaaaccgtgtctgagcctcgacggtagatgaacaaagatgtatctgattttgcctcaacaaagccgagtgtaaggagaaagctggcaaaccggctgtaccatgcccgtggggcctgcttgagaccatagagcgacttgttgagacggcacacaaggtcgggcttggtggggtcaacaaagccggcgggctgagtgcagtagactgtctcctgaagtgtcctatggaggaaggcattcttcacatccagctggtgaactggccaatcgcgggagaccgccaagctgaggacagtgcggactgtggcaggcttgatgacagggctgaaaatctcgtcgaagtcgatgccggggcgctgcgtgaagccgcgaaggacccagcgagccttgtacctgtccaggctgccgtcggactggaacttgtagcggaagatccacttgccggtgacgacattggcgccatttgggcgggggaccaagtcccatgtacggttggcctgcagcgcagtgaactcttcctccatggcggaccgccaattggggtcggccagtgcggcacgatatgtgcgcggaactggagagagagtggtggcactcaagttgtagcgcttgacgggttggtgaagtccgtgcttgccgcgtgtcgtcatggtgtgctcattgatgatgggagagatgccgagctgcgttggcaatcgaatgccggggacacgcgcactgcgggcgcgtgtggcagcaccagtcggtggtggtagcaggggagctcactcggtgggcgcgctggccaacgaagcaggcgtcggtaggggagccagctcgatgggcacgccggctgaccaggcaggcgcaagtaaagacagcccagtcggtgcgccagctgaccagggcgaccgaggggcaggcggtccggtcggcacaccagccgaccgagtaggagtgacggttgggcccgacggcccagcagtggttgagcgcaccgaagcctgtgcggggaagctgcgagcggccggcccagttggtggagtggccggcccagttggtggagcggccggccgagagcggctatgctcggtgagggccgtgggcgtgcaggccaccgggtcagtgtgaccagggcggcggcgactgccaatcggcgcagggagaggagctgaaaaatcctcaagaaacttcaagtcagtagcaactgcatcattagtcatctcagcaaaaggaaaacatgtgtcacgcccagaaatttaacccaaatttccagactattttgcgtattaaatccctgtccaggaccagccagggtacacaaaacgacaagtaatatacagttccaaacgtaaataaagcgtaaaatacttacggaagaggcacttagtcctcacaccgaaacagaacgacagcagcggaaaaaggcgatcctagcggggcttcagctccactccacaggcaaaactcaactggggtctgagccttggtcctctaactccatcttcagatcaaaagcactacacttctgaaaaagggggaataatagcaagactgagtacaaccaccgtactcagcaagccacaccaacgatgcagacgtgcaaggggatacaaggaggggtttgtggctatttgcataaaggcagttgtaaaatattttattgagcaaaacagtaaaactattgggtaattaaagtaacattaaaaactccactgatcaacgctacaccacgttgaacaggcccaaccaacccacctgaactacagtgtattgggtcgatttattaagatgggactaatcacggtgaatctggtcgaccgcccataaccgcgggcacggctattcgaatagctttactctgatcagaggtgtacaactgtacccacaagacacagccccacgacacgtttccgtgcgccgacatgccaccacgacataccggaaagaggccgtgacaggacccttcgcataaccccctctagccaagcacaccacacctcaggtttcacccccgtccccagcgggcaacgggcagtcccctctcgtgcctaggtgaatccggaagcgacagaggccgtcgcagggctcgccccgctccatcacgcccacccttgcctggatgcgtcgactagaggaaagctacactacaagcccagccgttgcccacgctggcttgtggtaagtacgataagttcttccagggcatcccgcgaaccggtccttaactgccatgggtgcgaccagcaaaaccatgcacccacagcccactattcagtcgcattttagttggataattacgaccatgaagcatggccagatgtctcgagcacgcagctcactctgatactaaaaaggtctaatactgtaattatcccatcaactgagctagtggtaaataagcatcgctaagcatatagttctagctgggtcaaataagtaacatgagctagtcgatttattacccaaggttgacaaatgatagatatcaagtaaacatggcacaagcgagcagataggtaaaccctgatcccgtgtaattagcaaaacatgcatatttatttgcaaacagtaaaagatttgtaaattaggatcaacatgctcaaggggaatgtgtgacttgccttgcttcttcaaacaatcttccgaactcttatccttgcgaccgcgatcttccgaaacgacgggaactacacgctggcacgcaaaacgaggaaaaactcttataaaaaccaagcaaacagtacataaaaagtaaacaaacatgtagagctcaattttagatgaattttgcaagtcgacccggtcggacggccaccggcggcggcagcgcgtcgcgaggacgcccgggaggcggccgacgaaggggaggaaaagggagagggaggggagtgctcaccgagatgcacgacggcaaaggggcggccgacggcaaggaacggtggcgacggggctcctcaggaagacgacgtgacggagctccggcgacgggcgtcgctcgggatggggcggacgggctcggcctcgatcggcgaccgaggaaggaggagctccggcggatttccggcgaagaggggcggcggccgaggtcctcctcgtccttgcggagctgagggaggcaacggcgcgggtcggcgtcgaccgaagcggcggcgcgacgcggctggagtcgggggcggcagcggagagaggtggttcgcgtggctacggcgctacggaggtggagaggggaaatggagcggtggccgagcttgcccgggcggcggcaaagctggcggtggcggcggagcagggcggcggcgaccctagtgacgggaaacggcggccggagttcgccggagtgtggcggcgcgcgggagcggcgtggggaagagcgagggagagagtgccgggcccgggaaacaaggggaaatggacgaggggagcacgggggtgctttttatgggctcgggaaggcgggatcgaggccggacgtggcggaatcggccggcgaagtggggcgccgacgtggggtggtggaggggttaaccggcgccgattttcgcggggagagtgggggaaaagtggaggaggtggaggggatcgattccacgcgctcgtggggcggggtgaagcgcgggaaccgcggcgtcgtggggcgaaaccggcggccatgacggccattggggtgacgggaggttagggaagaagatgacaggtgggacgagagagaggggaaaacgggcgagggaggtaaagcagacttgagggagagagagagccgagcgggccgagggaggaggccggcccgagagggagagaaaaggggcgcgcgggccgcgggagggaaggaagacttgggccgaaaaaggcccaaagagaggaagtggaattttaattgtttttttttattttaattgatgcaatgatctttgtgctattaaaactatttctcgagctccgaaaattcacggaaaattccggagagtacattagggcgcaaagaatattacaaaatattcccggccaatgatttttaaaggaaaatttcaaatttcctctataattccacttgattaaattggtttaacttttatttaatttctagaaaatgtattattaattgatttttattcccgaacgaaaatcggggcgttacaaatctaccccccttacaggaatctcgtcccgagattctgggatggctagaaagaaagctggagctggcgggcggtttgactgatcggacggatccgcatactgcactgccccctttctgtctcgaactgactgattgactgattgtccagacttgcacgactgaactgattgattcaacttttctgttcctttgctttgcaagactggactgactggttctacttcaactgacccagacagggctgtggatgcttaaggaacttacttatcttggactgaattgttgaggttagcaattttgataacctgacaattcaccatgctgactcgaagaggatgaagttgttcctgaagcttgcatctgacctttgtaactcattgatcctacgtccgcttgaacgggttctgactcgagtgacacgtaattccaggaaacctgcttgacctgtctttcgtctgaaccgcaactgtcctcactgttgcttctctaagctaagctgttgacctggcctcaccggtgtccctcagaattccatcaagtgacctaggaccggcgtaattctgcatgacaccttgcaattggctccttcaactgaaacagcgacgaggtgagccagaactcatctctgcgacctaccccccttacaggagtagtcatacatttcgcctgactgggaacaattgaactgctggcataactgtcccgcttctagcctgacttcggtgtcgtatgcctaaatagattgcatacccactgatcacttaacagatcaaactcaaaagtccttctcttgacatgacattacacttcgtcgatcgtcctttgctgactcttcctgggtttacggactataggccctgcaattgttttcccaaaaatactacaatctgaacgactgccggaaattgactttgatactgccgagagtttctgctttttgatcataaccacttcgctttcctatcttcggtaaagatgattcgttaaaagggattctatgccatataccctgctaactacacatttctggacttgactctgtatacttctgacccaggtatggaacaatttctttttcaacttctgagaaacattgagatgattcctggagcttatactggctgtcttgaactaaggaaaaatgtaattgatccatgatcgcaccactagggtgtaaatttccgcttaccatcctctaacggcttccaaggtttagaggagttcccaagattctttatatgatgtcactttcaaatattccatcactcttttcatccgaataccattgatactgcctttaaagagatctcatcatgttgggtgttgagcgtctaaccattttcaatctgctagttaaccattcctctatttgctcgcaaacaggttttggagcttcaacagaattgcgatgagttagaagagaaactcttggtttcttgtgacaccgacagattcacattttaacttgcttttgcatgctcaagatgaatcataaaagaagagaaactgactgactcaaactttattcaatattcccttttcattacataactgccataaacatctatgtacagagagaagtgctataaggttaaacacttgtagactgctgctgaacttgaaacgtagggggcttggctaggactgctattgcttccattattcgaacctaaccgacttgtttctttaattcctactggctgaagtctcaccgggaatgttgctctgcttgttgatcttcgatggtggagtaacaactctcttgacagctgcagcaggtaggaacttcttgctcgcggggttaccgagcggtgatttgccgatgggcctttggattggagcaatacgaggtgcattgctagagctgacaactgctgggtgacctggggctgacgaagcttgccgcgggtgctggcgaaggagtgtactgcctctttgtagctgtagcgagctattattctcctggcattgcttaccttgctggcgttggtgttgtaggcttgaaacgattgccggtggaacaatgcgacctttgacggtgcccttgacgataatccgttggggcggaggttgcacatttaggtgtcgattggtgtcatgggcagtgctggtaacttgtgaatcacgacgaactgcctttgctgctcttggaagagggcaatcactgaaacaatgtcctggcttacgacagttgcgacaggatcgacttgcttggtcccagggtgcaggcttctgattatgcactttggcagctgaaacgggaacaagcagagacttatgaacatccttggtgacgttgcttcttccatggttggcttccactggagctggagttggaggaagagcagaaggattgtgaccgctgttgtcgattgtcattggttgacgaatgggttgcacggttgtcccttgttctttcttggtcttagctatgaccgcattcaactgacagtccttaggcacatgatctgttccttcacacaagaaacatgtgaccttccttaaagggcatgcatctgagtaatgggtatattcaccacagcggcatgtggggaggcataaactagcagtgtgtccgactatcccacatctagcacatgctttgaacttcaactctctttccctgaaactgtcaagggtcgcatcatcattctcatcattatcatcatcgttgtcgtcatcgtcatcagcagaaaaccgttctcctgattcatcatcttcgggtctgggcggaccgtactttatgagatgacgggttagctgacgcgctcctcggaaggtatttcttcctctctgacgcttgggtatccttgctgcgtcttcaggagtaaattctgaaccggtgatgatcatggtcctgccattatccatcttccatatcactgtcctgttcgctccagagttgggctgcaaagtaccatccttcttgtcggtagactgacttggagcttggttactccctgggcactgcttctcgtctttttcaggtgacctggcgaacaccttccatggacagttccttacataatgaccttgctcaccacagtcataacaggtagcacttactttcctttggtctgacgttgacttggctgtcgttatcttcgggaatctggacagcattttgacaggggtcttcggtgccgatattgggaactcctgactctgactctgattcgggttccgggctggcatctgatctcgcacctgcggtgggtgacattgacgtgactcctgacattgtcgttgcatctgttgcatctagtatatttggtaccgacgtcgcatctgttgtaacaactcttccactgtctgagtttgattagccatgacttggggttgaggctgaccttcaagaggctgacgtggaatactattagaattgcactgagttgccccatgaaactgacggggtcttgatccgatgaaattgtccctcatgcggaccatctgctgcaggcaatagagagatggggaaataggaggggttactagagaggaggtactaaaccacttgcctattgatctgttgtgaatggattttatgattcaagttgcttaagcaaacaacctagtatggtcgcatccccaccaatgatgcaaaccatacccctacacacaagcaaacaacacccgatctagcagctaacgatactactcttcagggaaagattgggtttaggaaaactccgggaaaacttcacttgactctgggctgatcttctcactctttgcacgaagcttgacttgacttccgaataggcgtgaagctgacggtttgtcctccaggtttaacaactatgaggattggagggactgggaggagaattttgaaaaaccgtttcataaagaaatgtcgaagggcgagaggagacaatttgcaaatagggtttttcagaaaacttgtccttagggtttgaccatttggctcaacctacagtcaagttggctctgataccactttgtcacgcccagaaatttaacccaaatttctagactattttgcgtattaaatctctgtccaggaccagccagggtacagaaaacgacaagtaatatacagttccaaacgtaaataaagcgtaaaatacttacggaagaggcacttagtcctcacaccgaaacagaacgacagcagcggaaaaaggcgatcctagcggggtttcagctccactccacagtcaaaactcaactggggtctgagccttggtcctctaactccatcttcagctcagaagcactacacttctgaaaaagggggaataatagcaagactgagtacaaccaccgtactcagcaagccacaccaacgatgcagacgtgcaaagggatacaaggaggggtttgtggctatttgcataaaggcagttgtaaaacattttattgagcaaaacagtaaaactgttgggtaattaaagtaacattaaaaa

SEQ ID NO: 25155 - DNA, 4314 bp, Oryza sativa
ttccgaactcttattcttgcgaccgcgatcttccgaaacgtcgggaactacacggtggcacgcaaaaccgaggaaaaactctaataaaaaccaagcaaactgtcacatcctgattttcgtttcaggatttataaattatttaataaattattaatagaatttttgttaaatgttctttaatttacaagtgaagtaaaatgtgggaaataaaatttcctaaatataaagcatggatggatttaatttttattaaattctccatgattaagtcaactctctgaaattttctcggatttttcagagctcaactcttaataatacaaagaacagttcagtaattatttgatcattaatgatctaattataattgttaagagcttttcttgtttaaaaatccttaaattataaattgttgtttaaaaggaattattagaaatgattttaaaagcttataagagaagatctaattttaatttgttaaatctcaatataaaattgggctagataaaatttcattaaatactttgcttaattctataattcctagatttttctgggatttatttgagctaaggaagtatttttaataaatggaattgcatttaagaaataatttaaattgaaaaaggttttaaaagtcttcttttggctttgggccgaaagccggcccaaaacctctcttctctccctcctcggcccagccggcccagtccgcagccgcgcgcgcgcgttcggtcgctgacaggtgggccccgcttgtcggatccgtcttcctcgcgtcgccgccgccgcccgcgaaccctagcgcgccgccgccgccttctccttccaaatccgctcgattctttccttctccggtgaaatctttagaggggaaatgatcttctcgatctcctcttccttttctcttttggaatctccggtcaattcggtttggaaactcgatggaatcgagatcgaatcggattcctctctctcccaaaccctaaagtttccttctcgccgccggtcgccgtgggcctccgtcgccgctcgctagcccctttataaggacccccaagctctcctctacccgtcgcctccctcgccttcgcccgccgtcgtgtgtagcgccctagcctcgggagcttttgcgccgccgtcgccgccgttcgtctagccgtgcgccgccgtcgctacggtcgtcgtcgtcactcgggaaggccaccgtcgggatcgccaagtcgccgccgtccccgtccgccgcttcgccgtcgctgttgaccgccggagcgccgtcgccgtcgtcaagccgaagagcttcgccgcttcctcctcgtcgccggcgtcgtccgttgcttttccgccgttcctttggtcaccggtgagttcgccttgtcgtccgcttcatcccggtgctttccgttcgcgccgccgcgccgccgttcgccggcgagcgtgtgagcccgagccgccgagccgccgccgccggtggtgacgtcatcgctgacgtcatcggagtcgtccgccgtgagccgccgtggacccgatcgatctcggccgtccgttttggattggttcgatctcggccgtccgttcgcgtgaaccgccgcccgtgcgcccggtccaccgaaaccctagccgctgacgcaataatccccttttccttttcaaaaataattcattattgcgtcataattcaatttaaaccgatttaagtgttttaatccgatttaatctttaaaaattcatatctaattcatcttaactcagtttaatgtggttcaagttgcaaaagttgtttaaaataaagatctacatattaaaattgtccataaattgaattaaatttatttaattctttttaaatgggctttaaatagatttaatcttgtaaaattcttaataaattcatttgaagtcagaatgaggccgttcaagtctcataattcatctaaaaatatgatctacatgtttgtttactttttatgtattgtttatttggtttttattagtctttttcctcgttttgcgtgatagcttgtcgtttccgtcgttgcgaaggttcgcgagtgcgccggaagtattcaagaagattaattgaagaccgattattgcaaggcaagtcacacagatcctaaacacaatcctttgagcatgttgatcctatatttaaattctctatttatttcaactgtgcatttattttcgaatgtcattgggtggaattaacctattctttgttatggcccttttgttcttgattactttattccttgataccttgggtgattataattggactagttgagctttatatatattggttcaactagatattagctatgattgcttagccatgcttagaaacattagcacatatttgggataactaatgtttcactatcacttatggttatatttaatggtagctcacgatggtcaaccgtgattggttaattaattacttgccaactaaaacttgataatggtgggttgtgagcacatggttttgagagtcgtgctcatgacaattaaggaccggttcgcgagctactgttgtgaaacattaaccgtgccaaccacaagccagcgtgggcaacggctttatcttttgtatagcatggttcattgcggagcaccagactgagaagtggcggaaataagcccacgggggtcgctggggagtccatgccttgttttataagggggtgattatgatccaggaatggtgcgctgcggtggattgtgttatgcaaggggtactgtcacagcccctttccgaggtaccgtggtggtactgaggcacatggtgacatgatgtggggctgtgtcttgtgggtacagtggtacacctctggccagagtaaaactattcgaatagccgtgcccgcggttatgggcgagttgagcaatgtttttcgtgattagtcccacacctctcaccataattatagatgttataactggtaataatttgcttagctcctggtttggagttagatctgttcagccgggtatggttgttcagaatggttgggcctgtgcagcatgggtgtgctgttcagtgttggttaaaatttctgattaattactccactgttttacttctcttaaatgttttgctaaatgctgcttttgcaaatgagccgatattatgccatcctttggtatccttgtgcacttgcatatttgctgtgtggcttgctgagtatgtcatatgctcaccttgcaataatcaatcaacctcagttgaagaaaaaggatccagaaggagaagacgtttggcttataccccagttgagctgcctgtgggagtggagccggagcttcgctagattttattttccgctgcagttttcttcttggtgaggactaagtgcctcttaagtaagtatttatcggtttagttaatttgatgaatctgtatattaaattgtcagtttgtgtacctcggctgattcctggacgaggatttcatgcacaaataagttcggaaattactagtgaatttctgggcgtgacacaaacagtacataaaaagtaaacaaacatgtagagctcaattttagatgaattttgcaagttgaacggctcaattcggagttcgaatgaattagatatgaattttagaagttttgagccatttaaatgaatttctagaattaaactcgatttattgcgcaattattatttatttttacagaggaaatggacctcgctgacatcagcaaaggggcggccagcgccgacacgcgggccccacatgtcagcgagtcaaagggggagggcgcacggtggacatggtccacacgtggcctcgggtgcgcgtccaccacgtggatggcccagatcggcctgagccgatcgggcggccgaggggagcggcagccaggggcacaggcgcggcacgaagccggcccggccgagccaaggcgcggcggcggcaagggggaggcggcaaccggctgcccggcaccaccggcaacggcgcgggcacggagcgcggagcgcggcggcagcgacccggtcggacggccaccggcggcggcagcgcgtcgcgaggacgcccgggaagcggccaacgaaggggaggaaaagggagagggaggggagtgctcaccgagatgcacgacggcaaaggggcggccgacggcaaggaacggtggcgacggggctcctcaggaagacgacgcgacggagctccggcgacgggcgtcgctcgggatggggcggacgggctcggcctcgatcggcgaccgaggaaggaggagctccggcggatttccggcgaagaggggcggcggccgaggtccttctcgtccttgcggagct

SEQ ID NO: 25156 - DNA, 5242 bp, Oryza sativa
agagaggaagtggaattttaattgtttttttttattttaattgatgcaatgatctttgtgctattaaaactatttctcgagctccgaaaattcacggaaaattctggagagtacattagggcgcaaagaatattacaaaatattcccgaccaatgatttttaaaggaaaatttcaaatttcctctataattccacttgattaaattggtttaacttttatttaatttctagaaaatgtattattaattgatttttattcccgaacgaaaatcggggcgttacaacatgtctcatcgaacaccacatgtcgcgaggtgatgaccttgttggtggtaaggtctagacaccgataccctttatggtggagggatagcctaggaacacacatggggtggatcgtggggctagtttatggggagcggtggcgaagaggttaggataacacttatagccgaacacgcggaggtgggagtaggacgggtgagcaccatatagggcaaaaaagggggtgtggtgttgaagagttttggtgggatgacggttgataaggtgtgtggtggtgtgaagggcctcgacctagtagggagcgggaaggttggcttggaagagcaaggagcgggtgatgttgttcaaggaacgaagcatgcgctcggccttaccattctgtggggaggtgtgagggcaggacatccgcaaggagactccattggtgaggaaaaaggagcgggcggaggaattgtcaaactccctaccattgtcacattggatgctgtgaatggtcgtggcaaactgtgtcttcacaaaggcaaaaaaatgagataatgtggagaatgtgtcggatttaaagcgaagtggaaaggtccacacataatgtgagcaatcatcaagaatgacaagataatacttaaaaccagacacactaggaataggtgatgtccacaaatcacaatgcactaaatcaaaatttgccttggcccgactagagctagtgggaaaaggaagacgaacatgacgacctaactgagaagcatgacataaagatgtagtgactttaggtggtgggatgacagatgtcacgcccagaaattcccgaatagaattccaagcagaatgtgtattaaaacccccgtccaggaccagccggggtacacaaacgacaatgttgacatacagatccacgtcttacaaacattataaaggtcttacagaaatgcagcggaaaacaaaagaaacgggagctaagccttgacttgaactgcagcgggaacaccactccacaggcatcctcgacggcacggacgaagcctactcctcggagaacccgccatcggacacatactcgagctctgaggttgggggaaaagtagagcaagactgagtactacccactgtactcagcaagtcataccggaataggggtatgatgcagggaattaacaaagaagagctagagtggttcatttgcataaaaactagcatttataaacaggaattgaatgcgaaaacggttgtaataattaagcagtattaaacatccgctgtccaacgctaacccacgttgcgacaggcccaaccatccacctaaactatccaagttcaacagattacactagggtgagactaatcacggtgaatctggttgaccgcccataaccgcgggcacggctattcgaatagttttactctgatcagaggtgtacaactgtacccacaagacacagccccacgacacgtttccgtgcgccgacatgccaccacgacataccggaaagaggccgtgacaggacccttcgcataaccccctctagccaagcacaccacacctcaggtttcacccccgtccccagcgggcgacgggcagtcccctctcgtgcctaggtgaatccggaagcgacagaggccgtcgcagggcccgccccgctccatcacgcccacccttgcctggatgcgtcgactagaggaaagctacactacaagcccagccgttgcccacgctggcttgtggtaagtacgataaattcttccagggcatcccgcgaaccggtccttaactgccatgggtgcgactagcaaaaccatgcacccacagcccaccatgtggttcattttatttaaccaacaccagagcggtggtattaaaccaacattatcatataaacctatagtctaggttttaaatgagatccccactgtgtgctagttgaactaagcatggctaagcaattcctagtccaaagtctaatcatgttataacccaagctaacaaaggagcatgatatccaaaagcatggctgtaacaataggtatccatcccatagtaatattataaaacaatgcaatatttgaaagaaaacaatagagcatttgcaatataggatcaacatgttcaaatgacaagcatgacttgccttgctctgctgctggagggacctcggcgactatctcgaagtacactggagcgtcggagggatcggaatctagcgacatacaaagcaaacattgcaaacaggctataagactactgaaacagagaacaaaaccatttttaatggattctacacatttttcttgatttactgagacttgaatgggattaaacggagctcggatgaattagttatgaattttagaagattcactgtgtttattactataaaagaaatccttaaataatttattgcgcaatattaaccagggctgacgtcagcgagggggcgcggcgccgacatgcggggcccaccggtcagcgaccgggagagagagaaagggggtggcggcgcgcgggcccactggtcagtggcacggggaaaaggaggggcggcggcgccacgtggcggccgaaccgacggcgacggggacctcgcggccggggcgcgcggtaaatgcggccgccggcgcggctcggcatcaaagccgaccggccggctgggttaaacggcgacggcacgcgtgcgacgacggcggctaccggcggcacgggaaacggcggcggcagtcgaaggcgacggccgacgactcgaagcggcggctagcggctctaggaggagaggaaggggaaaagaagggaggggatgcctcaccgagggtggccggcgcggaggaaggcgatggcggacggcgacggcaagccacgggaggacggcgtcggctagcggacgagcttcggcgtgccctaaggaaggagaagagagggattagagagagagagatggaccatggcgatcgggatccatggccgaaggcggcggtagaggtggcgctcacccgtgcgcgtggagatgagggctccggcgacgaacctcgacggaggaggggtggacgaggtggacctcggccgcgcgaagctaacggcggcgacggcgtgagacggcggcgagcctagcggcggctagcggcggccggagtagcaaaagcggcggcggcgggtggttcacggcgcggaggcgttggggagctcgggagaggtcggcgcaatggggaaaaagcgagagggggtgccggcgatgcttaaataggggatgggggaaccggacgtggccgggagcggcgggattcgacggccgacgtgggggagtggggaggagagagaggcgggattcggttttcgaatcccagccatctcgggcgcgggcgcgagcgggagagagaggggaacgggcgcggggaatgcggcgcacgcgcgggcgtggtcgacgtggcccggagaaggcggagacgtgggcgcggcgtcggttgcggcggtggcggcgcgagcgggatcggcgggaggagggagacgggtccgacaggtgggccccacctgtcggcgaccccgagaggagggaggcgggcggccggctgtcgggctgggcctcggcctgcggccggcccagtaagggaggggaaggaaggaggggaatgggccggcggcccatccgaaaagaaaaaggaggaaaaagggagggaaaagaaaaagaagaaaaggattttccctggaattaacaattgcactttagtgatttttaattggttaaaattatttctagagctctgaaaattccactaaaaatcctgttaatgaatttcgacatgtagaattcaagaaaaattccacatgtcaaatccgattattatttgcattgttttcttagggttttatcctgatttcctctgcattttcttggggtcatttgtaatttacaatttggcttgggaggaaaacttcggggtgtgacaacagacgcctacgccaagtgggtgagggcctcatgaccgaggtggccaaggtggcgatgccataggtcggtgttggtggaggaggcgacaaaggcacgagtggaggccgccgaggagtacgcatctgccgggagaggataaagagcacaggaactattgcacctgacgatctcgatcttggttgggtaatccttcacagagaggccaaaagggtcaagttcaacggaacaccaattatcacaagtaaaacggcgtgcggaaataaggctcttaataatctcaggagaaatgagaacattgttaagcacaaaggaagaattggggtaatgtaaatatgcgtgaccaacggaggtaatagggagaagggagctattgccaacaatagtatgagagggagtattgcgggtggggctttgggaagtggagagggtaccggtgtcagacgtcatatgagaagtagcacctgagtccatgtaccattcattggacggtggagtagttaatgtggccgtgttgtacgcgttggcgagggcccgtgggtcccactgtgagggccccgtccactggaatggagattgcacagcggcaacaagagttggaggcgccgtgcttggtgcagtgtactgggccggcctaggaagagccatataggccggcgggaggaaggcttgctgctgggccggcgcgggcgtggtggtgaaggctgtcccggcgaagctaggccgcgcgccaaggaggcctggaccggccacatgtggatgctccttgtccacgggttgtaggccgtgggccaggcctggttgacccgtggtgcagtctgtgccagacggagcatgccgtcgccgtgggagagagcacctcctgcataagagtagaggagatggagccgtagagccagctgaggacgacgcagtccatctgtgtccagtcggcgtgatcagggcgaggtacgtcggagaagacatgatcggtgagggcgtattttccaagcgcgacgaggaaaaggccttgccagcgggagtagttg

SEQ ID NO: 25157 - DNA, 16017 bp, Oryza sativa
agggagccttgaagaaggagcggacggcgtcgccgatgattttaatggtgtcatcaaggacggcgtcaacagtgagggaggagggagaagccatggcggcggcagggtgcgccgaccggcggctggggtggagaggaggtggaagcgagaaggaacctaatctgataccatgaattattaccagtgatagcatcatttattatggtgagtagtgtgagactaatcacgaaagacattgttagaccccgcccataaccgcgggcacggctattcgaatagttttactctggccagaggtgtaccactgtacccacaagacacagccccacgacatgtcaccatgcgcctcaataccaccacggtacctctgaaaggagttgtgacagtacccctcgcacaacacaatccaccacagcgcaccgttcctggatcataatcacccccttataaacaaggcatggactccccagcgacccccgtgggcttatctccgccacttctcagtctggtgccccgcaatgaaccatgctatacaaaaggtaaagtcgttgcctatgctggcttgtggttggcacggttaatgtttcacaaccgaaactcgtgaactggtccttaattgtcatgagcacgaccaacaaaaccatgtgctcacaacccaccattatcaggttttagttggcacattaattaattaaccaatcacgattagccatcgtgagctatgattaaatatccatcattaggtaatagtgaaacattagttatcccaatcgtgtgctactgtttctaagcatgcctaagcaattatatctaatatatctagctgaaccaatatataaagctcaactagtcaaattgtaacccaaggtatcaaaggacagagtaatcaatgcaaagtggccataacaaaggtatagtttcacaccacccggtgacattcgaaaataaatgcacagttgaaataaatagagaatttaaatataggatcaacatgttcaaaggaattgtgtttgggatctgtgtaacttgccttgcaataaatggtcttcaattaatcttcttgaatactcccgacgcactcacggactttcgaaacgatggaaacgacaagctaacacgcaaaacgtggaaaaagactaagaaactccaaataaacagtacatataaagtaaacaaacatgtagatcatgattttagattaattatgagacttgaacggcctcattccgatttcatatgaactagttacgaattttataagatttaattccaattaaacctattaaagaaaaagactattccacattaattaaatcatttacaaatgatttataactgagataaaacattaaagcaacctctggaaatagattagattatatttggtagatgatatatattaaaaagaaataatatgccactgaaaagagagaacatatttatatcgattttggagggctaagattaatcttgacatagagttgaccaagattcaacggatggcttagattgatctggcagcgagcctcacgagataccgactcaacgagtcaattctacgtgacacgggattacccaaatgatcaaccgaaaccggcgaacggaaccggcggctctaaacggctctaaactaaaggacgactcaacacggacaaacgaacgaagcacgggtaacacctcgttcgaacgaacgagcgaacgactcaacaatggctgcggctaaaccggtgggctagaaacgattcacggtaaagccccggtacggcaaacgataggccggtaggaatttagggatgcacctacggctagacaacttgactaccgagcaacggttaaagcggcggctaggttaaagcggcacacagctgcgacacggcggcactagggcgacttggctcggccaggcggcggtgactcggcggagacacgcggctcgggttagggcgacatcacagcgacgacgacacacagcgacggcagatggtggctacggtagcgggacggcagcgacttgtcacgcacgagcagcagcagcacggctgtagcagggagcggcacagcgacgactaggcggctagtgcagtggcgacgctagggcagcagctaagcgtggcacggcggcggctactcgacgacacaaacgagagattaaaaactaaaccgagggaacacggatagacgtctcaccgaaccaaagcgatcggagaggaatagatgacgacggtgaaccggcggcaacacatggagacgacgacgacgccatttattatggtaccaacttgtcacgcccagaaattcactagtaatttccgaactaatttgtgcataaaaccctcgtccaggaatcagccgaggtacacaagctgacaatttaatatacagattcatcaataatacaacgttacatacttacaaatgaaaagagaaaatagcagcggaataacgatctagcgaagctccggctccactgtcacgcccagaaattcacgaaccagaatttctaagctgaatgtgcattaaacccctgtccaggaccagccagggtacacaaacgacaattgttgacatacagatccacgtcttacaaaaatataaaagattacaaatgcagcggaaaagataaaacgagctagccttggaagcttgacttcagcagcgggcgactccactccataggcaaaccttgacggcagcgacgaaaccaacccctctgagacagctccaactgagaagaacttcaactctggtgtgggggaaaagagagcaagactgagtactacccactgtactcagcaagtcataccggaagaggaggtatgatgcaggatataaccaaaggaggctaggggttcttttgcataaaactagcatttaaaagcagtagttgaaagcagtaaaacaactgtagtaattaatcaatattaaccaatcactgtccaacgctacaccacgttgcaacaggcccaaccaaccacctgaactacactagttcattaagctaaactaggggtgagactaatcacggtgaatctggttgatcgcccataaccgcgggcacggctattcgaatagttttactctgtccagagatgtacaactgtacccacaagacacgattccacacatgtcaccatgccccgaagtatcaccataatactgcaaagggggaaatcgtgacaagaccctccgcataaccctcccctaaccatccacaccacgctaaggtttcacctccacccccaacgggcagtgggcggtcccctcttgcgccgcggtgaatctggcagctggacaaccggacaccctggccgacccaactccattacgcccaccctcgccaccggtgcctaggaaagggtcgagctatacttcagatcaagcagttacccactctcgcttgtggtaagcacggtaagtctcccagggtttcccgtgaaccggtctttaattgccatgggtgcgaccagcaaaaccatgcacccacagcccaccattcagtgtattttaattaactaacaccattgcggtggcaccaatccaaaactatgctcatagtcaaagtctatgtaataatgtgatccccatttgtgtactagtggagctaagcatggctaagcatttcctaaaccaacatctaatcattttgatacccaagttattaatggcatatggtaaacaataaatggctgagtaataggacccatcccatatgacattgtaaaagaatgcgacatttaatagaaatgcgggatatttgtaaattgggtacaatatgatcaattgtaatgcatgacttgcgttgctctcgcactgatgagacctcagcaacgtcttcgagaaaccgcggatcgacgaaacggccgaaatctacgcgacaaacaaagtacacaagcaaaacatgctataagactaatgaaacaggaaacaaaaccatttttaatggattctttgcatttttatgaatttactgagacttgaatggacttaaacggagctcggatgaattacttatgaattttagaagataaaactgtgtttttactaataaagaaaaagtccttaatcaatttattgcgcaataatacccagggctgacgtcagccaaggaggggggcggcgccggcaagtgggccccatgggtcagcggctctaaaagggggggaggtggcgacggcacgcgggccccaccggcagcggctaaaaggggggtccaccagctggtgggccccaccgggcagcggcacaagaggagaggaagggtgcccggttggctcggctcggcttcgaagccgaccggcggccatggcgaccggcggcggcgcgcgagcgccggcaacaacaagcggcggtgcgggaggcggcggcggacggcgcacaggctggcggcggcggccgaaggcgatggcgagcacagagagctgcggcgcgtgcggcacatagggaaggagggaggaggggagtcctcaccagaggaggcggtggcggccggcgacgaccggcgacacggacggcggacgggtggcggcggcacctagagaaggggaggtgaggggttaggagtagggagagcgaccacggcggccaaagtggccggccggagatggatgaaaatggagagctcaccggcgacgcgagggaatcggagctccggcggtgatttgcggcaacgaagcggcggccgaggtgcgggcgggctcggtgagcgcgacggcagcgactgcgcggcgcggtggtggctatagtggcggcggcgcgtggccggagacggcggtaggcggcggcgcaaggggcgagcggcgcggcgaggataggaagcacggaagggcgcagcgagtgcgaaaaacgagagagggggacgcggggagcgatttataggtgcgggagggggcggacgtggccggggaggtggccgatttggccggcgacgtgggggtggagagagagagaatggggggattcaaattcgaatcccgcccctagcgagcgcgcgcgcgggccgggagatgcgggggagagggcggcgacgtggggaggacgcgggagcgacgcggcgtgggcacgggaggagcggaggaggcggcggcgcggcggtttcggcggcagcggttggagctccggctccaacggccggaggtgggagacgaccgacaggtggggcccacctatcggcgtcccagagagaggagggaggggcgcatgggctgacccaacaagaggaaggccgagcgcgggtaggagaaaaagggggggtggactgggccgacggcccaaaaagatggaaaaagaggaaaagaaaagcgaaaaagggaaaaaggggaaaggatttttcctgggatttaaaattgcactttggtgatttttaattggttaaaattatttccaaggctctgaaaatttcactaaaaatcaatcctgttaatgtattgtgacatgtggaactcaaggaaaatcccacattgccaattccaattattaaatgcctttattaattagggatttagctctaggttaattaagacaatttcttcggacgatttatttaacaaatttttaaagcaaggaaaaagggggaaacttcagggcgtgacatccactaccacaagtagctcaactggggtacaagccaaacgtcttctccttcgcaacttgtcttcaactgaggttcgattgattattgcaatgtgggcatatgacatactcagcaagccacacaacaaatatgcaagtgcacaaggataccaaagaatggcataatatatagctcatttgcaaaagcagcatttagcaaaacatttgagaattctaaaacagtagagtaattaatcatcaatattaattaacactgaactgcacacccatgctgcacaggcccaaccatcctgaacaactatacacggctgtacagatctatctctaaaccaggaatgtaccattccaaaccaggagctaaattaattaccatcaattaccacattattattaatgagtagtgtgagactaatcacgaaagacattgttagacccgcccataaccgcgggcacggctattcgaatagttttactctggccagaggtgtaccactgtacccacaagacacaactccataatatgtcaccatatcatcatgtgcccatgctgaacatgtcaccatttgtgtagttgtgacaagacccctcgcatagctcaactcaaagcagcgcacctttcctggatcgtagtcaccccctcaaaaaccaaaggcatagactccccagcgacccccgtgggcttatctccgccacttctcagtctggcacaccacaatgagccttgctatacaaagtgtccagccgttgcctatgctggcttgtgtttggcacggttaatgtttcacaaccgaaactcgtgaaccggtccttaattgtcatgagcacgaccatcaaaatcatgtgctcacaacccaccattatcaagttttagttggcacattaattaattaaccaatcattaagtaatagcaaaacattagttatcattaagtaaatgtgaaacattagttatcccaatagtgtgctaatgtttctaaacatggctaagcaattatatctaatgtatctagttgaaccaatatataaatacaactagtcaaattataccccgaggtaatcaagaaataggataatcaatgtaaattggccataacaaagaaataggttcacaccacccggtgacattcgaaaatagatgtatacttgaaataaatagagaatttaaatataggatcaacatgctcaaaggaattgtgtttgggatctatgtgacttgccttgcaatattcggtcttcaattaatcttcttgaacacttccgacgcactcacgatccttcgaaacgacaagctaacacataaaacaaggaaaaagactaataaaaaccaaataaacaatacatataaagtaaataaacatgtagatcatgattttagatgaattatgagacttgaacggcctcattccgatttcatataaattacttatgaattttataagatttaattccaattaaacctattaaagaaaaaactattccaaattaattaaacaatttacaaatgatttataattaagaaaagattaaagcaacattcagaaaagattaggttatatttagtagatggcatatattaaaaagaaataatatgccactgaaaaaagagaacggatagaagtctcaccgaaccaaagcgatcagagagaaagggtcgacaatgacggtccggctacaacacacggagatgacaacgctagacaaatcacggattagattatgttggattaagaccctagggaaaaacctacaccggtgaacggcataggggcagcggttgccggcgaaccacggcacaataatgcaaacggagggcaccgggaggaagagcacgagacgacggtccttaccaacacttacgcgatgacggacagcgacggaagatggccggcgacgagcttcgaagggcggcgaggtactgtccacggcggcgacgactttccggcgatgtgcggcaacaacggaggggtggccgggcttcacttcgcagctgcgaatccaatggaggcgacggcaaagcttggcgacgacggaaggagcagcagtggcctcgccggagatcaaaatgcggcggcgagcttcgggttgacagtgtcagcggcgctctggcgatcttcggcggaaacggaggacgggacgaggacggcgacgacctcgcgatgctgatgaaggagacggcgaccgacggcgacgaccgaagcgacggctaggggcggctggagcggcgccggcgcttggagagagaagaagagcgcggggagagcgattccgacgacggcggaagatggaacttgaggggataggtagaggacgacgagggggtcctttatataggcacaggagctcgggttcgggcccaaatcgacgggaaaaactcgggaaagtttaggatcttcgccggaaaaaggaaagattgatccgcgaaattggaaaggatttccatagaaattttggggatttcttggggaaaaggaagaggagattgagaggattccattcccacaactaatttggaaaaaggagcaacggagaggccggatttggaaggaggaggcggcggcaactgtgcacgggctggagacagtcggctctgtctaggggttgaagacaacactgtagcgagagggacgaaaagcagacttgtctgcgggctgagaggaagggagagaatgggctgaaaagggcccaagctgaggatgaagattttattacttttccaaataaattaaccaataagatgatctttcgattgttaaaaatacttccaatggtcaaataattccaagaaaaatcttgaacatacttggacaccctaagtatttaaaaacattgaaaccagctcattaatgattaatttaatatgtgaataattactgaaatgttctttgtattattaaaattaataattgagctccgaaaaatccgagaaaatttcagagagtataattaatcatggagaatttaataaaaattaaatccacccatgctttataattaggaaatttgatttcccacatttcacttcacttgtaaattaatgaacatttaatataaattctattaataatttattaaataatttataaatcttgaaacgaaaattcaggctgtgacaaatctaccccccttacaaagaatctcgtcccgagattcggaacggctagaaagaaaagggcataggtaaactgcagtctatcttattccataagtctgataattattctaaggctttaaagaaaactactactgctttgaaactggtggttgagctgtaacacttgaagacgcaacttgcactgcattggctcctgtgacgacaatgttgttgacttgaccttgcggctgctgatgctttggcttcgaacactctcttgcaaagtgacatggcttgtaacagttgaaacatacctgctgctcccttccattccactactattattttcttgagactggttctgctgaactggcactgattgagtagcttgcttgatgttaacttcattgcttgcattagtctctgaattgatctcatcaccgatgttcaactgttgcgactgttcttgagatgttagacttgattcatcaacttgggattgcttgatacactgcctttggctagtaccctgtgcttccttgaaaacaatcagtcttctcttacggttgtccatcctgttcttcttgacttcaagtcaaattgctttgtcaaccagctcttggaaatcagcatagtcatgagaaatcaacgtaattgatagttcatccttcaggccttctaagaacttctcctgcctttccttgtcagtacgcacatcttctggaacataacgtgctagacggttgaactcatgaagatactctgtcacggtacgatccttttgctttaatgtcctgaactcacgcttcttcaaagcaactactcctgtaggtatgtgtgtcttcttgaatccttcagtaaactcttcccaagtgattggttgtccttctgctctgttcatccggaagtgatcccaccattctgaagcaggtctatgcaactgatgtgaagcgaaaacaactttctcctgatctgtgcactggagcaattccaacctcttctcaatagtgtatagccaatcacctacttccactgggttggtggtgctagaaaaggtaggcggcctcacacgaagaaaagtcagctaacttgttctgtggcgttggaggattgtcgttcccttggttgagctggttctgcatctgctgcatcattatgttcattaactgagtctgttgagctagaacttgagcaagagttgggttctcatcattgttattgtttccacttccactagcgcaagtgttcaccatctgctataggtttggagaagatagaaggagaggggtgacactaaagacaagaccttaaccatgttaacattgatctagtgtgtgtaaaccattatattgtttaagttgattaagcaagcaacctaatatagttacacgctcatcattgaactacaccaatgatgggaatgcaaccttacctacacacaagcaagcaacaaacgttctaccctactaactattcttcaaagtcaatttggtggtttaggttctaagctaggatccaaacttcattccatcttgacagctggacactttagttcgaccatcatcttcatgtccctcgatccacttgacttggcctccataagtagaccccatcgacatctttgtcgtcacaggagccaatgtagtgccagttgcatcttcaagtgttacagctcagccaccagtctcaaagcagcagtagttttctttaaagccttagaataattatcatagttatggaataagatagactgcagttgaccaatgcccttttctttctagccgttccgaatctcgggacgagattctttgtaaggggtgagggtgtaacatcccggtctagggcttaataggattactagaatactcatatcaacaaattgcaacttctttttcggaagccgatctctaaagaactctgaggttaagcgtgcttggtctggagcaatttaaggatgggtgaccgaccagaaaattcttcccgagtgcgcatgagtgaggacaaagtgcgtagaaaagacttgtgttggtctgtgaggacagtcttatgacctatgaaagctaccagatgtaagtgggcctagcctgggaaaggcgggtcgttacaaaatggtatcagagctgactctcgcggtttcacgggagtatggttggtgtggaccgggagtggtcatacagcatggcacatgcgctggcactggacacacggacgtggccaagaggggacgttcctggcctggggttgatcgacgggggcgtcctcagattaggttccttctcgcttccgcctcctctccaccccagccgccggccggcgcaccctgccgccgccatggcttctcctccctcctccctcactgccgacgccgtccttgatgacaccatcaaaatcatcgccgatgccgtccgctcctccttcaaggctccctctggtcaggacgacgacaccctgaccaccgccgtcgctggcgacgccaccgatcgtgccgcgaccgtggcccgggcggccctcgcccctgttatcctcggtctccttccgacgactcctccacggtgcctccaccggttcctccgacgaccgcgccttcgacgaccgccatcccgccgccaccggcttccactccggctcccgcggcgcaacttccccccgagatcctggcgcttctcgcccgtctcggcatcaccacgacgccggccgcccccacgcaggacgccgccgcgccaccggcggcgcttgacgccgaagccgttgccaacctccacagcaaagccgtcgccgtcctcaacgtgaaggcgctcgtccccgtcaccctcgacctcgacgccaaaaactactcccgctggcgaggccttttcctcatcgcgcttggaaaatacgccctcaccgatcatgtcttctccgacgtacctcgccccgatcacgccgactggacacagatggactgcatcgtcctcggctggctctacggctccatctcctctactcttatgcaggaggtgctctttcccacggcgacggcacgctccgtctggcgcgacctcgagctgcagttcctcggcaacggcgagcggcgcgccgtcaacctcaccgccgagctccatcatctgcagcagggtgacctctccatcggcgactactgccggtgactcaaggtcctcgccgacaacctcgccgacgtcggtgaacctgtcaaggatcggtctctcatcctcaccctcatcggcggcctcaacgacaaattcgacaacctcaagtccctcttgcctctgcaagtcctgttcccgacgttcgccaaggctcgcgcacagcttctcctcgatgagctgacgaaaggccaccggccgcccgttactgccacggccttcctcgctgcttcctcgaccaccgctcgctcggcgacctccaccaacacctccaacaacaactcccgcaacaacaaccgacgccgtggtcatggctccggtggtggtggcggcgggagcaatggcagcggcggcgcaagtggcggcggcggacaagcacacagcggcggcgcccagggcaaccctggcgcatagactgcaccacgggccaaccaggcctggcccacggcctacaacccatggacagggagaatccacatgtggccgggccaggccggtctaggcctccttggcgtgcggcccaacttcgtcgggacagccttcaccaccacgcccgcgccggcccagcagcaagccttcctcccgccggcctatgcggctctatggtctcaagcaggccccacgggcatggtccagccggtttgccagctttctccttacactcagctttgttgaggcaaaatcagatacatctttgttcatctaccatcgaggatcagacacggtttatttgctcctctatgttgatgacattgttctgacagcctcctctgatgcacttcttcgatggaccatccgtgctctccagtcggagttctcgatgaaggatcttggcagcttgcatcatttcttgggcatctctgtttctcggcagtcctctggccttcatctcagtcaacgccagtactgcctcaaggttctggagcgtgctggcatgacagattgcaagccatgtgctacccctgttgacaccaacgccaagctctctgccgctgatggtgccccagttcatgatcccacgaactatcggagtcttgctggcgccctccagtacctgattttcaccaggccagatatctcttatgctgtccagcaggtctgtcttcacatgcacgatccacgggagcctcatcttgctgctctcaaacgcatcttgcgttatgtccatggcacggttgattatggtcttcacatccgccgctcctccactgttgacttgagtgcatactctgatgctgattgggcaggttgtccggacaccaggaaatccacctcgggttatgctgtgttccttggcgacaacttggtctcctggtcctccaaacgtcagcttattgtatcgcgctccagtgccgaggcagaatatcgtgtcgtggccaacgcggtggtggcttcgacagcttcttcatgagctccatacccctccgagccgatccacattggtttactgtgacaatgttagtgctgtctatctctcttctaacccggtgcaacatcagcgtactaagcatgtggagatcgatctacatttcgttcgcgatcgcgtcgctgccggatctgttcgagtgctacatgtacctactacgtcacagtttgccgacatcttcaccaaagggttgcccagtgccatcttcttggagtttcggtccagtctgaatgtccgttcccacgacgttccgactgcggggggtgttagattgtgtttatcccttgccatccttccttaatcttctccgatattgtttctataaatcggttgctagatatggaaggcatgtgcctatatgtactctaccatatgtgataatccaatctatcgtgttgagcctgtcgtcgatgacggtccagctctcgtcgccaggcttggcaatggcgcgcaccgtgggatcggagaaatcgactgccactactgtggaggcatcctcgacgacaaaaccggcggcgttcacgcgaagacccacgccatgggcgcccaaacgccagctcgctcgtcggcgccactccggtgtcaggagcgctgtcaccggcgggaggtcggtgcggtggcgggtgagcgggttcaggaggtggaggcggaggctgggctcgtggagcagcagcaggaggccctccggcgtgagcgccagcatcgtgtggtcggcgagctccgggatgtcgtccgtgtggatgcacccgccggtggagacgttgaaaaagcggtggcggcggtgggtggcggcggcagtggtgcccttattgtggtgggccttgtcgagcatgatccagtgacgagggaggaagcggctgtctaggccaccatcttgcgggcgcgggtgcagcgaggaggagagccgccacgggcggcacacggcacggaagcggacgtaatcggcgacgtcgttggcgagggtgagctccgcgatcttgccggccggcccgtccccgaggttcgtccagtcccttgtgccagttttgctattgtggttgatagagcttggtagcgagcgcctgggcaccaccaccgccaccgcctgctcattgccgccggctggcgtggggcgggagcgtttcgcctgggttctcgctggttcggtggaggcgcaagctccccgcggcgattgtgacttattgaactggctggctggtcgcttttccatccaccgctgcaatccatcggacaccggcgaattaggggattagacgtagcttctccctttgtgcaggcgaagaagggcgcggtgaggggaggatggatcggcgtcggcgtcggctggagacgtaactctggtatttggtattgccctagtttaggtcacaactttttctttaaacttttaatttatccatcatatcaaatctttcctgcatacataaacttcaaacttttataaacttccaacttttttcttcaaacttttaattttagtcaaacttctaattttaacgttaaactaaacacatagattatcgagtcgagacgagtctttaattaacgtggttattatttattgtcgttgggggtcggactcgcgatgcgcgtcggatcgatcctcggatcgggtggtcagtcgtatccgaggttcgagcaatcaccggcaagttcttttctccccacatgtttcctcccaagagaggctgatgcggcagcggccgttgacggcacatgcagggatccacggcgctgtggatcagggtggtcgatcggatcctgagaggatgcaacgttgggcgttgagacgatgtgttggatctgtggacatgactcttcatcatcaagcctcctgctccgccgccactggacccgaccacgtcgccggtcaaggaaggaagggatgacgacagcggctccttttctccatcttattcatcgaccacagcagcaaagagctgacacggatgtgtatgtgggaaagtttgtttctttgcaaatgtttttcacctacatgtaaaaacatttactaattgaataatcaaaattttaatatttgatcaatgacgtataacggaatacacatacgtcaacttttgaaatagtcatccgatcgatttgtgaggctatagaaacgtgtacacaatgacgcatgcagcgaacacaacctagttcaatactatatataatttctgattttgttttgtctttattttgtttctcttgtttcagtttatcgtttaaattagcagagtttttatcgatcgtaaaaattattttcgcatgttacaacgcacatgcattctactagtaataacaacatgtaatcagatagtttaactgctcatggttcagattaataaatattgatttaatactcaaaagagtggtctttcctatatagtgcgctgcaaattataagtagttattgcaattttattggagaatcagcaggaaaaatcgggcgcctctatcgcgcctccagctcgcgcgctgcaagcctctagctcaggtgccgcccccaccacacaccctagcacacacgccgttgcaatatatcacccacatattttagaaaccatctattaagagaattcgtttcagtttgtttccacaaaaaatgtttcatctagtgtactacaatgtttcactatgtatagatctaatgctgcagtggattgaaacattcttttgcaacaaatcacccacatattatggaaaccgaattcatttcatttttttccacaaaaaatatttcacctagtgtacttataatgtttcattat

SEQ ID NO: 25158 - DNA, 3734 bp, Oryza sativa
tgtgtagtcttgttttaaagatttaattgcaacgaatttaatagtgcaattggatcatgatttggataaataatttaaaataaaaaaatagtttaaaatagttttgcgcgcatacatcttgctgacgtcatgctgacgtcaacatgacgtgggcgcccgattttcccaccccggatcgggcgcctgacgtgtagttgcctcccattttattgcttagagtgatgggtttctttttacaaagacacggagtcatcttttcccctcctcttcatttacattctctaggtcaaatatgaaaaattgcacccttctatttgcctaacaggccacacacaatttccttccaaagcccaaaatgtacggtttccgtcggcctaaactgcgaggttttcatttttccatcttcaagccaattcaattctgtctctcttatctgaagcaaggttttcattttcagttttgctcaaaaattcggccatgtcggtagcatcgaaattcccaaatttttgggattttgaagacttattggatcaaaattatttaaatttttaagacaatttgactagatttgaataaattttgatcaaattcaaagaaaaagaaaagaaaaaacaaaagtttcagctgagataatgacttgcccgaggttaccgaaattgtttttcactgatccaaagtagaatattagcagtaacaaaggaaaacgcttctgccgataaaggctccatttggatattgggttatacctattgggaaaagaaaatgatatgctggtagattgaggtgggagattatatgaaagaaagtcatatcccatgtttggtttgatggatgggaaatggaagtttctagagaaatgaccaaaatacccctccctacaataagtggtataacattcaaatgcagccaacgatcacataatatatacatgcacctcaccatcttcgagagccttcgtcccacgcgaggatctcggtggattgctgccagctgcttacaccaaagagcaccctcagatttgatgctatgagctgtggtagatgaatcaacagattatagaagggtcaaaatggcgagggcaatttggtaatttcacctggcaatattaccctcaatccagcatgattgcatatcccattcccaacctatccaaacaagggaaatatcaaaactggaaataatatccatttcccactctctttatcccattttccaaacacaatcaaagagattgtgtgatacatgctcatcaacacgtgtgcccgttaaagcccttggctaggacaagaatccaacttaaaaatccaccacacatcgtactttccactttatactagtataaaataagggattttgtccgtacagttacatactttgtattttacctacatctaatctcctcattttctgtttttattatccttctctaccaaatttctttcctcataaatattttttttaaattatcattaaggtgtgtctacaacaagtttgttactttgcaaatgctttttatctataggtaaaaaactttcactaattgaataatcaaactttcactcatctatagcaaaatacacatgcgtcaacttatataatagccacccgatcgatttgtgaggctaaggaaatgtgtacataagagatttttcgtgtgatgacacaggaagcgagcacaactgagttaactttgttttgccattgttttgttcatcttttctcggtttgttatttaaattagcagagtttttatgaatcatgaaaattatcttcacatgttgaaacataccaaacatttttgctagtcattttaaaaacagaaatgctacttaccgatataccgtttgggatcggtcccggacaggacaatttcccatggatcaaacacacaccctcacggatcagatacacaccctcgagaagcattgagacacctacagctcccaaggctgcggcggcggcggcggagcctgcttgctgctcctcctcttcagcgacgccggtgcgcacgaggtcagctgtgccaatgagagagagtgacgtaagcatgttgatggcggctgcggcggcggcgtctgcggcggagctggtgcgcatgatacccctttctctcattcctccttgatgaggacatcctccactattacccactggcaaagacgctaaagtcgggcggcgaccgtgtgagcctctgaataatcccaccttgcttagcttgggaggaggaatccaccttaaaagggagagccacccttcccttattagactagtcttttagggagattgggcattttcccgagtgagtgcgcctatgaactgttggggtccgggcaaccttaagttattaggcctcggccaaccccacctgggccggattattatcatttggtatcagagttgggcccttgttaagggggtgggaatgatgaggacattctctactattacccgctagcaaagacgctaaagtcgggcagcgaccgtgtgagcctctgaataatcccaccttgcttagcttgggaggaagaagccaccttaaaagagagagtcacccttcccctattggactagtcttttagggagattgggcctttccccgagtgggtgtgcttatgaactgttggggtccggccagaataatcccaccttgcttagcttgagaggaggaagccaccttaaaagggagagtcacccttcccctattggactagtcttttagggagattgggcctttccccgagtgggtgtgcctatgaactgttggggtccagccaatcttaagttattgggcctcggccaaccccacctgggccggattgttatcactcctttttcatcgatttcctgatttcgattttaacatctcttcatttttgtattttctagggtttgttgaatccccaacctgtggatggggctcgtcatatcacatccaaattgaaatcaaagtaagctaatactctctcttttttctatgcatttttgttcattcactggggatgtttgtaccagaggtgaggggtgtgtgtgtgctgaatcatatgatacttgatatgatacttgcagcaaaatgttcgaattggaatagatcgctaaaaatgcttctagttgtatattgatgggaaggcaaatattgcttggagcaattttgtcgttaacaagtacacactgtcttgaaacagagaaatctccattcaactagtagcttactgcttaggacttttttaggtgaactgaagtgtaaacaaaatcagagaaatccgcatcagtcggttgctggcttctagttccgggtatgctttgcttgtcaattgttatcctttttgtcatagagggcagcgcgtggcgacagagatggcagatgcagctgagtcatagatgcagatgatttggatttttttttcctgttgatgtttgtagatctcagtggctggctgggagttttctgttttaaaatgatttgatactttggttcaatctaagaagaatcaccattgaaatgatattttctttgtcctttcacacatgtgcacagagttgaaatagcattgccacctgcttcaagcgaatccgatttcatgcatgtttcaaagaagaaaaggtgctcttcaaggttgaacaagggctcagcttaacccccacttgacaaatctcacactgctcattcttgtcatccatgcaggactacatgaaagaatatcatagggagctatgcaaaaggttgttgtaccatc

SEQ ID NO: 25159 - DNA, 9721 bp, Oryza sativa
ggtagaccttttctgtggactaaatatagtttgagtacgttgtacacaatgaaactgagttcagtatcatatgaaacctaaggaaatgatactgaggaggatcatgatacctcccagggttcacatgatcctactcaagtatcatatgtgaaacccataggaaaccactttacaaggcatgatactggataggatcatgtgatacttcacaggtatcaatcataatgaaacacgattctcctcaaagtttcattatgtatgatacttgtaaagtatcacatgatcctacctacccaggtatcatgatcgacgattttcctaggtaggatcatgtgtgatacttcacaagtatcacaccatcctactaaagtatcatctctgaaacctcacaaggatcatgttaccagagatgatacccaagtagaatcatgtgtgatacctgtaaagtatcacatcatcctactaagtatcatctgtgaaacccatagggattatgttagaaaacatgatacctaagtgggatcatgtgtgatacctcacatgtatcacacatgatacctaagtaggatcatgttagaagacatgatatctaagtaggatcatgtgtgatacctcacatgtattacacttaatgatactttttttattaggatcatatgtgatacctgtaaagtatcacaccattaagtagcattcgtgaaactcatagggatcatgttagaagacatgatacctaagtaggatcatgttagaagacatgatccctaagtaggatacatgatacccaagtaggattatgttagaagacaagatccctaagtaggatcatgtgtgatacctcacatgtatcacacttaatgatactttttgagtaggatcatgtgtgatacctgtaaagtatcacaccattaagtaccatctgtgaaacccatagggatcatgttagaagacatgatacctaagtaggatcatatgtgatacctcacatgtatcacttaatgatacttttttgaggagaaccatgtgatgctacaaagatatcacatgatcctacaagagtaccatgtgatcctcaagagtatcatgtgatcctactagcgtatcacatgatcctaacagagtatcatctgtgaaaaccacatgaatcatgtgctacttgtgtgaaaatttttagcaatcacataacaaattgtgtgtgaaaaactacctccaccaacagccaggacactcagtgtacatcttttgatcatttttctaatacaaaagttcaacgatagtatgcaaacacacaagcaatcttttgacaaatattggagattaagcagtccttttatgtacattccatcaatttttgtaccacacagggacaagtcatgcataccatctgttctatccacttccatatcatctgggtcacatctagctctttttttttcgccgggccagccaagataggccaactaaatttatacttacgattgaagaatatatacaaatatacaaagttttaacttcaactagaagccgtcaaagtaatggaagttgtcaccggagcaacctctctcctatatttctgaaaaccccagcttccttccaaatcgccacctcctctttgattgaaccaaacaggaaaccggctgagcgccgctggttctgaaacacacgcgcatttctttccttccaaaccatccaacaaataagcagcacaaggctatcaatggcatccatgtagttgttccgaaatttttgccgcatcgctaaccaccattcgcccaagtccaagcctgactcatatggcagcaggaagccaaccccaatccagcccttgatcattctccacaccctggtcgtgtaggtgcaagacacaaataggtgttcataatcttcatcaaccaccaagcaaagttggcaaacctgctggttcggccagccacgcttacttagattatccgccgtgaggcatcgccctttttcggccaaccacataaataatttcacctttgacggcgctcttgtttaccaaatcagagtaccacatcgcgccaccgtgtttgccatgaagaacatgctgtaggccgagtagggagtgtatttttcatttggtgcccacttccagattgtctcatcttcctccccatcttgaagttgcaccccctagaccacgtcccaaatctgaaagtattccccaattgcacgattggagggtgcccccttgatgtctcgtacccacctatggttcagaagccctcatgccaccgtcaagcccgagcgctcgacgtggctgaagatcaaggggaatctcaactttatgctcctcaccagcaaccagtccgccagccaaaatttggtgttcttcccatcacccaacacttgtctcgttcctgcgaggtagaggtcttgcaagtctttcgactgatctattggaactgttgttcacggtgtcgacgttttatgtcgcgattccggtatttgcatagtatgggaatcgttggtactaggatatatgcgagattgaagtaaaagagatggggacgaggatttttatataggttcaggccccttatcttacaggtaatagccctacatcccattggccgaagccggtgttgctctttattcatctggatcacacaagtacaatatttggagtagcctatctaactgttgtcgacttggcggtctgaagtgctgacttgtagtcgacaacagggtagccttcctcctcgaatccgcatccggcgagatcaaagacagcgctatatctctcctgataatatccgtagataccgtaagggactagccatgcttatctctgaattcgatatccggcgtcttgtcttgcatgttggcttttatgttgatcttgtgtcttgatctattgttccgtgtcccctctcctcctagggggccctgtatttatacccataggtgtccccttgtctaagtagaactagggaaaccaatatggatacaatccaagtagtccttgtcgtttccatgtagaactctattcatcattccttatgcggaattcctcctatatccgaaggttgttttcgtataagacatggtatgtggtgggtcctgccgagatttagtcaactactattaggtatatggtatccataaccttgacacacggcctgtcctgttgttccccctttttgccaaccacttgagacgaagtccttgccgaaataattgatgttcttgattcccagcccgccattttcatgtggcatgcagaccgctttccaggcaaccaagcagtgtccgccattcacctcttcctgcccttttcatagaaatccccggcacttcctatttatttctttgattgcccactgtgggagctcaagtacagacatgtaatgcactggcaaagcaagtaggactgtcttgatcaaggtcagccggtcaccggcggagagaaactttggcttccacccggcgaatttcttgacaaaccggtcaaggagcggttggacatcgtgcttcgtaagctttcagagggggagcgggagcccgaggtaggtgattgggaacagctcgactctgcaacacaggatcgactggactagctctgattgctcttctgaacattggatcatggtgactgcactctttaacatctagctctaacaagggcctcctttaacatctctatttcagcacttaactcatccaacactaacttatctactattgttgtcacaactgactcgctagctacagacacactagcagaaagtgcacacaaaggagattcactcgagggggcatcacttttttttattctcctgggcatcaaaagaaatcacacaaaatagcaacaaaacatcaaaacacatacattgcatgcataaaatagagataacagagaactggctttagaattcttacgcgggctgatgttgagcttgcagcgcatagctggagcagaatcggtcgaggaggtaggagcagagcaccggattgcagaggaaatcggtagacggcgtgtgcgccggcgaaatcaacaaaggaggcgcgcgattccgaggatcaatcttggggatgcggaggagctcgcgccggcgaggaatcgtgcgcggaggcgcgcgatttcgaggaggattcgtcgggttgccgaggagctcgccttgcgccggcgaggaatcgcatgccttgctgaggagctcgcgccggcgattccgaggaggattcggtgggatgtgttcaggtggcgcggcgagcactggtacgatacgattctttctgtttttgttgacgcgcgcggtgacgataccgtgttggttttagaatcatcctgtttttcaacgggataccggtatatagcagctttttttaaaaaacgtgcccgtgtaagaggaggaaagggtagattgaagccgtttgtaatccggatcggactcgtgtagtcgtattgcaagacgcaatcacgaccgttggccacagatcgggcggtcaggacaccactcgccacacgttctcctcctcacccgcagcggcccgtacccttcccaaggagaggcggcggcagcggcggcggaggtggcggcggccgtatgcgggagagagaaagagctcagctcgcatggccatcgcggtgaggtcggctgcggcggtggcgaggcactccctgcgccctccgctggccgcgcccggcagcatccgcggcgcctcgctcctgccgccgcagcgcgctcgcggcgtgggcccgtgtcgcgcccgcgctcgcgcggcgagctcctccgcgactggaggtggcgggcaccttcctccgctgttcaggtgagcggggagcggaattattccgtgttttaggcaatggagacgggcggggatggcggtgctgctcatggatagctgattgatttcgtggttttccccctcttctcctgcagcgtggcgccgatgatggactggacggacaaccactaccggacgctcgcgcggctgatctcgaagcacgcgtggctctacacggagatggtggtcgcggagaccatcgtgcatcagaaagataacttggtgagctatatgcccttccgcccttcacttcttcatgattaaaaccgggtgaaacgtagatgagagaaatgcaaatccttgctacggaggaggaaaccctgcaactgatcagcagtgaagcaacctgtggttttaccacgattctgaattactgtgcgatgtgaatctggtagtgatttgattggagtcagcagcaaactgaattcgtttacgattggcccactttcattcatgtcaataacaatgccacaggtgttccatgaaaaactttcccgtgcgcattgcataagttttccattctcttcaagctatatctggtgactctttaagtacactcatcagagtcttatagtataatgttcatcttaatagttccattagcccatggtgcgctttcatatatcacaacttggaacctaatcatacagcggcattccactgattccttttgtcagatatagttcatctcctctgctgtctcaatctaggcatatgcgaaggatatccattgttttagctaatcagctctttttttcacataaatattgcagtttaatgaaaaaaagaatcaacttactgccttatcgggataaccagcaatgtattgcccacatgttttttcttttgtatgttatcaagttgcgatgagctttcttggcggcactggcagcttaatatgggggaaccacttcaactcaacttggcaccatcagtgctggcttgttttgtatatttgtcactatgtcttcaatcattgtttcttaaattctacttttggtgcaatgaaggcaactgtgaaacgtgtctacgacatatggttcacattatgtgcacatgacactgctacacagaattgataaatcttattcttttgtcgtcacaatatgcaggatagatttttagcgtttcctgctgaacagcatcctattgtgttgcaaattggtggaagtaatctggataacttagcgaaggcaactgaactggcaaatgcttattcgtacgatgagatcaacctaaagtaaaaaagcgtcactcaatctcatctaatcatgtatgacatttcttttattacatataatttactccaaacgttttgtatcagctgtggctgccccagtggcaaagttgctggtcatggttgcttcggtgctcgcttaatgtttgatccagaggtttgctttatgaattcattgcagtaaaccatcaggtagcatcaatttgttctttctccacccttagtaaatattgattcaattatctgaagtttgtaggggatgctatgtcagctattgctgccaattgtaatgtcccagtcagcgttaagtgcagaattggtgttgatgatcgtgactcctacgaagaactttgtgagctttcttcagagacctctcatgttcctttaaatttccttaggcttcccagatatgagccatggaaatcatgtcaaataagtacactctatcagatgcacttttacaccgaaaaggatcaatcaacaatgggttgcggcatgctttaatgtctcatattatcaaaatatgttaacctataccataagctaaatataagtaaatcacttgctggtgttatctggttgttttacaagaaccaggttacctagctgtagttgttattggttactggtcagtgtatttgtactcttctggcggtggttgtgcccttaaggtcaaattgaagaaagaaaaaaacagtagtatctcttgtgcatagtgatgctggacggttaaaatcttggattagtattaactgacccctaaaatgtaccactggtgcaattactccttacatttcaagttttcaacagcatcagagcataaaaaaaatctcatatcttctcaaatcaaaagaatagttgaaagcttctaacatcagtggagagtctctagttctctgcatatatttatcatgacttattccaaattaatctactgtatgtaaatctgcttgtagatgaaatggtggcatgatgacatttactgcagtttatctttttttagggccaaaaataatcacccatggctgtttggctaaatttgaaaaattcccctttccccctgagttggctgaggattatcttcaaagcattggactcctattaaattgcaatgtttaactatggttgccagttaattggtgatgtatatatttgacatgtgatcaacctttttgtatgataacaacatccttttacatttatttagagattatcccttctgcacacatcaagctgaaataattaggtaactgaataatgggaaatcaagtctaagaataagttgctcaatttaattgttttcttcttgttatgatatatggatatggcccatttctttttaacatgtcacacgacatagttccttttgttaggaatttgtaacatatcttttttttatttatattacccagttcaaattctatgtcatgctgtaggtgcatacttttaatgattctcattcatgttactctagataaatttttcatatgatgtttaattagttcttgtattgcatggtatttaattatcataggagtattgtttgagggttaatttaacctcatgtgctgatacagtgccatattgcaacaaactacgtatctttctcactgttaggtacattgactttttttttctttcccaggtgaatttgtagataaggttgtttcaaaatcaccaactaggcatttcattattcatgcccggaaggcattgctaagtggcctcagtcctgcagaaaatcggaacgttcctcctttaaagtatgtcacgcccatgattttctttgtgtaaaatattattcaaatttgatggataagtcttcgtggtccttggtcgtgattcttctttttgcttttgggtagtttcaccttttcaggacagcatctacttctttagcgtatttttcagttgctaggacagctgcggttagtaggacagcagcagttagcatctcctttatgcctcctttatgctttattcagtttggatgccctctaggacagcatcccattcaaatttcgaattttagactaggagggtgcagcaataggctagcagccagctatggctatatatatatgtatccaacctccctcgggtaggtatggctttgtgttttgtgaatgaagaaaaccagaaaattgccccatctcgagtgccatcctcttctcaatgagagtaaccattgaagttctaacatctggtatcaaagccacactttcctgtaggctaaacatctcttgttccaccccttcccaagctcggttgagctctcagctagcagcagcagcagcagcaacaccggctgctcctccttcccctttcccttccccctctccacgcagcagccccccggaggtgtgccatgtccgacgttcggtctcggcgttcggtcgcctcgagcactcggcgtcagcaggacaccgagctcgccgcagcagaagagcgcaggcgagcaacggctcagaccgctgcagcagcagcgagggcggccagactggcggcagcggagttggcagcagccaggtcggaggcggaagcagaggcggcggaagatgcggcacgtgcggcggaggtagaggttgagaccttgcgcagcagcatcaacggctccatcgccggcgacatcaccgccgacagggagcttgaggagctggcaagaggaagggcacgggaacgggcagagcggcggcggcggcccaagggaccgcgcacccgccgacgggaacccagatgggcgcgggcgtgccggcggcagcccggagcccgcgcgcggccctcgcaggcagcgcggctctccctcccctgaccggtgccatggtcaccacggcgtccagacggtggtaagggactttggtctcggcggtgggtggcctaccctcaccaaaaccaactacatcgagcgggccgcggtgatgagggtgaggctccaggtgcggcacatgtgggaggcagtccggtacggcgacgttgactacgatgaggatcggcgggcactggatgccctcatcgctgcagtcccgctcgagatgcagttctcgctttcccataagtggactgccaaggaggcctgggatgccatcgctgtggcacgtatcggcagcgaccgcgcccgcaagtccacactgcaggcactccgcaaggagtgggagaacctggccttcaagccaggtgaggatgttgatgactttgccctccgtctcaacactcttttgcagaagatggtgcagtacggcgacgacacctacgacgaggagagagctgtcgagaagctctttcgttgcgtcccagagaagtacaggcagatcgctcgctcgatcgagtctctgctggacctctccacgatgtcgatcgaggaggcgttaggtcgcctcaaggtcgtggacggcgatgagccacagcctctctcggggcctatcaccattggcgggaagctccatctcactcgggagcagtgggaggccagccagggtgacgggaggaagggggagtcctctccctcgacaggcggccgcaagccgtgcaaggcgcgcggaggcgtccaactgcggtgggcgcgaagacgcgccgagggtggtgctcgcagaggcgcccagggcggcgccgccggcaaccacaagccggcacgagacgacgcttgccgcaactgtggcaagcttggccattggg

SEQ ID NO: 25160 - DNA, 2035 bp, Oryza sativa
caacagctccagcaacgacaaggctgatgggtggtacctggacaccggcgccacccatcacatgactggccggcgggagttcttcaccgagcttgactctagcgtccgaggctccatcaagtttggggatgcctccggcatggagatcaagggcgtcggctccgtcaccttcaccgcaaagtccggtgagcacaggctgctcaccggagtctactacatccccgtgttgaggaactctatcatcagcgtgggacagctggatgagaacggctcacgcgtgttggtcgagcacggagtcatgacgatttgggatcgccgccgtcgccttcttgccaaggtaaccagaggcactaatcgactctacatcctcagcgcgcaggtcgcacaaccagtttgcctcgccgctcgtcgggacgacgaggcgtggcagtggcacgagcgtttcgggcacctccactttgaggccctaaagtggctcagcgccaaggagatggtgcgaggcctgccgtgccttgaccacgtggagcagctctgcgacgtctgcgtcctaacgaagcagaggcggctcccctttccccagcagacgagtttccgagccaaggagcagctcgagctcgtgcacggggacttgtgtggcccagtgacaccggccacaccaggaggacgacgttacttcctgctgctcgtcgacgacctctcccgctacatgtgggtgatggtcctcggcagcaaggcagaggctgcggacgccatccggcgcgcgcaggctgctgcagaggtggagtgcggccgcaagctgcgcgtgctgcgcaccgacaacggcggcgaattcacggcggctgaatttgcgtcgtactgcgctgatgagggcattcagcgccagtacaccgcgccgtacagcccgcaacagaacggtgtcaagcggcgcaaccagacggttgtagggatggctcgggctctcctcaagcagagggggatgccggccatattctggggagaggtggtggtgacggccgtctacatcctcaaccgctcgcctacgaaggccctcgatggcaggacaccgtacgaggcttggcatgagcgcaagccgggggtctcccacctgcgggtcttcggctgccttgcgttcgtcaaggagcttggccacatcggcaagctcgacgacaggagcaccccaggggtgttcatcggctacgcggagggctcgaaggcctatcgcatcctcaactcggagacacagcgtgtgcgcacagcgcgcgatgtagtgttcgacgaagggcgagggtgggtatgggacaaggcggtggacgatggttcgactccgaagtacgacgacttcaccgtcgagtacgtccacttcgagggagctgggggagtaggcaactcttcttcaccgagcgtgtctaccccagtccccgagcctccaccgactccgacaccaacacactctcgggccacgacttcgactacgacgagctcctcgcctacaccaccacagccggtgaccccacgcgctccagcaccaacagccactcctccgagcacgtctactccgacgccagctagtgttgagcgcaacccggtggagttcgctactccgctctcccacgacggggagcgcatcgacgcgtaccacgacggcgagcagctacggtaccgtacgatggaggatcttctcggcgaccagccggtgccgggactggtgcctcccgacctggaggcgcagttgcaccttgcgtgcgacgacggtgagcctcggtctttcgcagaggccgagaaacacgtggcatggcgtgccgcgatgcagtcggagatggacgcagttcaggagaaccgcacctgggagcttgctgaccttcctcgtggtcaccgcgcgatcacccttaagtgggtgttcaagctgaagagggatgaagccggagccatcgtcaagcacaaggctcgcttggtggcacgcggtttcgtgcagcaggaggggatcgactacgacgatgccttcgctcccgtggcacggatggagtccgtgcgactc

SEQ ID NO: 25161 - DNA, 4665 bp, Oryza sativa
taggctcaccgattgcaacccagctctcactccaatggaggagagactgaagctgagccgtgatagcacgacggaggaagtggatgctacacagtaccggcgtcttgtgggaagccttcgctacctcacccacacggctggacttggccttctccgtcggctacgtcagtcggttcatgcaacgaccgacaatggagcactagcaggctgtgaagaggatcatccgctacgttgcggggactctcgaccacggtctctactacccgaggtgtcctggcaaggcacacttcgtcgagtacagcaacagcaaccacgccggtgacatcgacaccagcaagagcacgagcgggattctcttcttcctcggcgagtgcctcgttagctggcagtcagtcaagcagcaggtggtggccctgtccagctgcgaggccgagtacatggcggcctccgccgcttcgacccaggcgctctggcttgctcgactgcttagtgatctcctcggcagagatactggagcggtggagctcagggtggatagcaagtccgctctggccctggcaaagaaccccgtttttcacgaatggagcaagcacatctgggtgaggtaccacttcatccgaagctacttggaggaagggagcatcaaggcgagctacatcaacaccaaggaccagcttgcggacctgctcaccaagcctcttgggaggattaagttcctcgagctctgcttcaggatcgggatggctcaacttccccacaagacgacgcacaagacttagagggagaatgatggataagtctttgtggtccttggtgatggaataagccttgtggtttttggtccttgtggtccctctcttgcttttaggttgtttttcccttttaggacagtatcctttcagttttgcttttagcatctttcggttttgcttttagcatctctaggacagcatctaggaccatcacctttctgctttattcagtttggatgctctctaggacagcatcacgttcaaattttagactagtgtgggcagcaattagcttgcagccatccagccagctatggctatatatatgtattcaacctctctcgggaaggtatggcttttgtgttttgtgaatgaagaaaccagaaaattgccccatctcgagtgccatcctcttctcaatgagagtaaccattgaaattctaacatctggtatcagagccacactttcctgtaggctaaatatctcctgctccactgcttcccaagctcggttgagctcttagccagcagcagcagcaccggctgctcctccttccccttctccttccccttctccacgcagcagcctcccggaggcgcgccatgtccgacgttcggtctcggcgttcggtcgcctcgagcactcggcgtcagcaggatgccgagcttgccgcagcagaagagcgcaggcgagcaacggctcagaccgctacagcagcagcgagggcggccagactggcggcagcggagttggcagcagtcagggcggaggtggaggcggaggcggcggaagatgcggcacgtgcggcggaggtagaggttgagaccttgcgcagcagcatcaacggctccattgccggcgacatcaccgccgacagggagcttgaggagctggcaagaggaggggcacgggagcgggcagagcggtgggcagcagcccacctccacggcggtggcggcgacccaagggaccgcgcgctcgccgacgggaacccagacgggcgcgggcgtgccggcggcagcccggagcccgcgcgcggccctcgcaggcagcgcggctctccctcccctgaccggcgtcatggtcaccatggcgtccagacggtggtcagggactttggtcccggcggtgggtggcctaccctcaccaaaaccaactacatcgagtgggccgcggtgatgagggtgaggctgcaggtgtggcacatgtgggaggcagtccggtacggcgacgtcgactacaacgaggatggcaaagaaccccgtcttccacgaacggagcaagcacatccgggtgaggtaccacttcatccgaagctacttggaggaagggagcatcaaggcgagctacatcaacaccaaggaccagcttgcggacttgctcaccaagcctcttgggaggatcaagttcctcgagctctgctccaggatcgggatgacccaactttcccacaagacgacgcacaagacttagggggagaatgatggaataagcctcgtggtctttggtccttgtggtccctctcttgcttttaggttgtttttcccttttaggacagcatcctttcagttttgcttttagcatatttcggttttgcttttagcatctctaggacagcatctaggaccatcacctttatgctttattcagtttggatgctctctaggacagcatcgcgttcaaattttagactagtgtgggcagcaattagcttgcagccatccagccagctatggctatatatatatgtatccaacctccctcgggaaggtatggcttttgtgttttgtgaatgaagaaaaccagaaaattgccccatctcgagtgccatcctcttctcaatgagagtaaccattgaaattctaacacttggtcgtgattcttctttttgcttttgggtagtttcaccttttcaggacagcatctactcctttagcatatttttcagttgctaggacagctgcggttagtaggacaacagcagttagcatctcctttatgcctcctttatgctttattcagtttggatgccctctaggacagcatcccattcaaatttcgaattttagactaggagggtgcagcaataggctagcagcgagctatggctatatatatatgtatccaacctccctcgggtaggtatggctttgtgttttgtgaatgaagaaaaccagaaaattgcctcatctcgggtgctatcctcttctcaatgagagtaaccattgaagttctaacaaaatttatggagtggcgccaaaaaaaatctctaaagaggataaccatttccataaacaagaatatgcattaagtagagtttcaactttcaattgttaactttgggtaagattccaaatgatgtagatactacgtgtagagcatgaggggcacaaacacaatcctatagtccaaattgcttcctaatctgttgaattaaatttaaggtctgcagaacagattttatttcctggttatcaccagtaactgactagttctcatctgaattttcatccccggcctcaacattttttttgcagatatgaatactactttgctttattgcgggacttcccagatgtgcagtttactctaaatggaggtataactactattgatcaagtgagtatcttactctagttatgtagttttgataatgcaattcctggaagttgctattttaatgaacaaattgcgtagcgagtccatcagttcaaattaggtcaaactgatgttaatgatacaattttccttggcaataaaaaaacaattttgtttcatgaatgcaaaaagaatatatttgttctctctgtacttagtactagacattcatgcagagaagtagctcttgttgcaatcagatataatatgcctgagtcaagtcatttttattgaacatcagttatattcatttgcaggtcactgcatccataagacaaggtgcacatcgagttatggttggccgggctgcatataataagtatggtcataattagaagcctttgtgtctctaaattctttgatgctttcaaacatgcaaactaagtaactagaatatgtttccttttgttgctgaaaacctgaaacagtatttagttgtaattttaattttggtatggaataaatgttcagtccatggaacatgctggggcatgtggacagtgaagtctatgggatgccgacaagacgctcttctcgtcgccaggtttagcatcaaaggatggttttgttttcagctatcaactatttcttttataagtattaactgaactccttgttttagatccttgagagctaccaggtttatggtgattcaataatgggccaatatggccccagcagaccaaacgtgagacaacttgtcaaggtgtgggttgcacttacatttaatgaaaacaacctattgttagctttatgatgtgatgtagcagggcatttatgtacttgtttcaccttataatgtaattatctgtgacgtatgcaccattgtgttgatcatagctttctgaattactcaagaactgttacttttgtttgcgtatagatagggattctactttatgcctaaaagcctaagatatgagttataaaagataattatagcacactaaatagaaaatagagttcattgaagaaaaggaaatgcactgatcaaacagtttcatctgtttctcctggtattctgagctgcttaattgtggtctaacagttgcgagttctgcattctgtgtattgatctggaaactagatttaatgcaattactatattgacctttatcagtccttttgtaaaatttatgagcttatgcaaatatgtgctttcagttactgagaaaatcgcttgattttgacagccattgttaaatttattccactcggaacctggcaatggcctttggaaacgcaaggctgact

SEQ ID NO: 25162 - DNA, 22753 bp, Oryza sativa
atctcttacgatccaggaatggatcagtcagaacatcaccaccggctcgcctcgaccgccgccgactggtgtttccgcctgcacggctggcctattatgccgccgttgttgggcgtctacgtcttcaccgaccggcttgccttcgccgccgccgactggtgtcctcgcctgcacggctggcctattatgccgccgttgttgggcgcctacgtcttcaccgaccggcttgccttcgtcgccgccgaccgatgtcctcgcctgcacggctggcctttatgccgccgttgttgggcgtctacgtcttcaccgaccggcttgccttcgccgccgccgactggtgtttccgcctgcacggctggcctattatgccgccgttgttgggcgtctacgtcttcaccgaccggcttgccttcgtcgccgccgactggtgtccccgcctgcacggctggcctttatgccgccgttgttgggcgtctacgtcttcaccgaccggcttgccttcgccgccgccgactggtgtttccgcttgcacgttggcctattatgccgccgttgttgggcgtctacgtcttcaccgaccggcttcccttcgtcgctaccgattggtgcttccgcctgcacggcagacttattatgctgccgttgttgggcgtctacgtcttcaccgaccggccgccgcatccgccgctgactggtgtcaccgcctgcacggctggcctgttataacgccaactgatgctaccttcttcacggctggctacatcgctgtcactactaataggcatcagtatcgtcaacacaagctgcctacgtttgccatggctgccgactggtttcttcacttccatggctgcatgattctgccagtgttgattggccttatcttcttcaccgccggtcgtctcgtctgctgctgactagtgccctcacctctacgtctggtttatacagttaaacctactgatggacatcatcgtcttccgttgccgactggttatgccgccgccgactagtgcttttatcttcacaactgcgcgtcttcgctaccagtttgcttctgttgccgccgactcgtgttcacttcatcacggcgatgcaactttattgctgctacttcatcatggtggagcgacttcatctttattatcttcggcactggcaaactctattgctgctacttcgcaagttttactacttcaccaaccacgacgtctttgtgaacctcgacatttcggcatgcaatgccatgatattttactacaacaagtgactctccaatattcaggatttctacttggacaccttcaacacatatcttcaatcaagcaatgactactcgacgacaagaagctataattctcgactctatgttcagttgtttcccaactaaccaaagagtcgggggctacacaaatataaggctcaaaatttgacaaattttatgtcaagctgaagaaatcaattaatcagccaatgagtcaactccaggagtcattatcttcatctttgcttcggaacagacattctacttcaacaacttcaaatatttcggtttgaacgagttggacaacaacatcaactctcctccaagtgaagcatctacaacagctataacattaatttgatggattattgtcactgacatcatcaccagcacctctgcttcatcgaccctgacatctccgctgttgctaatggatgattatgttttcgccgacttattatttcaccttcacggttgacctactatgcaaatgctaatgagcgtctttgtcattatcattggttgctacactgctattggctggatcaccgacatcgtcttcttcatcatgtcggttgcgtttgtcgtcgtcaactattttcttcatcttcatgattggtggattttgtcatcacctttgatctacctcgtctgtcaccgactgattattttgctgccatggctacacaattttatcgctgggttccttcatcttcattgttagttgatctgtctgccgccgactggtttcttcgcctccatggctatgcgacttcattactttagattggtatcactatcttcactaccaccagtattgttaccacctctggtgggcaatattatctctatattggtcgtcttgtctatatgccaactgcgtcagctaccatcaatggacgattgtgactacgacagaaggacaagctatatgctcaggggctcatcaactcaagcgtgagaattatatctccaatttggacttgttccggatacattccacatggattcatagtcatgagtctattttctatgctcaaagactggaccaattattattccccgtaagggctatcaaccgaatacttgcgccagtcgggattcaattattatatttattttggagaatcccataagggataatcattcagatcataagctattcatatgagctacacttggtctatattacccggaagatttattactcgggagcatgttacacgcgtcatcctttaaagggtgtcgaaggcatattttttggcctaggcctaatatgtctgcagcccatattttcaggtgtggcctgtcacgttcttttagggacttaggcacattttgcttaggccaaagtgcgcgtgatcaagtgcccaataccttaaaatccttttataccgcagttactcaactttttaggagttggtacgatgcatcttaaaaggtgtcaaacagtaaagctttatatagctggcccgctgacttttttatatataagtcaaggtgctgtttgggtttttaagcaattgattagatacaatatcattgcttttcgccacgtaagtgtgtatttttattgaccaatattatggcttaggctgattatatattgtggtcatttttcaggcggttggtaaatcctttatgagtttatttacttggattttataccacatatgccatatatttccgggtgtggtgaaaccatgtgtcttttagggacttaagcacatctgttaaagcggtgtgcgcatggcgtatgcccaatactttggaaatttctttattcacaatatataagcttctttatagctgttttgctatgtgaattttcaatgatgtaaccaactttaggttacactcatcatattttacaaagcagtcggtatatcactcggatcatgttattcagggattcacaccgcatatgctacatattaatatcaggtcgcttggttgactataattattaaaaccactcggttggttggattatttattccttgactatatgcttggtttgttcaattaaccatatagtcgggggctacacctattaggtgcatctagtcgatgcacctgactttatttttcagccctccacagtcttcatatttggtaaaagtacttcggagaccatggcgaagatgattgaagcactcagctttggagtaatctagttcgagagaagattatcttttcgactgtgaaggtctcaggggctactgtggagattatgggtaccccatacccacatggcacagttatccgactggctataggggataacttatatctatggaatatgtaacagattatgacttgggtattacgtttccttgtatattatggaacggcctaaagtcctggtttgataagattgtaaagtagacttaggaaaccgataccgtattggttaaggtttctatcttgtaaccctgccccccaacctatataaggagggcagggagccccctctaggggcatgagacaacctgatcgtcagatctatactacacccggcggattcaaatccccaaacaggagtagggtattacctctcattgagagggcctgaacctgtctaaatcctttgtctccgcatccatccacttttaggtctcgtgcgctacccccttttattattgccgaaatcatgtttcgacaaccaagaagcccaaagagcgacaaggcccaagaaggtcgttcgccattcgtaggctagcccaagaagcccatcaagggggcccatagttagaatggacattatatgccatcactaatgtccctatcataaggatatacatgtaaattcccctgtacacattaaaccctagagggtatgagactatactaagactataaatagcccctaggggcatgtaatggggtgatccgaaaaaattccatcaattaatacattgtttaacttttcaaccattccactaagtgaaccacgtctttcgacgtgaagcagttgtctcttcaacaacagctggcgccgttcgtggggaacccaggacgaagctactgatgtcaccgaagaaaatggtgaaataaagagttgcgcctaggagaaaaggagggtcaaggcaaagcggaaatggccggcaaaggagtagagcttcatgttggcgaaggggacggagagcagcctttgggcggagcaggccaagtcgtcacgccttcggatcaagcgacggcttcgactatccaagccgcgaccaaagtatcaactttgaccatccaagctacaacccgaacgacggcttcaacgaagcacgcttcgacacaagcagcgtcgaaggcggcggagataagggggcggaggcggcgccctcctccctctttcgcatggctcgtcggcatcttgacgggtaacgggggaggcggagcttgacctcggcggcctgaactcggggatctcggggaggtcactaccgctgctctcttggtcaagttggggaagccgccgccaatgtcacccttttggggagctcaggaaggctgccaccaccactccaccgctctcctcgccgagctcaggatgggtgccggtgaactcaagtgtggaggtcgatgggaactaaggagagaggggtcagagaagaaggatcggacaagaaagagaaagaagagaggggatacgagatggaggtagaagaagagtattatgctttgacatgtggccctatatcttttgtatatttttgtttattgattggaccaccacacatcagcgccacgttggcgaaaccaaactaaaaaccactcaagggggtaaactaggtgtgtttggttcccgatcaaggttggatgagatatggcggtccatattttgctggatatggcgatccggtttttatttggtagagtgaatatgacgatccagttttttatttggttgtaaggatgaaggtggatttggtgatacattttttttgtttggttgggggagtaggatggatgagtggttgtaatcaccctttcattagaggtggtgagtatacccccttcaaattcaccaaacccaaacaaattatcaatctactacaaacaaaaaaatctaaatagaaataaaaagtcagaaagaaataaaaggggaaggagaaaaacgaaaaaaagaaaaaaagatcatcttcaccgaccgctgttgcgcctcatctcctgtccgtcagcaaccgttgcgcctcatctcccgctcgccggccgccgccccaccttctttctcgctggtcgccgccccgtctacaaatcgtcgtctcggtcgtcgtcgtcgtcctagtgtggcagtggcagacctcttcctgctgcgtcacctccgggctcgccgccgtcccctcttctcgttgccaccacctcgagcactcgagcccgccgccaccctttctttctgtcgccgcactcgtatcccgcgttggccaccgagctcgcatcccactgcccccctcgcgttgtcgtcgttgttctcgcatggtgagagggctgacgcgacccacctcatcactcgccccgctcgcccgagcactcgggcggctccatccagccaaatcggccggattcctccatcctatctggagggaatattcccctccaggccgccatatcccactctcgcccacaaaccaaacacccacaaaaaatgggccgccatgtcctatccacccaaatccctccatccaaacacaccctaaatggtattgaaaattcgggggtgttaaatacccggttttaaacttcaggtgtgtctcttatacaaaacgaatagttcgggggtgtaaaatggacttatccctaaaaaaacaatggaaagctgcactccaagtattcaattgtaatggtactagtagaaaattttgggcagtctatcgatgtgttcaattacagaataaattcttatacttatctcgggaacatatgttatgcacacatgtttcccatgcacaccaactagcaaatgtcacacaaaattttagaaaaaagttggatatatacttccaatagtattacaccttcctgtgaaatcttatcttcaaattcattatattttatccgtatctgacagattttctcccttaaaactttcacattttttgtttttttgttacagctaaaatataatgaatttgaatatgagacttttcgtatatgtgcaatactattaatagtaaatgtccaaattttatagaatttccatgaaatttgctaattgatatgcattgtacacggaaaatccgtacataaaatatgttttcacttatctctccactatccaatgtagctaggatggtggagtggcaaatagtaaaaactagttggcaccccgcgtctttgttgtgggttttatagttttatcgtcaaacaaaatcatagttttaaatggttaggtgcaactctatgtatatagaaaatatatgataaatgtgaatgtatagccttatgttattacaatataattcatgctttatttttccaagcataattgtgtattgttataatatatgaatattattttcatacgcaatatgggtatcgttatagttagacaatttgcatctctctacttcactcaagttttttctgaaaatagattcatgtaactatacctaataattatatgctatcttatcatgcataataaaacaaaacacacatattaaacaaaatcatatattaaacaataatttgagttgtattcgggaaacatggtgttatgcacaaaatatgtaacagtgctatgtgtgactgtgaagtagagcaaagggaagtgaatggataactaatacttcctccgtttcacaatataagtcattctatcattttccgcattcatattgatgttaatgaatttagacatatatatctatctagattcattaacatcaatatgaatgtggaaaatactagaatgacttacattatgaaacggaggaagtaataaatgattgaattggatgaataagtagcttcttgatccaacggttattatctttgtaataatataatctaatggcttaaaattgttaatgatatagcttcttgtatctcttgctttataagagttaatgctccttgtggttgcggattctttaagacaaaagtttaactcgcacggcagcaaccaaaaggtgtcgtggtgtagttggttatcacgtcagtctaacacactgaaggtctccggttcgaacccgggcgacgccattaacttcacaatagtgtactttttcacttcaatatatttactatagtggtttttatattttctttatccatttttttcacttcaatctatttactatattgctttttagtttctatttttcacttcaatcatttttattgactttgcagcttgaaactgcatgcagctaattacttaacaaaaccatcttttttttttacttcctttttctttcacttcaatcttttatttttcacttcaatctatttactataatgctttttatattttctttatcctttttttttcacttcaatctatttactatattgctttttatcttttccttttcacttcaatcttttttttgactttgcagcttgaaactgcatgcagttaattacttaactaaaccatctttttttacttcatttttctttcgcttcaatctttttacactggtggagaaaccatattttctcccggttcgtaaccccctttagtccggttatccaaccggaactacgaacccgggactaaagatcgttatcttagtcccgggtaaaataaccgggactaaagatcgatctttagtcccggttggtaccaccaaccgggactaaagagaggataacaggcggcagttcagatgatcccctttctttgtttttttcttttttattttctccttttattttctcccgaaccaagtggcatgcatatccccaaatcaaaccctaaatcccaaatcaatgtaacatcctaaatccacatcacaaatcttgaggttacttatatacacaaatcaaatacatcacaaatcctaaaaaaactacacacaaatcaaattacatcacaagttctacaaaattcatcgcaaattcacatcacacacaaatcaaatatatcacaggataaatcacaaattaaaaaaaatccccagaggcgccggccggcaactgccgcctcccctccgcgccggccggccaccaccgcgcggccctccacgacgctgtccgccgccgcgccgccctccgcgccgcctccgcctgccgtagcgccgtcgtgtgaccctgcgcgccgccaggcaggccaccgccgcgtggcccgccgtgccccgcgccggccaccgcccggccggcccgctctcgctctcactccgattcgatccgatctagctgctctgtgaaaaagaaagaggtaagggaaaagagatggggagttagggagttaaagatgaaaaaaagagatagagagagagtttgttgtgtggacgggagaagaggataagtaatagggattatataatacgtgttgatttttattcccggttagtaacaccaaccggaactaaatatatctttagttccggttggtgttactaaccgggactaaagatcctaggcgtctgacatagtctgacatggaaccaactgggattaaagatcatctttagttccggttgatgttaccagccgggaataaagatcctctagtcctgttgctcttataaattgggactaaaaattatttttagtcccggtttttaatgggaccgggactattatggatttaggccgaccgaccaaagatggtttctccaccagtgttatattggttttccatcttgaacctgtagataattacttaaccagagcatgggatatgtgtgttaattacttaacaaaagcttgggatatttgtagtaaagaaaaatgttaattgcatccccattacttaattaataacctaaagttggttagtagtactccctcgtcctattttaggtgcaaccataagtttccacgctcaactttgatcatccatcttatttgaaatttttttataattaatattttgattgttatgagatgataaaatatgaatagtactttactcgtgacttatgtttttaaattgttttaaaaaattttcaaataagagggatgatttgcgaaaagccatggttatacttaaaatgggatggagggactaagtactgagcaattgccgctttgcgagccattgatttatgtgacttgtcctagtagcagtgattacgtttaatcacattctggcagattagttgttgggccgcttgccctgtaaaagtaaggataatagtaaagctcactttctactattagtctatcttaaagctaacacatataatagattagctgtaaggttggttataattttcttttcctctttctatttctcacttatacatttaatatatttgtcttgtagcttgtgttaagctagctcttgtataagagctaacacctttgatttcttgttacctctctcctttaaataaacttatagctcactattatacttgcactaacttatgcaggaaggtggcggcgcactagtggtgtgcgcagcaatggcggtgacggctcggcggtggcggatgatgatggcttggtggcgcgctaggagcgacgcctcgcacaacagcagcgccaagaggagaagaaggggaggtggtgcaggtcagctggaaagatggcgtggaaacgatggctcctgacgagataagttgtggcagcagctcgatgaaggtcatgttctgcggcgatatcggcgttgcagcgacgactcttcggtgagataagctacaacggcttggcaaatgttttggtatgcaatgacgaaaacttggcagcagaggtcctccgatgagataagcttcggcggctcggcggaggtgggcgatggggcaacaaggtgtcgtttgcattgtggggtgttggttgtcgtgtgatgtggtgtcggtgtagcagcgacgacttttggtgagataagctatggcagctcgacggaggtggttctctgcagcgacgacggcatggtggcgatagagtcgttagcaccacggatgagtaggttgttcagacagcatgagacccttgcttggcaactataaggtgattggcggactagttttgttgcctttgtttgatctttggtggaatagagaagcttctgtggtggttgctgtgacagcaagggggtgtggaagggcgggctagctccgcatctacttcaagtttgaaaaagattagagctagtcttctagtttttttttcttttcggttgttcttttccatgtttctcgattatgagttttagagtgtatgcactcgtgtaaacctttggctatatatattcactttgaatatagagaccggattttatccattatcaaaaaaatgtaggagcagtagtgcagtaccggctgaaccgttcattggtcggtatggggaatatatatatatagtatatggagtagtctttttgttcatgtgcagctcacatcacatgctttggatgacaaaataatgcttgcttaggataggaagaaggaccgatcaccaacatgactccttgaaatcctttggaaactgcacaacattatacccccaccatggcgcactctcagaatccaaggcaccacaatgcatttgactagtgatgaaaacggtcgaagacaacattattgctagtacattactgctagtacattactcctttttatagaaacagtttcggtatagttaggaatttttatactatttataaatttaactatttattagcgttgacttaagcatgttactgataaaacatttttttttaaaaaaaagggacttttacgcatggttataaacagaaaagctaaaaacatatagtactacttttacagaaatggtaacatttttatctctacatcatggtttattgtctatatttaccaatttaatgatgacaatattaatgaaaatgattagaatcgggcgtccggcgtggggggagccggatcgggcgctcccccgcgcgcccctcctcctacgtgcacacctattggacccacttatttctctctcccccttttccataaaagatgtttcacctagtgtacttacaatgtttcactaataaatctaatattgcagtgaattaaaatactcttttgcaaaaaaaaaacccacatattttggaaactctctattaatggaatttggtttattttttgttccaccaaaaatatttcacctagtgtactcatgatgtttcactatgtgtagatctaatattgcagtgaacgaaacatttcattgcaaaaaaacccacatattttggaaaccccttattaagggaatttggtttattttttgttccaccgaaaaatgtttcacctagtgtattaacaatatttcactgtgtgtacagatctaatgttgcagtgaaccgaaatattattttgctatttgctgaaacattgtttttatataggtgaaacaacacctgatttaaacgagtgaaacattttcgatctgaaacaattccgatatacctggtggaacatcgtgcaatatttaaaaataattcaataataagctaaatttttttcgtcggaatatatccatgtgtgatcttattttgaagatttaattgcaacaaatttaatagtgcaatcggatcatgatttggataagtaatttaggagaaaaatcagtttaaaatagttttgcacataaatcgggcgctgatgtcatgctgacgtcagtgcctgattttgctcccagccgatcggacgcccgatgcataggtccgtcccaatattaataaggcgcggaaagaaattaggaagaaaaaaaactttactcgtttggttgtaatttttttccgcgtcttttcatctcacttacgtgtgggacccaccaccttccctaacaattatttcctccgcttcccgggagcggcagcagagtgagtccaagagctcagtagaataacctcctccttacttgtaccgcgcgagctagcgaaaatcctcctcccatggccgcggcctcctcgactacctcgtcctcctccgcctccaaaccctagatcgccccccacctacctacctacctaccgcacggagacccctcccatggcggacgcggcgcaccacctccgccgccgcagcagcgccgcgctcccccgcggctggtgctgctccttctccgccaccccgcagagccccgaccaccaccgcccgctctccgccgcgtcagcggcaggaggagagggcgtcggcggcggcggcgcgcgcggtaagctcccgcccaagtcgccctcggtctcgctgccgtccttccagagctccccgtcgtctaggctcgcgggcttcatcgacccccgccgcattctctcccccggccgcgtctcccccatagaccccgacggctcgccggcggtggcggctggggcgaattcggaggaggatgcgacgccgaggccgtcggtgccgttcgtggcggtgcgtgaagagcgggaggaggaggaggggagagggctggatctgaagctgtgcctccgtggtagggacgggaggagcgtggcgatggagctggactccgccgtgctctgcgagagcagcgccttcttcgcggccatggcgccgccgccggaggccactgtcggcggcgggagcaagaggattgaggtggatggggtggagaacgtggaggcgttcaaggagaccgtggagctcatgttcgaggccgatcccatgcggtggttcgtcagggccggcgtgtcacgagcaataggcgtgctcgaggtgacaaattgcgcatccttacctttttttttttctgttgctgtttcgttgagtttcgcatcgaggaccatacgcatgtggccatgtagttgtggaaattgcattcttcacgttcgtactgcgggttaatatggttcaatttcgatggttttgtggtagattcgtgaacgtaaacatgtactattaactgtgcagtatgtacatccatgtttttaactgaatttcttaccgatgattgcattttctgtgaaaaccagtgagttggtattaatcttctagtgcctactaaaatctcgttagggatgacaccattttgggagtgcaactcatactagctcagtagttcttttagttgatacgaagatagtggtatgaccaataggatttaatgttcattttatacaacttgtgctgtgatgacagcaattaaatgagactagctaactaattatatcaacaattaaatgaactacctaattaatatatttcatactagggcagcagttttataattattgtaccatgatcgctataaggttatgcctttttctattcaatcagcaattgttgctgtgtgcaattatagtactccacaacgggtcaatggactcataaacttctattgcatgtacacctatagtcgaagccttgaaggatatgaactgaagcacattgagtgtagtaagtacggcataaagtcatcaggaaaatagttctaataataaaaaatggaaattttaggacaattgcaatctttgtcatgcatagttaaggatacccacaacttagattattttgacaatttattttggtgtctttttttgtccttagctgctgatggctaccctgcactgcagactgttagtggtctccagttaaaggtgaggtgtctgttccagggtagctcagcaattgagcacgccattaagagggttcagatgtccatattaatacttgaacattgctatcagagcatgaatagtacatatttactcttagtaccatatttatagtttcttcttgatttaattttatattgtactagttcggctgcacttgatagctgctttgttgaagccagcggctgtacaacgcagacaaacatgcccattatcatctgattatgggtcccataatccttactacatcttgaattgcaggtatcttcctctataatgtttgacagaggaatcaaatcatgtttggagtatattgaggcagttccatggaatgagaatgaggaagagaagctgaagaacctctttgctagatgtactttcgatgaagcagtatccaaagatgtactggcaagattaaaaccacaatgccagagcatctcagacgatgttacagttcacctcatccaatctgtcacaagcagcaccaacactggtgcaagaaaagagatgcaatctttagtcaatggtcttctcagtagaagctcagtctatcaaaaagatttgtctgggctaaacaaaggtagcctttaccagatttgttgttcctgtttgaattcactagtggagcattttacggaagacctctgctcggacaaaattgttagagatagtaagcctatgatcgaaagagtcagtaagcaaaccgagaacctcaactggctctttgatattcttgtgaacaatgatatggcagaagaatttgttgagttgtgggctaagcaggaagatctcatcagcatgcatgggcaagcatcagcaatgttcaggtacgaattaagtcggatatcagcgaatgtgtttattgtcctggggaaagggaaagttcagtgccccagcgatttgaggagccaattgttctacggatggtttcggcccatgttaatggattttggttggcttcaaagatgctccaaagggttagatatgagaatgttggaggagaatctcgggcaagcgcttctcactcttccactccagcagcaacagagcctatttgaagaatggttccaatgcttcgcatccaggggcacagagtgcccgaatcttagtagagctttccaggtatggtggagaagatcatttgtcagatcatccctagagtcacgtcgttgagagttgagttcacttgtctgctgatatataatcttgtgtgtatcaatgtaaaattagagttcttgtattagcttgtagaatattcttcttaataaatctagcttagctgcttccattatatgcaacaatgtaagcataaaactggccaagaaaaaaaaactagaagatatgtagcaatttggatatcgtttgccttgaagatggcatcactgtacatgatcttattcctgggaaaaatatacaaactgcaccagggagtgtgtagcccttcccatgtttcatactacttcatacagtagattcatgctacatagtattatatctacattcatgcactccaatatccatggtttattggcttaattcagcataatcagtcagtgacatggcttcacttagcagctcttgccatagatgagctcttcaggttgggcatcttcgatgttgagccagtggcaatcctggaacgcgcacctgcctgaggcttgcagcgtctcacctacgtcccgggggtccaggaagtatggcgtccacgacggcgtgccgtcctcgaacgagttgtgcgtgagccgccggatgttggacccgtcgatgtcgacggtgtagatctcgccgtatggctggtaatggtgagggttggagaccggctcggcggagacggcggcgtagtcggaggtgaagacgaggctcttggagtctgaactgaaccatgggtggttggtcggtccggccgccgtcgccgctgtgcaccacccgccgcaacccggtgccattggggtgcaccatgatggcgaagctgccgctccccggggcatggcggtcggaggcgaaggcgatccactcgtcgtcgggggaccaattgcacatcgtgtccgaccatgggccctccgtcagccgccggatgccaccggcctcgccgtccttggcgtccatgatgtacaggttcttgtgcccccgacctccccgaccggaacaccaaccacttcccgtccggtggcggcgacgggaatgcgttgttctcgtctcccacggtgagcttcttcatcgagatggttttgtcgtcgtcgtcgccgagggagatcgccaccacgtccacctccgtgctctcgatcgcgaaatccggcccgatgcttgtgtgtatatcacgcctttcctcttccagtccaacgacgtcaggaaggcgttcccggagaagatcttgcggcgaccatcggagccatcggagttcaccacgtacatccccggcagcccgacgaacgcgatcttcttgccgtcgtgcgagaaggagggaacgacccgtcgatcctgaacaaggagaacgtgtctgccggccctgggctcttgatgttctccagcagcaacggcgagtcgccgttccctctcccccagcaccggtggtacccaacgcgtgcgccgtccagcgagatgaatgggttgaaacggtgcacgcgcggcgccacgggtctggtcacctcaaagtaggcgttcttgtcgtcactcatgtcgatcacctcgatgtggcggtagtccgagcccgcaagcctggtcgccaccgccacgagccccggcgcaccgggcgacgcggccggcgtgaaggcgtggaacccccgcggggtgattcgctcgacggacgccgcttcgactctgtcatccgtgacggaaatatgttgaattggatccaaattcatttacacacgtataaaggccaactttggacggagcgaagcggaggcctgccgtcggaggcttggatcgttatccttttagggtttcacctttatatatacttcttgtgagccgtcgttcggcattgtaacctcacccgatatagcgaagatatttgctggctagcgctcgtggttttctctctcctgctttagtagggttttccatgttaaatgtcgtgtcttttgtgattgatctatcgttatttatcgtttatttgctgatcatttcctaacaggcgcgatagacgacgtaccaaccattgctatcctggcagtggaagaagacgatggtctcgtcggcccagctcggctagctgccgtcatggacggcaagtgatcgccaggacccgtaagcggtgcagaagacgtagatgtcagtgcgaaggtcctggacctcacctgtaggtgacatgggaccggggatatcttgactagaggtttggggcagccgcggtcacccacgtggcctgaccccctcgggggggtcgggcccgagggtgaagaggccgcccctccctctatctctccgaggggtcgggccgctcccgtttcgtccccgagggctggggcgccccgaccccctgagggtttggcgccacgtgaatgggttaggtgagcacagcggcgctcacctaaccgcgtttattgcgggttggacgagcgcatcacgccgcatttaatgcagtatagcgcaggcttatccggtccgtgacaggtcgcagtgtgtgaccggtcacagaccggtcagatcgcgggttaaggggcaacaggcggcctgacacacgcctccaggcactcgtccctagtcggagccggcgtggggactcctggagttggcacatcagccccagccagatacattccaggcttcatcgcaatcattgcaaggaagccattgtatgaagaagggcagacgtgtagcatgctaaactgacacgtggtggacaagaatgaccggtctgtgactggtcatacgccggttgcgtcattggcaaacaaccgtgcttccacgttgcacctgcttcagacggagtggaggttggtatgacccatcccatcggagggtcattcaaacagcagccattgcaaatctccgcccattaatgagggaggacagggctatcccggtgtcagacaaaagtacgagccaaatcttgatcaaagtaggatgggtccccacccaaaagaagggtaggtagaaatggtatatgtggtatccccttgagatataaaaggaggaccatgcctaccaagaaaaatgggagggagaagatctgagctcgtagaagggacggaaaaaaaaagagtagggagagggtctctagagttcaaacgctctttctctccagttctttgtaactccttcatacacagatccaccagaacacaggattagggtattacgcttctcagcggcccgaacctgtctacatcgcccgcgtcttgtgaatttgctctctcgcgaaccattccacagatcaagggcttagaacctcacttagcgccccaggccgaaccggcaaaggggggcccacgcggtctcccggtgaggagccccacgctctgtcatctggcgcgccaggtaggggcgcgcctgtgtttttctaagccctcgtcctctttcgtgtgcgccaagcttctcccgctcagcccaatggccgaacgggcagtggcgcacaacctctctccgagcgctagcggtgacgacagcgagcagaacccgcgtcgtcgagctcgtactccgccgcccccctctcaccgaagtcttaggcgggaggaggcgctcgagggggtcgaaagatccgcgacttcgccgcccacgagcgatggagaaggacggcgagacggggagcgtcgtctcctcgtctacggtgatggcagcacgccccagggagcgctccaggctgcgggcgtgctcctgcgtcacccgcccgtcgtccctgatccagagactccaactcgacgttggctagatgacgtggccaacttggtcatgacggcgcaacagcgcctaggcgccggcgggcggtcctccgccaccaaggccactggcgctgctactgccggctccgtatcgtcgaggcggagggcgcggtgagcggcggccgttgcccgccgttcgtccgccattccctcgtcaatgcctccgacccaagaagatgtgcgtgaggggccggatgcccgcctcaatatcgagcgccggcgcaatgatcaccgtgctgcccacgcatcggagggcgcttcctcgtccggagcgccacttcggtcggggcacgggggccagccccccgtgtccccggttggcggtgccggctgtcaagcctttgtggcgagccttcggaacgtccgttggcacccaaggttccggcccaccatcaccgaaaaatacgacggaagcgtcaaccccgccgagtttctccagatctacacgactgggatcgaggccgccgggggtgacgacagggtcatggcgaatttcttccccatggccctgaaaggacaggcgcggggttggctaatgaacttgccacccgcgtcggtccactcttgggaggatttgtgccagcagttcaccatgaacttccagggcacatatccgcgcccaggtgaagaagcggacttgcacgcggtacaacgaggggacgatgagtctcttcgctcgtacattcagcggttttgtcaagtccgcaacaccataccatgcatccctgcacacgcggtgatctacgcgttcagggggggcgtgcggcacaaccgcatgctcgagaagatcgcctccaaggagccccagaccactgcggagctttttcaactcgcggaccgtgtggctcgcaaggaggaggcatggacctggaactccaccggttccggtgtggcagcttcggccgcccccggatccgccgctcggtcagggcggcgggacaggaggaggaagaagaggtcggcccattccgacgacgagggtcacgtccttgccgtcgagggtgcttcgcgggccacccgaaaggggaggcctacgagcgacaaaaagaaggaggccggcgctcccagcagggagcgcccgaccggcaagtggtgcaccgtgcacaacacctccctccacgacctcgcggactgccgcgcggtcaaaagtttggctgagcggacgaggacgtgggaggaggagaggaggcaggagcgccttgagggcaaggccccagcggctccctccggcaaccggcgaagtgaggccaagcagaaggcccccgccgaggacattgacgatggcgacgatgacctagggttccaggagcctggggccaccatcgccaccgtcgatgggggagcatgcgctcacgcttctcgtcggagcctcaaggccatgaagcgagagcttctggccgcggcccctacccatgaggcgacgcggcgggcgcggtggtcggaggttgccctcaccttcgaccagaccgaccacccgccgtgcgttgcccagggaggacagatcgcgatggtggtttcccccaccgtttgcaacgtgaagttggggcgtgtcctcatagatgggggtgcagccctcaacatcctttcccctgctgcctttgacgccatcaaggccccggggatggtgctccggccgtcccagccgatcatcggtgtaacgccggggcacacctggccgctaggtcatatcgacctcccggtcaccttcagtggttctgccaacttccgcacggagcgggtgaacttcgatgtggcggacctcagtttgccctacaacgcggtcctggggaggcccgcgttggtgaagttcatggtggcggtccactacacctatctccagatgaagatgccgggccccggtggccccatcaccgtccatggcgacctcaaagtcgcgcttgcttgcatagagcagcgcgcggaccacctcgccgcggcatgcaagcccgcgggtggcgacgagaggctaagcgcctccgtcccagccgccccgaggcagcggatgatcacgtgcgacgaggtcccgatcaagcaggtggccctgggcgacggcccgtccaagaccacacgaatcggtggtcttctggacgacaaataggaagacgcgctcgtctccttcctgcgggcaaacgccgacgtcttcgcctggagaccggcggacatgcccggggtccctagggaggtgattgagcaccgtctcgccgtacggccgggcgcaaggccggtccggtagaaagtgcggcggcaggccccggaacgtcaagccttcatccgcgaggaggtggcgcggcttctggaggccggattcatccgagaggtcatccatccggagtggctggcgaacccggtcgtcgttcccaaggcgaacggcaagcttcggatgtgcatcgactacaccgaccttaacaaggcatgtcctaaggacccttaccccctaccacgcatagatcagattgtcgactccaccgcggggtgcgaccttttgtgttttctagatgcatactctggatatcatcagattcgcatggctagggaggatgaggaaaaaactgcattcattacccccataggaacttattgttatacgacaatgcctttcgggttaaagaatgcaggtcctacttttcaacgtactactcgaatttctttgggtagccaaataggacgtaatgttgaggcctatgttgatgacttggttgtgaagacacgtaaccaagagaccttactctcggatctagcggaaactttcgaaagtctccgcaccgcccgcataaagctgaaccccgacaagtgcgtgttcggcgtgcctgcgggtaagcttatcgggttcttggtctctgcccgaggcattgaggccaaccccgagaagttacgagctatagagcgaatgcgcccccccagcaagcttagggatgtgcaatgtgtcactggctgtatggccgccctaagtcggttcatatcgaggctgggagagaaggcactacccctatttaagctcctcaaacgctccgggccgtttatctggacggaggaggctgaacgggccctcactcagttgaaggcgtacctcagttctcgcccagtcctggtcgccccggagccagatgagccgttgctactttacctggcggcaaccccgcaggtagtcagcgcggcgttggtcgtggagcgcgacgaggatgaccctcgctccgcgcatccccaccctgtgtcgactcgacccgggagagagcagggaggagaggcccccgagccgaacggtggcccaaggcccccgacggccgaagctggccctccgcccgcttgtccgaaggtgccaggcgcccccgacccccaggatggccacggggccactgcgggaaggccgcgcctgtcgccttctgaccccgaggtcatcggcacagaagccgagtgcgccccgcgcggcctctcggagcgtgacgaggacgatcctcgctccgcgcgtccccaccctgtgtcgattcgacccgggagagagcagggaggagaggcccccgagccgaacggtggccaaaggcccccgacggccggagttggccctccgcccgcttgtccgacggtgccaggcgcccccgacccccaggatggccctggggccactgcgggaaggccgtgcctgtcgccctccgaccccgaggtcgtcggcacagaagccgagtgcgcctcgcgaggcctctcggacgaaaagcgccctggagatgcggcccctagtgaagaagatcggccccgccgaagggtgcagcggcccgtctacttcgttagcgaggccctccgggacgctaagacccgataccctcaggcccagaagatgctttacgctattctgatggcttcgaagaagttgcgccattattttcacgcgcctcgggtcacggtggttac

SEQ ID NO: 25163 - DNA, 8651 bp, Oryza sativa
gagcccatctccgtccccgaggccagctcaggcccctcgcagctgcctcacaccgtctattgggtgatgcagttcgacggctccctgtctcttcagggcgccggtgcgggggtcacgttgacctcgccaagcggagatgtcctcaaatacctggtccgcctcgactttcgggcaaccaacaatacggcagagtacgagggactccttgcgggactcagagtggcggctggactggggatccgccgcctcctggtgttaggcgactctcagttggttgttaaccaggtctccaaggagtaccagtgctctgacccgcaaatggatgcttacgtgcgccaggtgcggcgtatggagcgccattttgacggaatagagcttcggcacgtgcccaggcgggataacgcggtcgccgacgaactctcaaggctcgcttcctcgcgagcccagaccccaccgggcgcctttgaagaaaggcttgcccagccgtcggcgcgacccgaccccctaggggagacggacgcgcctgaacggcccccgaggcccgtcgaagtccaggcctcgggacccgaggggagcgctcccagctcccttagattgattgcttggatcgctgagatccaggcgtacctcgtagataagactctacccgaggaccgcgaagggagtgaacgcgtccagcgcatctccaagcgctacgtgctggtggaagggaccctctatcggcgcgcggctaacggagtcctcctgaagtgcattcctcgggaacaaggcgtcgagcttcttgccgatatccatgaaggcgagtgcggagcccactctgcctcacgcaccttggttggcaaggcctttcgccagggtttctattggccgatggctctcaacgatgcggtcgacctggtccggcggtgcagggcgtgccagttccacgccaagcaaacccatcagccggcccaggccctgcagaccatacctctttcatggccgtttgctgtctgggggctcgatatcctgggtccgtttagacgggccccgggcgggttcgagtatctgtatgtcgctatcgacaagttcactaagtggcccgaggcttatccggtcatcaagatcgataagcactccgcacttaaattcatcaggggcatcactgctcggtttggggtgcctaaccgtatcattacggataacggcacccagttcactagtgaactcttcggtgactactgcgaagacatgggcatcaagctctgcttcgcctcccccgcccactccagaagtaatggccaagtggagcgcgccaacgcggaaatcctcaagggcctcaaaaccaagaccttcaacatcctcaagaagcacggcgactcgtggatcgaggagttgccagcggtgctctgggcgaaccgaaccacgccaagccgagcaaccggggaaacgcctttcttcctcgtctacggcgcggaggcggttctcccatccgagctcaccctgaggtcccctcgggccaccatgtactgcgaggctgatcaagatcagcttcgcagagatgacctcgactacttggaagagcgaaggcggcgcgcggccctccgagccgcgcgctaccagcagagcctgcggcgctaccatcagcgccacgtccgggcccgatcactctgcgtcgacgacctcgtcctacgccgtgtccaaacgcgtgctggactgagcaagctctcaccaatgtgggagggtccgtatcgagtgatcggcgtcccccggccgggctccgttcggctggccacgggcgacggcacagagctgcctaacccgtggaacatcgaacaccttcgtcgcttctacccttagtaggggtcgggtgtcaggtctcgggctcgggccaaccccgcaccccctcgggcgtgcagggttggccgggggctaccacatgcatatacttatcttttttctcttccgtatttcaataaaagtattttcgatttcctaaggactgtgtctgtgccattgtttcctttcgaagaatcttggcttgaattagcacgctcgtgcccgatcctgccctcggtggcccgggccggctaaaatcgccaaacggggcccagaaccgagccgtgccccggggcgtggtgaactccgggggggaatcggcaaaggcccacaatcgggtcatccataaccctcggtcaccacgttcccggcctggccagtctcgacacgtggatctccccagacactagccccgacccgcgccatttgaggctgggacctgggcacgagccctcgttcaagccaagacatagaaggaccgcggcacagaccatcctcgtctcatacacacaacgaacagagctgacacaaaaatttcttctttatttgattgcagattaaattagtttgtacaagaaggaggcccgaaggcctcggaagaagaaaggaaaaactatctaagattggcgggggcctgggggctcactttgaggctcccgggtcgccggcctcgtcgtcactgtcgtccacaccaccgtcgccgccctcctcgtcggagtcgagggcgaacgcgagtcgaggggccgtaccctcgaagctgtggacgatgtggacggtggcgtcccggacctgcgcgcacgcgtcgtcctcggttccgggagggaactcgtccagcgctgcccacggggagaagtccgggtccctggcctggtagcttgccagtacaagctccactgccccccgggcgaggtctctcgaggatgacttgatcgtctcctcgagctcctcggggagccgctggagagtcctggccatctctgagaggcgctgggcgaggcccccctggttggcggcatatttcgcgatccgcccgccccagaggcccgcctgccgcccggcgcggtctagacgggagatggcgtcccgaagcatgccgggccctacctcgcctgccaagcggagggcctcgacctccccggcggacgagtctagcgcgccctgcagctcggcgatggtgtgttcagcagctgcgaggcaggcggctagatcaccgtcgcccgcggccgccccgccgctgcgcgccctcgcgtccagctccttcgcccgcgcctcgagctcagcggcccgctgatccagtgcggccctctcggcgcgggcgccttccagatcacggcacgcctgctcctcccgcgctgcctcgcggagggacaggctgtccgccagccgctgcgccacgacctcggcctcctcgagagcttgctcccgctcggtgagcgcgtcctcacggaggcggagtgcggactcctcttcggcgcaggcggcctcgtgcgctgccagcgttgcctcccggatggcgacggcggcctcgcgacccgccagttccctctccttcgtgtccagggcacgggcgcgctcctccagcaccgtggcgcgagcctcaagggcctcttcgcgctgccgggacgcgtcgagcttcttctctagctccgccccccggctcccgtattggaggcagaggtcgtcccgcgccgcgttaaacacggcggtggcaatgagggcagtctctcgctcctcctccacctccctggcgatctccgccaggtccctacgacgggcctcgagctccgaggtgtgccagcggtgtgccttgcggcccgcctccaccatggcctccaccgagcgtcgcccctcttcgacacgcgcccacaccgcgtcgagctccgcccgctctacctgtaggacctccatctgggcacttaacccgtccaacaccgtggtgttcgcagtggccaaggcctgcagaaggggctctgcgctcggtggggcagcggaaggcatggggaagagccgcctcgtaaaggatgccgcacggctcggcccgccgatcgacgtgccgaactcagggacgtcccccgaagctggctcgtcctgagcatcgcccgatgggtcgggcccgagcggtgcgcccgcggcctcgtcgtgggtggcttcggaagtcgtcgtcgcctcgggcggagtcgggtcgggggcttggcagtccgcccgcgtgcacgcgccgcctccgtctcccggatggactcctcggcccggtggagtctggcctcctcccaagcggcttcctcagcctggcgagcccggatagcctcctgggcagcttcctcggcttcccggaggcggtttgcggcttctcgccggtcggcttcccgcctccgggcctccgcggtcgccgtctcctcggcctcagaccggccggacttggaatggcgagaagggcgcgacgggatctcgctgatgcagaagaaaaaccagaagacgaaaaacgggtgagtgaaaacttgccttgagagatgggagaatgaatatgaccgcagtaggcgcagggacgaacctgcgaggaggtcgactaaacgaccaccttgggggggagatgaggtttccccggcttggttcggtcccccctattttgcggagccgcttcttttttcgctccccctcgggctgcgacgtcggcacagcaccctccgggcgcctgctgctggcacgcaccgccccgccccctcggggaggagatggggagggggtatcctcctgtttcctcttcccccgggcgtcggcagggcggctgccccccgggcccccgtcacggggcccagaagcacgaccccctcctggggtagattgttcccccctgcggctcccgcccgcgccatcgtggcctcggggggcccgctcccccgacgccccgacctcctgcatgatggtcaggatgttggcgcgctctggatcgcagcagaggggaaggaccccttgagggatgagggatgcctccacggagctgagattcagcacccgttggaccactatcctgaagtcctcagggtcccagtcccatttgcgcccctggtgggtcctcatggtgtcctcgggcccggtgtactcccaggcgccccgggcgtgccgctggagcggcgcgattcggcgacgaaggtagtcgccgaacaccatggcccccgtgagcccctgggatcgcaaaccggccaggcgatcaagaacggcgtcgtagccgtctcccagatctaccggcgcccgccagctggaggcctgcgccgggggctggctcggaagtcggaggcgcgcttcgtcggcgagaggggtgtagaaccagtcgctcttccagtcatcccacttcttgcgaaggacgcagggaatgtagcggttcagcaccggcccccgcggttggaagtagcagccaccgactaccgacggtggcgacaccggctgtacggtgaagaaccaccggaacaaccggagagatgggcgcaccccgatgaacatctcgcacaggtgcgcgaagatggccaacgtcattactgcgttgggggtgaggtgcgccatctggagatcataaagctccagaacatccatgaagaaagaagagaatggcggaaccagccctgccattgcgaagggaaggaagaatacggaccaccccgggtagtgtggcgccgggcgtccctcacccagcgcaaccacctcccggccggtggcagattccggcatgaatcggcgcagcagcccgacctgcctctcgctcacgatacgagaaggcggcagcacgctaccgtcgagcggtgcggagccccgtaccataacgccggcggaggaggggtttgagagcgagtgagtgtggcgagggtagggcacaggaaacgagaagttagagcgcaagcggcgaaggcaaggggaataatggcgagaggaaggaagcgaatctcttcctcagcgtctttatacccttgccaaacgctgtgcccggctcctcgcttcccgcgcccactatctcgccccctcgtttctcgcgcccactcctccactaatcccgctcgcccgtttgcggcgcacgaggcggatgtgcggccgtggcagtcgagatgggacatatcgtgcgcgcgttaactacgctcgccgaccgatgcaccatcatcacatctccaggcgaaacaaaccggctcgtcccaattcgtgcgctactcaagtaatgtagcggtcttgaagaaagccgctcattattgtcggtcggtttttcccttgccgatgcgcgcgatttgcgaccactggattcctgtccacctgtagagaccggccccacctgtcaccaggcctgaggagtggcgtcacgcccgagcgttttcctcgaggagggcgatcgccctggcataacgccgggggctactgtcggtgacatgggaccggggatatcttgactagaggtttggggcagccgcggtcacccacgtggcctgaccccctcggggggtcgggcccgagggtgaagaggccgccccttcctctatctccccgaggggtcgggccgctcccgtttcgtccccgagggctggggcgccccgaccccctgagggtttggcgccacgtgaatgggttaggtgagcacagcggcgctcacctaaccgcgtttattgcgggttggacgagcgcatcacgccgcatttaatgcagtatagcgcaggcttatccggtccgtgacaggtcgcagtgtgtgaccggtcacagaccggtcagatcgcgggttaaggggcaacaggcggcctgacacacgccgtccaggcactcgtccctagtcggagccggcgtggggactcctggagttggcacgtcagccccagccagatacattccaggcttcatcgcaatcattgcaaggaagctattgtatgaagaagggcagacgtgtagcatgctaaactgacacgtggtggacaagaatgaccggtctgtgactggtcatacgccggtcgcgtcattggcaaacaaccgtgcttccacgttgcacctgcttcagacggagtggaggttggtatgacccatcccatcggagggtcattcaaacagcagccattgcaaatctccgcccattaatgagggaggacagggctatcccggtgtcagacaaaagtacgagccaaatcttgatcaaagtaggatgggtccccacccaaaagaagggtaggtagaaatggtatatgtggtatccccttgagatataaaaggaggaccatgcctaccaagaaaaatgggagggagaagatctgagctcgtagaagggacggaaaaaaaaagagtagggagagggtctctagagttcaaacgctctttctctccagttctttgtaactccttcatacacagatccaccagaacacaggattagggtattacgcttctcagcggcccgaacctgtctacatcgcccgcgtcttgtgaatttgctctctcgcgaaccattccacagatcaagggcttagaacctcacttagcgcccccggccgaaccggcaaaggggggcccacgcggtctcccggtgaggagccccacgctccgtcatcaccgttccaactggcggcgccaggcaacgcaatggcagtccactcacccgagggcgacacggcggggctgaagtccgcaacaccaagcggcgtcaggcggcacgtgcggctggtggacagctcgatggagttcacagcgacccagctgctgcgcggttccacagcggggatggcggtggagacatagacaaggtgggagccgtcgggtgtgagcgatagccggtcctagagcgcgatgggttcccagggagcagcggcgagagagccgccgcctcgagcgcctcgtggcaggaggagggtacgggagagaggtagaggttgagggagccgttgcgctcggagatgaagaggatggagtcggagtgggaggtgggggcgaagttgccattgtagttgacggagacgccatcggtgaggtagagctcggtggcagggttatgcggggagggcgagagggggagagagaagatattaaactcatagcggctgcggccaagggtggtgaacacgatggtgccgccgctggccgacacggcctgcgaggcgagcagcgcgccacgaggagcggcgagcaaaggagtggctatggtcgtcagactgaagcgagctaagtgagatagtgttgagagacccgcttcaggttgttggatttggggatttgttttgcctatttttcgcggcttccattggtgatggtgtgactacagagctctagatatgcacaaacaactcttttttttctttttttttgttaatggctttcaacatgataaaagtccacataaaaatcgaaccatttctagctaatcatgtaaaaaactttaggtgaattttaatcccattgtttgccgcgtgattttttttgtttgttttttgcattggctccttgacggttggagattggggaggcgagcttcgtcatccggtgtggtactgtggtgtcctactcagcttttgctactaaggaagaaagacctgatagcaagcagccaagcacactcaccctatctctacttagatgcacactcgactatgactctgaccatctccatagacatacaccgtttgctacttaaaaaaatataatcgtaaatataaacacatgtgttaattcttatgaattatagagaaattcattctattatagcatagaatgatatagtatgatataacctttgttataggattgtaagtcgttttacttttctggtaaagcgactctatggctggtgaagttttgatggtgattttacccgggtaagaacacat

SEQ ID NO: 25164 - DNA, 14849 bp, Oryza sativa
ttgtgaagtgttgacaaagagagtttaggaggagacggtgatagtgcatggagtctgtctgacatgtgcttggacagacaaaaggggggggggggagggggagaaattagactgttagaggtgtggatggctcttggagtctcggtggaaggctgccaagcagtggcctagccttgcctggtcaatgatttgaagggagaagaaccaatgtgctggggaagtggttagtggagtatccccaatcaagagaggctatggagtgctatatgaatatatgatgagaggaggaggctagaagctgaaaccggagaggaaaatgaaattaaggcaagtgagattgaggcatctggtcaagttgttaggagagttgctggcatgtatcatgagtggtataacacaaggcttgtgaaatttaggtggcattttagttaacactaatatttattaggtggtatataagtggtaaaacaatcagttatgctacccctctcgtgtaaatgtacaagatgtaaagagcctgaccacatacttaggccccctttgattcaaaggaaagttagaggaaatttggaggattttattcctatggtatcttttcctagatgatcctttgaatcaaaggaattgataaaattgaatcctatgaaattcctatgaaatgcctcatgccatgtaagttttggaggaaatctaacatgaggtagaaccccatggaaactttcctttgggtcttaatctctcctctaattcctgcgcttttcctgtggtccaatcaaacggtcattcatgtgttttgcaatcctttgttttacacttgcattcctgtcaaaatcctacgttttctcaatcctgcaattcaaaggggcccttgctaaaaaaaacaaagcgtaattttttatttattcaaattttaagtgtctttttgcaattacttctattttaatcaaactcccattctgtatcttttacatgcttgaccacatctgggtaattatcttaattttgttttaagtgcttatttccaattattttaatttcaatcaaattcccattctatatcttttatatgctttaaaatatatggaaacacaagatgttttgtctttgttttctagttctggtaattatcttaatgttgtccatctatgaatcatactttactgtagggttggaactgctttgcatagtcttggaatatgctaccatcttcaacgcaagtttgctctagctcagacatgttatgaggtaccttttacggcctcataggtcttgtctattctgttctgttttttccttggttcttttactgtgatgggcagtctgggatgtttttgtgtagaactatcatgcaatagagtactggctattgtttatgggatcagcatataggggcagtagtattctgtgttccttagcttcaattgtagtgtttgtgctctgtcgagagtggtaaactaatggagccattttcatagcatcttttgccagattgaataatgtgtactatcttgctccaagcatgtaggttaaagaatttcctaaagcatcgtagcagcaatacaatgaccatctgagttgtggcccacctaacctgtttttactacagataaggttgtgcttgcagaatgaaaatgcacaataaaagcatcagtgaaaagaaaaaaaaacgatgctattcagttcttactataattattttgttagtttttttttgtgctcttgatgaatgtgttttgccaacataagcttgcttctaatactgtcatctgttcctgttgtttccttttgcagcgtgctttgaaggtactgtaagttaacttatttgtgactcctttctctctccaggttgaatatgtatttacctgaatttcatgtattggtcatcaatggtggtactaataagtgatatcacattaacagtacttgagtcagtgtttttgttctgcattcacatcattgtttttgatttgaatgatggcatgcaagtaggtttgactgtaatttcacagagagcaagacaacagtgtcaattgttctgcattcacatcattgtttttgattgaatgatggcatgcaagtaggtttgactgtaatttcagagagagcaagacgacaacagtgtcaaagttgcgtgtaaattatagtggtgcaaaagtagacttctttttgttgtgttaatttggtcatctatccctttttgatggtcttatatgctatatggaggttcactggcaacattttttttttttaaaaaaacttattagttgagttgttgaaagttcaagatcttatccacaatacactatggataatgggcctttgacctttgcgcaccaccacccccctgttcttcatgctagttttgttgattcaactaatagttagtacttattagtgatttctgcaatgaatatgcaataacaatgcatatcagttgacagttactgatccgactagaaaataacttgtctttgcttatatgtaaaaaaatatatttaactacagtagcaaggaaattccatttattactatataatatgtctgttttaattgcatctgtagatagaaggacgtgttatggggattggtcatccagagtatgcaagcacaatgtaccttcttggcaaggtactgttgctccttttatatttatattgctgctgtatatcgtgctctacattatagactcattaccttttgtcagtaatcttgcttgtgttaccttagtcctgttcctttcaatcagggtggtactagcagtattttgctgtttaagctattgttgtagtgtttttatattttcattattttgtgactgcaatcctgcggcatattgcctttccaaacctgcacattccagctgaggatacttctgttttgctgtttaacctatagatataactttttacttttttttttcttgtcaatgtatcagctcacattatcttcctttcttttgctacatttttctgtaagtaatcattgccttttgtcgagaaccaatcagactcctagtgaagacctgaattgtactccctccgtccaggaatatgggggattattcccaatctagcacaaattaaggaagatgaaagattgcatctaagacatccagcaatacacatcggcacattgaatgaactgcacaatgtacacctttggggattaaactattaaactttggcaggttgaatggtgtggagtagcactagtacattctctgtatttcttttattctgacgggaactggtggagtacttaatttctagtggatggcatcgattgctcctgtccttgctagcctcgggtaaacaactcttatattcctggaaataccaaggggcaaaataccctatattcctggacagagggagtagtatcatttgaacttattctgctctctaattgataccaccatcatttatgttgatttgatcataaaatttcttctactctgattttccttgtcatgtaaggttgcgagggagtagaaaaaaaagaaatatagaatagtaaaagtatatctggcctcatggtactgtttggcaaaaactacttatattagtatcctcttgtctcctagagtcatttatttgtagcgacccacctatacaaaagaactcaatcccacaattctatgctaattatgaagttggtcattatggaaagaaggaagctgtcatgaacattttcctcctgctgtcactttcttgtcagataaaataattacttcctttgttccaaaatataatcatttctaggttgtttagcaaatgctagggttaaggggaaaaattttcccttttcgtcacttcagttcaatggccaaaattttgaattatttagattccccacccaagcacctgattggctgaaaatgcatggatttctgtgtattgattcagtgtcccagaaatgcttgtattgtggtagaaattttgaatcctagaaatgcttatattttggaatggagggagtagaagatattaattagggataaggttttgtatttaaccttttcctatctccacagttgtgtttagtgactatagtcacataagcctaaatttctttgctgttattaggtgttaagtcaacaaggaaaagatgcagaagcccttattgaagagtctatcaggatattggaggtatgattaccatattagttcataagtttggatcttttgtatgtgcatgtatatgtttgatgaggattttaccatgattttaggagtctgggcttggtgagtcaccaatatgcatacaaagaatgaggtatctctccacggtaagtgcttattacaacatctcagttgtctgcaatttttagcgtttgggcactcaatatctatgcatatgttttactgtacatgtatattggtcctactaaactgtggtaagagttgtattttttatttttatgcatggcattttgccgctgaacccacatcaaaggcgttaaatacactgagtaaacggtagacaagctgaattttattttctataagtaggggataagcccaaaactgctaggtgccaggggcgttgcgggggagtgagtgcggggctgggctggggcataatgtgcaagggcatggggcgcatatgggtcacgacatgcggggttacacctgtcacagctggtgatacactacagtagatcgtgccagatatgcaacagttggtgttttgtgcgtgcgtgagttgagcctgcgagctcgtttgagttgttgagcctgtgtgcttgcgtcatgtgactagctctgtttctattacagcaaggggaaggggttatgaaaatgaatagagaaaactaaatctatctccatctctgctctgtttctcttctgttcttctctgttcttctgttcatcctttctctgctgcttctctctatctctcgatctctctgcgattccaatctattacagtggtatcagattcgggtttttgtggttgattcttttcatactctctcgatctgactggtaaaaatctctgtgctccgggttggtggctacccctgcgtgcggccgctgtaagttcggttctggttcggttggatttggagaaggcaccacggcgcccatcaaactcagtgctccattgcagcagtcgctggactcaatggagctcttggagaaactggagtccatcactcagaggatggaggctattgatgagaaagatggaaaagcacggcggctggattgatcaggtggccaccaaagtaaatctcgctttggaatctgtggggaaattgcagcaggagcatgcgcaggctgcgcgtcttcagaagcatgccttgggtgaccaagtgagtactctgggttccccgtcctctctctccatggctagtttgggtgcttcaccacctccaccgccgcctccacttcttgtatttctgaaatctgctccgcattgggatggcactgaatcgagtcgcccccttcccatgaagggggctgcgagccaagagttgtttgcgtaagatggatttgcctcgttttgatggctctgacgttcgtatttggcttgatatgtgtgaaacctattttgacatgtatcatattccatctactatgtttaaagtttctgcagcggttcttcatgtctggtattgcagcaaaagtggtatcagtcgtttaagttggttgaagaagttcgcgattggtctccatttcttcatgctgttgcgttggaatctgagcggcaccactcagcatgagaaagtgcaggttctgcaaacttggcgtcagactggctctgttgttgaatataaaaatcagtttgattctcttgtttaccaagtgcgtgtgtttgatccttcagtgggtggtatgatgttggtatctcactttattttgggactggaggatgaaattcgagctgctgtggtggttcaattaccagacactattttgggactggaggatgaaattcgagctgctgtggtggttcaattaccagacactattcaacaggctgcagctgttgctttaatgcaggaaagtgtgctgcttgagttgggaacttacaaagttaagaaactgtcatacaagccatctggtgttaaaggggaaacttctcattctagtgatgaaactctggctattaaaccagaaagggctgaattgtggaaggcaaaacaactaagagattatagatgggccagtggtctttgtttcaaatgtggtgacaaatattccccagatcatcagtgtgcagttactgggcagattaaggccatgcaaataactgaggtcatacctgatgatttgcttaatgctgtggcagctgaagagaactccgatcaggaggacacttgtcatatttctttgaatgcctagtctggtgccactcatttgaatactatttgactcatttggtgcagaataaagtgttactaatgttggttgattcagggagttcccatggttttattgatttcaattttgccaaactgctgggcctgccattgcatcccctttctccatcagtggtgaaggtggctaatggtgattctctcttgtcaatatatggttcctaatggtgattctctcttgtcaatatgtggttcctaattttacctggtggattcaagggcacacattctcttctgacatgagggtagtacacttagggggctatgatgcaattttgggtatggattggttagctctatggggggatatgtcctgtaattgggctcttaaaactttaaagtttcagtatcatcaccagtggattgtgctgcaaggggtgcctgacattcagtccccacctgaattgtgtgttgtgtctttgcctcaagtgctgaaatggcaaaaagggtgtgacatttgggcagctgctttactggaaccacatgaagtgtcttccttacctccagtgccagccattgttatctccttgttgacagaatttgatgatgtttttcaagatcctacctgtctgcctcctgataggacttatgatcatgccattgccttgcttcctgatgctgctcctgtcaatagcaagccttatagatactcccctccaaaaagatgaaagagaacaccaagtcaaggagatgattgattctggccttattaccccaagcatgagtccgtttgcatccccagttttgttggtcaaaaagaaggatggcacatggcgtttttgtgtggactataggaagctcaatttgatcactgtcaaaagtaagtttcctatgcctattgttgatgagttgttattggatgagttgctggcactcaattcttttctaagcttgacttaaaagctggctatcagcaaattagaatggtggaaggtgatgagtttaaaacaacattcaaaactcaccatgggcaatttccgtttagggtgatgcccttaccaatgctccctctactttccaatgtgtaatgaattcagtgtttggctctttgataaggaaatatgtacttgtgttcatggatgacagtttagtatacagtccagatttgtcctttcatctggctcatctgaaacaagtgtttcttctcttgagacagcatcaactctattaagtgctcctttgcctgtcctcaattagaatatttgggccatattatttcagtgcaaggagtgtgtacgatcctgctaagactgctgccatgcttgcatggccagtccctactatcactgagctcagagggtttctgggtcacaggatattataggaaatttgttaagaattatagtattcttgctagaccattgacagtgttgttacagaagaaagcatttcagtggtctgactctgctcagcaggcttttcagcaactcaaagtggctatgagttctacccctttgttgtctctaccaaatttcaatcaaccttttgtactggaaactgatgcttgtgcctatggtgtgggtgttgtgttgtgcttaatcagcaaaatcatgaccagctaatcagaaactttccatctatatgagagttcttggctattatgatggcagttgataaatggagatgctatttacaaaggtgccctttcaccatcagaattgatcacaagagttcatgccatctcaatgatcaggtgctgggaactgagttacagcagaaagctatgactaaactaatgggcttacaatacaactttcagtacaagaaaggagtggagaacattgtggctgatgctttatctcgcatgcatgttcactcatctatttctgccttgacagtggttcaaccaatttggttgcaggaagcggtgaattcctatgcagtggacagtcaggctcagcatcttttaatggaattggctattaagtctcacaatgctcaaggtttctctttaactgatggtttaattcatcacaatggtcgtgtctggattggagctaatactggtcttcagactaaattgataactgccttccattcttctcccatcaatggccattcgagctccattgctacttatcagcgtttgaagaagcttttttcttggaatgggttgaagtctgctgtgactaattttgtgaagtaatgtcaagtctgccaactggccaaacatgagcattgattgcctggtttattagtgccattgccaattccaaaggaggcatgggttgatatctcgaaggattttattgaggggttacttaagtctgatggctacactgtcattcttgtggtggttgatcgctttactaaatttgctcacttaattcccttaagacacccatttactgcttcacaagttgcatctgcagtggacaaagctgtttttaagactcatggcattcctcattccattgtctctatcatgataagatctctaccagccggttttggggtgatttgttcaaagtgtgggacactcaattgaacttgagtacggcttatcatcctcaaacagatggacaaaccgaacgtgttaatcagtgtctagagatgtatctcaggtgtatgactcaagctacacccactaaatggaatagttggttgcaccttgcagagtattggtataacacatcctttcattctaccttgggctccttgtaaagccttgtttggagtagagtctcatgtcagccaagtgccagttttgttatcttcagttcatcagtcagtggctgatttggtgtctgagcatgaccagttatctgcattctttcagcagcaactccagtgagcacagctgcgtatgaagaacaaagctgaccgaggtggttctgagcgctcctttgaggtaggcataatggttttcctgaaactccaaccatatgcagagtcctcagtgataaatcgtccatatcctaaactggcattcaatttttttggtcccttccgagttgtggagaaggttggctctacagcttatcgcttggaattgcctgaaagcagtagtgtgtgcatccggtgttccatgtttctcaactaaaagcccatgttcatgatcacactccagtgttttcatcactgccttctccagttgtgctcgatgctgcaggtgtctggtctgaggaaatcctggatcgctgcctggtaaaaaaaaagaggaaatgctgcacatgtgcaagttctgattaaatggtcttcgttgcctactgatcatgccacatggcaagattatgaagtccttaagcatcggtttccttttgcaccagcttgggggcaagctgtgtctccggagggcggtactgtcacagctggtgatacgctacagtagatagtgccagatatgcaacacttggcgttttgtgcgtgcgtgaattgagcctgcgagttcgtttgagttgttgagcctgtgtgctcgcgtcacgtgactagctattaggcctatataattgggaccacatcgaggggaagtgattatgaaaatgaatagagaaaactaaatctatctccatctctgtttctcttctgttcttctctgttcttcttttctctgctgcttctctctatcttcggatctctctgcgattccaatctattacaacacggcggcagcaggtgtgcggctagtagttctgggctggggacccatgtcacaggtgcccagggagcacagctgggcatgggtaaggtgagcctagctgcctaggcatggtgtgtactgggccaggctgatgagagaggatagatttggtctggaggaggaaggagggaaagaaacaaaaaggaaggggtttcttaacaatcagggtgacattggttaacaaggtagtttacagaaccagtagagtagcattatgaattggtgttaataaagtcaaaatgatattaagtcctgttcaggagctaaagtgagttgtttgttaggattagtcctaaaagtgcaaattttgtatcaccgttcagattagaggtcaaatccatgttactgaggaagccacacatccattatgcaaggatgctggtatttcatgaggcaaatactaagaagtatttctatcctcaacccctctagttctctcagatcaagctccacattagacttatgaattatgtatgacaaatgaagatcacagcaaaataatctcagaaaatttccaattctagtttattcgaaagtagcacattttgttgtttgatagttggtacttatttgatactttatatcaggagttgataaagtcaaatcgacttgctgaagctgaaaattggcaaaggaagatattacataatctggaactctcaaaggcatgtcgatatatcttcttgcttttgtactattgcttcattatttgttctggtgatagcactgcttatgcgaatttggtcattgtcatgatgcatgccttaaaaaacgagcttgagttaatctatgtcttcagatattaaattgatttttggttgtatttttgtttctaaatacaattgttctagtgttttttgtacttgcatcctgtctagcaaggcaagagaatgatgttctcacgatctaggttgtgctctagttcaggtgtattaatgcagatgagggcaataaagtcttgcttcagctattcatggtcaatagatagcctgaaatataggaaaatagtaatcagaactaagtagacgattgaatggccgaagtaattgcttgctggtcaaagtacatgtttagtgttttcctatatgtactcatattctactccctctgtttgaaactataaggcatccttgttttcctcaaagtcaatatttaaatttttgactaattattaaactagaagtatacgtgtttagaccactagattcgtttttgaatatattttcacatgatgttaattttatagttagtgacaatatattattatagtcaaagtgtcatgttggagaccatgtagaaacctaatatgccttatattttcaaaccaggggagtattttaaaagtgtagcttatccatctacccctctcacctatagggacacttccttgatccacttatctgataaacttttatgagcttatgtgtcaaggattagatttgttagtatctctacttccaaatattaaagacaagtttcttatggcatgtacaacggtgttcattaacgggctctttccgttgctatgcaagtaaatttggtgacgtgtaagagagagggaggaaagggaaacatcgttgctatgcataacagctcggagtcgactcttagcatttattaaaggaaaatttgctgcatgtgtttggagaaaaggaaagaagtgcaataaaaaatattttggtgtattaatggttaagaggtcttgttgtctcaactattgttggaggataatctctaagtgatatgtattaactaagagcgactctacctttgtacatacccttatgggtcaagttagcctagctatataaggatggagttgtatcttcaccctggaaagaacaaaccaagccaaccacctcagccatgttccagtaatactgtattcttagcaaccgatggaaatattgtccctatcccctctccctgtagtagtttatttttgtatgcaccatagtccacggtaaactgaaaagggaattaacacaaatattccagcaatatcaggctcggtcataatgagtctattaatggaccatgctaaccttatatgtcatattcttttaatgaacaacctcttaagtctttatcaaatcttatcatgaatcatccaatttttttacaaaacctatcaatgttcgtctttgcaattgtttgataggggtgggattcatttgacactacgaatgcagctgaactcttaacaatgactcttcaaaccatggggaagttgaaggaatctgaagaattattggaaaggtggagcgtaaaagctgtttattttggccattgattgttttttaaatttcttactaacataattttattttttgtattatatttagatgccttgaagtcagaaaaaggattttgtctgaggaacattttcaggtttgtatcatatttaatgtttcacgtgatctttagtggaaataaaacatgaaagcatcatctcaatgaaaaaactcacgagctttcttacatgatcacaattctcttgtttcttaaaattatggttgccagatcacttaccaggtatttgagtttttcaccacaagctctgctttattggcaattaacacagactgggaggtatttgtgccatgtgcccctgccacgatgcttgattgggaagcaatgtaatcactgttgctccatatgtattttactaggtcatggtggcatcgccaattcatgttgattatcaccatttccatagtttgatgattacatgattagattgcttcattagtgtttcacttccttggtgcatgctgtgtcctgagaagctgagcccaagaaatgcaaatgttttgttgaagaatgtaggactcccttgctttaggtagagtattgtccatatcaccaatggcaattgtcattgttgactgatggttgcggcagctacggcacacacaagaccatgtgacctgcatctgctatgttgagttcacggtgcacccctacatgtcaggtgatacagcaaaatgcctagtggtggggaactggggactctagtggcaaactggcaatcaaaactaatactctaatagtagcattatgatgctatgatcctcaaatatttggatcaatctaatgaaaataataattaccatatagatacccttcagtcacaaataagtgttgttttagaatccatgcgacataattattactacatccgtcccagaatataagaagttttagtgttagacacggttattaagaaagtaagtagaattaaatggagaggttgtgattggttgagaagtggaggtaggtgtagaaattgaatggtggagggttatgattggttgggaagagaatgttgatggagaagttgtaatatttttggacaaaattcttagtgctagaagttgttatattttaagacagagggattattgtttagaatatagatctgggtatatgaaaataacatggccaaattcgttatatcaaaaaagctttcataatgtcacgcttctgcaactcattttggatttatggaattgaattaagtggtcaaagttatgtcttattggcttttggctttgaaaagtcgacacttatttgtgactggagggagtacagtttagtcttccacaaatatgttattgcgagatttactgttgaaggtgcatccctggaatcatgaaaagtcaataacaccgagaattgggttttcctgccgtttcatatacaatcaatttaatactggttgtcactagcaactagctggaacctagtccacctggtgggttctaactgggtattgcgactacttaacacagtttttgaaatgattccatctccagtggacagtgattgatttcctgttgttcctaatgttacaggtagctgttactttggtacacttggcaaggctaaccatgctaaactttattagtgacaaggaggacagtgacctagcaagatccaaacttgtcagggcaaggctacttgtcaatgattcaatcaggtattccattgaggttgttggataagtctttgtggtccttggtcgtgattcttctttttgcttttgggtagtttcacctttttcaggacagcatctaccctttagcatatttttcagttgctaggacagttgcggttagtaggacagcagcagttagcatctcctttatgcctcctttatgctttattaagtttggatgccctctaggacagcatcccatttaaatttcgaattttagactaggagggtgcagcaataggctagcagccagctatggctatatatatatatgtatccaaccttcctcgggtaggtatggcttttgtgttttgtgaatgaagaaaaccagaaaattgccccatctcgagtgccattctcttctcaatgagagtaaccattgagagtaaccattgaaattctaacatctggtatcagagccacactttcctgtaggctaaacatctcttgttccaccccttcccaagctcggttgagctctcagccagcagcagcagcagcaccggttgctcctccttcccctttcccttccccctctccacgcagcagccccccggaggtgcgccatgtccgacgctcggtctcggcgttcggtcgcctcgagcactcggcgtcagcaggacgccgagctcgccgcagcagaagagcgcaggcgagcaacggctcaaaccgctgcagcagcagcgagggcggccagactggcggcagcggagttggcagcagccagcgcggaggctgatgcggaggcggaggctgcggaagatgcggcacgtgcggcggaggtagaggttgataccttgcgcagcaccatcaacgactctatc

SEQ ID NO: 25165 - DNA, 5616 bp, Oryza sativa
tgccaggaggcctgggacgccatcgctgcggcacgcatcggcagggaccgcgcccgcaagtccacactgcaggcactccgcaaggagtgggagaacctggccttcaagccaggtgaggatgttgatgactttgctctccgtctcaacactctcttgcagaaaatggtgcagtacggcgacgacacttacgacgaggagagagctgtcgagaagctcttccgctacgtccctgagaagtacaggcagatcgctcgctcgatcgaatctctgctggacctctccacgatgtcgatcgaggaggcgttaggtcgcctcaaggtcgtcgatggtgatgagccacaacctctcttggggcccatcaccatcggcgggaagctccatctcactcgggagcagtgggaggcctctcagggtaacgggaggaagggggagtcatcttccccgacaggcggccgtaagccgcgcaaggcgcggggaggtgtccagctacggtgggcgcgaagacatgccgagggtggcgcccgcagaggcgcccagggcgttgccaccggcaaccacaagccggcacgagacgacgcctgccgcagctgtggcaagcttggccattgggccaaagactgtcgacagccacgacgcggccaggtccacgtcgcacgggtggaggaagagccggctctgctcctagctcatgcaaacattgagctacctccagcggcaccggccgcagcggctttcctccaccttgatgagccgaaggtactcgtctccctctgcaacggctccagcaacgacaaggctgatgggtggtacctcgacaccggctccacccatcacatgaccgaccgacgggagttcttcaccgagttcgactccagcgtccgaggctccgtcaagttcggggacgcctccggcgtcgagatcaagggtgttggctccgtcaccttcactgccaagtccggtgagcacaggctgctcaccggtgtctactacatccccgcgttgaggaattctatcatcagcgtggaacagctggatgagaacggctcacgcgtgttggtcgaggacggactcatgaggatttgggatcgctgtcgtcgccttcttgccaaggtaaccagaggcactaatcgactctacatcctcagcgcgcaagtcgcacaaccagtttgcctcgccgctcgtcgggacgacgaggcgtggcagtggcacgagcgcttcgggcacctccacttcgaggccctgaagcagctcagtgccaaggagatggtccgaggcatgccgtgccttgaccgcgtggagcagctctgcgacgtctgcgtggtgacgaagcagcggcggctcccctttccccagcagacgagctttcgagccaaggagcagctcgagctcgtgcacggggacttgtgtggcccagtgacaccggccacaccaggaggacgacgttacttcctgctgctcgtcgacgacctctcccgctacatgtgggtgatggtcctcggcagcaagggagaggctgcagacgccatcaggcatgcgcaggctgctgcagaggcggagtgcggccgcaagctgcgcgtgctgtgcaccgacaacggcggcgaattcacagcggctgaattcgcgtcgtactgcgctgatgagggcattcagcgccactataccacgccgtacagcccgcagcagaacggcgtcgtcgagcggcgcaaccagatggttgtggggatggctcgggccctcctcaagcagagggggatgccggccatcttctggggggaggcggtggtgacggccgcctacatcctcaaccgctcgcctaccaaggccctcgatggcaggacaccgtacgaggcttggcatgggcgcaagccggcggtctcccacctgcgggtcttcggctgcctcgcgttcgccaaggagcttggccacatcggcaagctcgacgacaggagcaccccaggggtgttcatcggctacgcggagggctcgaaggcttaccgcatcctcgacccggagacagcgtgtgcgcactgcgcgcgacgttgtgttcgacgaagggcgagggtgggtatgggacaaggcggtggacgatggttggacttcaccgtcgagtacgtccacttcgagggagctgggggagtaggcagctcttcttcaccgagcgtgtctaccccagcccccgaatctccaccgactccgacaccaacacaccctcgggccacgacttcgactacgacgagctcttcgtcgacaccacctcagccagtgactccacatgctccagcaccaacagccactccaagcacgtctactccgacgccagctcgtgttgagcgcagcccggtggagttcgctactccgctctcccacgacggggagcgcatcgacgcgtaccacgacggcgagcagctacggtaccgtacgatggaggatcttctcggcgaccagccggtgccgggactggtgcctcgcgacctagaggcgcagttgcaccttgcgtgcgacgacggtgagcctcggtcttttgcagaggccgagaaacacgcggcatggcgtgccgcgatgcagtcggagatggacgcggttcaggagaaccgcacctgggagcttgctgacctccctcgtggtcaccgcgcgatcacccttaagtgggtgttcaagctgaagagggatgaagccggagccatcgtcaagcacaaggctcgcttggtggcacgcggtttcgtgcagcaggaggggatcgactacgacgatgcctgcgctcccgtggcatggatggagtccgtgcgactccttcttgcgctggttgctcatgaaggctggggcgtccatcacatggacgtcaagtcggtgtttctgaatgtcgacttgaaggaggaggtctacgtgcaccagccgccgggatttgtgattcccggcaaggagggcaaggtgctacgcttgcacaaggccctctacggcttgcggcaggcaccgagggcgtggaatgccaagttggattccacgctcaaggggatgggctacgagcaaagcctgcacgaggcggccatctaccggcggggcaatggaggaaatgccttgctggtgggtgtctacatcaacgacttggtgatcatcggcaccaaggatgcggaggttgcggcgttcaaggaggagatgaaggccaccttccaaatgagtgatctggggcctctctccttctacctggggatcgaagtgcaccaggacgactccgggatcacgcttcgacagaccgcctacgccaagcgcgtcgttgagctggctgggctcaccgattgcaacccagctctcactccgatggaggagagactgaagctgagccgcgacagcacggcggaggaggtggatgctacacagtaccggcgtcttgtggggagccttcgctacctcacccacacacggccggacttggccttctccgtcggctacgtcagtcggttcatgcagtgaccgacgacggagcagcagcatgctgtgaagaggatcatccgctacgttacggggactctcgaccacggtctctactacccgaggtgtcctggcaaggcacacttcgtcgggtacagcgacatcgaccacgccggtgacatcgacaccagcaagagcacgagcgggattctcttcttcctcggcaagtgcctcgttagctggtagtcggtcaagcagcaggtggtggccctgtccagctgcgaggccgagtacatggcggcctccgccacttcgacccaggcgctctggcttgctcgactgcttagtgatctcctcggcagagacactggaacggtggagctcagggtggatagcaagtccgctctggccctggcaaagaaccccgtttttcacgaacggagcaagcacatccgggtgaggtaccacttcatccgaagctacttggaggaagggagcatcaaggcgagctacatcaacaccaaggaccagcttgcggacttgctcaccaagcctcttgggaggatcaagttcctcgagctctgctctaggatcgggatggcccaacttccccacaagacgacgcacaagacttagggggagaatgttggataagtctttgtggtccttggtcgtgattcttctttttgcttttgggtagtttcacctttttcaagacagcatctaccctttagcatatttttcagttgctaggacagctgtggttagtaggacagcagcagttagcatctcctttatgcctcctttatgctttattcagtttggatgccctctaggacagcatcccatttaaatttcgaattttagactaggagggtgcagcaataggctagcagccagctatggctatatatatgtatccaacctccctcgggtaggtatggcttttgtgttttgtgaatgaagaaaaccagaaaattgtcccatctcgagtgccatcctcttctcaatgagagtaaccattgaaattctaacagaggtctatgtcctttttaacaatccaagatcttgatctccatacttacataaattacattcgagaactggtcagtgtccacattttaatatttcattgctgttgtgtccccattgacggcactggagacaagaaaactggatagcgttacagtttgggtgaacttcatatagcccctactttacaagatatagaagtttgattatgttagttctgcatttcgagaagcctaattaagtggttaaccttgcctagtctgccttggttctgcattttgaggtaatcatatctggcctagagtgaagtctaattaagtagcaatgcttctggccagataccataaaataaagtgcaaagtaggcatatccttttagactagtttacttgctccaaatgacttaagatgttctttttggggcataatagcctagtagggctactaatggtgccaagcttagccaaagtagctaccaattctgtaagtcattttcataaaaataattcgctgtctgatttgcacctaaatgtaaagctgggcaatcattttgcctatggtaattgttcccaaccggctccaattaataccaaaattctggttaccaattatatttgagcttctttctgttagatgtatatttagattttatattcctttatttgtaaagggtttttctgtatatttgtgtattcctgtacctgtatatatttgggccttttgccctaaggtgaataaaagtgctgttcataacatggtatcagagcctaaactagggttagacttttcttcttgtcctagatgatccaaagatttttccacacacgttacctggtttttgtggtcgattttttcgcggtggtcatcgaactcgtcgtggtcgccggtgctgcttgtctctgcgccggcgaccgctcatctatgctcgccggccaccgcttgtcgtccccgtcaccagctccagttcgttctgctgcccgtcgctcaccgccggcaatcactcgtcgtcggctaccgtcgtccgctcgtctcctgccgctgcccttcgtcggttgcggcgccgctcgtctccggccgcaacccacccctcatctccagctgccacccgtcgtcggctgtggcgccgctcgtcttcagccgctgcccgtcgccgctcgtc

SEQ ID NO: 25166 - DNA, 2842 bp, Oryza sativa
tcgtgttgcccgccggtgtcgattcgtttccttcgaatcggtaccgatccagatcgggtgatttttctaaaaaaaataataaaaaaaagagcctcttgctgcctttcctgtgcagttgcaccagcgtttgggtgtttctccgaggctgttaaaaaaaagaaaagaaaagaaaaacaaaagaaaagagagagagagagaggttcctgttctttcgcttgttgccgctttcatttgcgctctcgccgtcgcccgttgctccgtgccaatgtcatctctatcaggcacagtttcagttcctcgttgcccagttatttttgatggcatcaactataatcattgggctcagcatatgcgtctacatatgtgtggtcaacgcctttgggacgttctttttggtgagctagcttgcccccctttccccttggctcaagctatgcctactttttcagctcagactactgatgaagacagagcaaaggcacaagaggagtatgatgatgctttggaaacttatcagggtcagtatgttatgtacaagacttggttggatgaggatgcttgtgcttctgctattcttgtagctagtatggaggtccatcttactggtgatgtggttacccttgcttcagctcatttcacgtggacacaccttcgtgaccgttatgcacctactggtgatgctctatatcttgctatggtgcgtcagaagcagtctttacagcagggagatgctacaggggatgagttctatacacagttatcctctgtctagcgccagcttgatcctttgggacctgatatttgtcgtacttgtcagtgttgtcagcgccagtggtctcacatggatcttcgccgcatctatgacttcctcacacgtcttcgctctgagtatgagtcgatccgtgcacagttgcttgctcggcacccccgtgttactttgatggaggctctaactgagattcattctgaggagattcgtcttcgtgaagcgggtattatatcgcatccttcttcagtactcgttcgtaccacagcttcagtgtcttcatcatcagcagctccttcctttactttaccagcacatacttcttctcaagtggtatcatcttccagtggtcatcttcattgcacttactgtgatcgagatggacatgtggagtcattttgctttaggaagaagaaggatttatggcgcagtcgttcttcatcggttgctgggagttcttctcagaagagtactcgctcttcttctcagaagagtactggcagttctgcagttctgatacacaggagatccttatgttactgcgttgcctcactgcttctgcttcgacaggtttagctagtttagttgctttgccctctgcacaatctgatttggttgttcttggttctcacttttcggtggattcttgattctggtgcttctttccatatgccccttgataagtctgtcctttcatctatatgtcatcctttagtccctattactgttcaaactgccgatggtacccctctttctgttgttggtcatgggactctttcatcttcttgtagtgttccttttgtttcctatgttccaaatttgaccatacagctcatgtctgctggacagcttgttgatcatgattgtcgtgttattcttgattctgactcttgttgtgttcaggatcgacgcatgggtctcctggttggtactggccctcgccgccatgattctcagcatctttgggagcttgactggcttcgtcttccttccgctgcgcttaccagtcttcttgcttctgctacctcccctaaaccctcttactcaagtctatagtcgtcgccctcgtgttatggagccttctgttgatgcttctcctgttgctcctccgagatacaatcttcgggatcgtaatttagttacgattcgtccagaggatcgctatggttatgttgcgactgttctcgctgagcctagttcttatcgtgatgctgttattcatcaagaatggcaacatgcaatggcagaggagcttgttgcacttgagcgtactggtacttgggatcttgttccattgccatctcatgttcgtcctatcacgtgtaaagggatctttaaggtcaagactcgctctgatggaactcttgaacactataaagctcgccttttagcgtgtggttttcaacaagagcatggtcgtgattatcatgagacttttgctcctgtggctcacatgaccattgtttgaactcttgcagtagcctctactcgtcattggaatatctcctagcttgatgttaaaaatgcttttctcaatgggggattgcacgaggaggtttacatgcgaccacccctaggatattcggttcctgagggtatggtttgtcgtcttcgcggctctctttatgggctcaagcaggctcctcgtgcttggtttcaacggtttgcttctgtagtcactgctgctggtttttcggctagtgctcatgatcctgcactttttgtccatacttcgcctcgtgggcgtatcattcttcttctctatgttgatgatatgattatcactggcgatgatgctgattttattgcatgtctcaatgctcaatttctgatgtctgatcttggttctcttcgctattttctagggattgaggtttcctctacccacgagggtttttatctttcctagaccaagtatattcaggatcttctggatagggcttctctcactgaccaacgcacgattgacactcctatggaacttaatcttcatctttctgccactattggtgtgccattagctgatcccacttgctatcgccatctcgtaggagtcttgtttatcttgctgtcact

SEQ ID NO: 25167 - DNA, 607 bp, Oryza sativa
cgtgcaaaaatccattttcaacctccttgtatcagtataaatgtaaaccaaggactaaaggtaggcagcaccatgctacatgttacattcaatcgtatgaaagcacaaattacacaatcaaattgccctttttgagagaacttctacccctgcagcctcatacgcggaaattcgtgtcaaagactctcaagaacgagtatatcagatgcttgaggcggctcactggtattgttcagagcgattccgctgtgtcggaggcattgacattgcaggggttgctagctgaagcgcaacagatacttgaagaacttggacacgagagcaactagaagtatggaaaagtaattattcatgactcggaggaacacctttgttgtgtgcaaggtcttctacgttggttttgcaccaacagattttgatgccagcatggatttttattgtgctctgagctatcgaccatatgctgccctagctggtggcgactttgcaagcaacaaaagatggtgattttgttttcttctggtttacaggtttatgctgccgtggttttttgtttgacctgcggatgtcatttgcccggcaaattttacttgtatcatgactgctc

SEQ ID NO: 25168 - DNA, 761 bp, Oryza sativa
aagactgattggaaaaaaacaacccatgctcaagcaagccaagcatgtccataaagcatttagcttagggtttcctattgatcaaattcgttaagaccctattgtatttgaaatttcctgtggagaaaacagtctcaagttgtgaattccttctggaatatttttaatagggtgtgttatgctgggttacctggaatatgtactgaatgctggaaagaggtatccaaaagaatgaaagagaattagtgcctgcttacgttagcagtcatgattactgcttaatgatatttcctacttagttgcttcttttatcatcacataagactagttagaaactgtcttatctatttgaactttgcctgcataagagatattatagcattaaaatgatttaatgggagcacttatggaacttgattaattgccctttcaggtatgtcccatctgtgctacaagggttggagtggacttgataggtcacttgacaatgcagcatggaagttactttaagatatccttttttcttctctataatgctggcaatgaacatatgcaattttacatttttacatcatattcagttgaagatacatggcattattggtacttgggaaaacaactgcacatggctttccttaatgaataatacatgcaacgcaggcgaagagtccgaaaaatatcttcagggtccattctttgttgtctttgttgagaaaggacttaagagatggcagtctgcagtcctttcttggtggatcatc

SEQ ID NO: 25169 - DNA, 21272 bp, Oryza sativa
ttcttaccggagtactcccgtcgccgtttggactcaagctccactcccgctagagcgcgccgccaccgcaggtagatgagaccgcctcccacctagagcccatcaccagttcaagtgtccatccctgtcgaaggtgcaaaggcatctatccaccagcttgcttctcgcctgatgttgccgtcgtcgctgctccatagaaccgtggccagatcaggagaaatgagtttgtgggggagacagggatgggcggcatcgctgagagagagagagagagagcggggggaggatgcggcctcgtcggtgctccagcgagtctccaccatggaggagtgaagtggagggcacatgggagaggtcgtcgccggtggggaaaagcgagcgagggccggccaccgtgagaatagtgggagaaagcgagagagggagaggggaagggcgggcaacagtggtgggctggcggctagggtttgggggaggtcgagggatgtccgtttttttaaaatgacccttcaagagcacaatcctattattcatttttttttcttcttagcataagatatgctagattctaaaggtcttctaggtaagaatacataacttagaaacctatatggttgaggactgccatcaaaatatcagtaacattaagtttttttttgcaaaacggctagagtcgacgcggaaccacgagtgctcgcgaaatccagcagcattgggcatccggggcaacgtggatagcacgggaaacggccatgccgccccgaatcgctgtggaggctccattcggggcatgttttaatttaaccgatatgcagtggtaaatggtaggatatgcacgcatgagcgttcattgggactatgtgatacctgcacataggaggctttaggccgagttttttcccaactttcccaactcacttcccccgtgttccgcacgcatgattttcaaattggtaaatgatgtgtttttttaaaaaaaaaattatatacgaaagttgctaaaaaatcatattgatttatttttcttaaaaaataggtaatacttaattaataacgcgctaatggaccgctccgttttccatacgctggaaatatgttcccaacactgtggaaacaaacacacccttaggtcctcaatggttctatagttgcatgtgttggacgcacacgcatgtgtgtgtggtgttgtatatgtggagtgaattcgtgtgcgtccttagctgtactatctctcaaaaaaaaaaggtccatgaagaaacaaattatttttccatgacacaaaatattacttttacatccaattcatattataaatcgttttgatttttttctagtcaaacttatttaaatttaactaaatttatagaactttagctatatctataacaccaaattagttttattgaatatagtattgaatataatttgataatatatttgttctgcgttcaaaatattgctatatttttctacaatacttagctaaacttaagaaaaaataactagagaaaaagtcaaagtgatttatcatataaatcggagtgagtaccatataccagtgtactcaacacagtgttcaatggaccgtatcactggctaaaagtaaaatacataaatctcaaaaaagaaaaaagaattaccatcacgccaagtgtgtttttggagcatgcatatacgagttcataccccactacacactaacacacattacactcgcacactcacaaatgtatctcctaataatgcaaatcaatagaaattgatagcaaatccctactctaactaatttttttccaggtcactaaaatttgttgaacaccaggctttgaaactttctaatctaattttcaagtttcacattctatttcggaaaccacaacgatagccgatcatattcttttgagcactaccacacaaactaaactttttccttttacagaactcttacaaacaacaatatcaaccatttaatttatcaagataaataagagcaagtttaataatatagtcaagtatcagctctgaatcacctatagtcaatttaatagctaatttatacatatttaccgataaatatatacaatacactagtaatatctgagcccacctgtcttacacacattgctcttctctttccttatttatcttatttatcttctcgatatatgtactccatctgtctcaatatattaaaacttaggaccggatgagacattttctagtactacgaatctggataggctgttagaaaatgtactatctaatcctagattttaatatattaggacggaggaggtatgtgtttacagcaagtttttagtgtgctattgtacctgctgtactaccatactcacatagtcacattacgacacgtcagaggtaagcataggcgttatttcatcggctgcttgatatgctgctgccgcctgcctgggaggcacatcgggcagtttaattaaggcaattaaggccgtgtttagattttttttttttaaaaaagatcacatcaaatgctttgacacatgtatagagtattaaatatgaaaaaaaaatcaattgcacagtttgcatgtaaattgcgagacgattttttttatctaattacaccatgatttaacaatgtgatggtacagtaaacatttactaatgatgaattaattaggcttaataaatttgggcagtatataggcgaaatctataattaatttattttgttattagtttatgtttaatactttaaatatgtgtctgtatatttaaaaattttctggccaagggacttaaacacagcctaatagttgtcctaatccatgcacgtttgcatagtacgcttccacaaggagcggaagcatcgcacggatgattgattgattaccaagatctctcccaagttgatttgattttgaccaactgctacagtatataatcacacctgatagcaccgggccaccggccaaaacacgcgtgcattttctactctttccatcggaggaacacgagacacgtacgtcctcgttctgcccagccaacctaattggaccaatccgatgactaatctaagtcattacggggatcaaggacaaaaggagaatgaaaatcgcacttcatttctatggcgctcttttgaaatcgagacaatttgcgcaaatttcacgagaattttaaactgatctcaacaaaaatccgctaaaacaacatccattgagctgtgaccgtggtggagggaggaatccgtgccacgtgacccaaaaccgaactcgaatcctttccgccaaagctgggcccacatgccagccagatgcacacaattccgatttgcttttcaaagttccaaaactataaaaacttcctcctcccttttcccatctctctcctcttcctcgcatttcccgcaccacgaaggaatcaaacggaaaaaaaaaagaaaaaaaaaactccaattagatcggcccccacgtatcgtcttcccgttccattccttctcgaagcttccatgaacgtggagcgcctcgtccccggcggcgccggcggcggcggcggccgcttccggtacgagcggatgccggctaggggcccggcggatgacggggagggggaggaggaggaggaggaggcggcggtgccggagcggcggccggaggtcctggcggcgtcggcgtcgttccgcctctcggaggcggcgcgggtgttcgaggagctccccagggcgtcgatcgtcgccgtgtcgcgccccgacgccggggacatcaccccgatgctgctgtcgtacaccatcgaggtgcactacaagcaggttcgcggatcctcccctgccttctctcctgttcggtttattcacggttctgagaaacatcatgtgaaaatttggtgtgatgagagggggtgaattagtctagaattgcgtccttttttttttggttggcaaattccacgatcatattacatacatacacgttatagttcaatttgttggtactaataactacagctcatgattttagttgctgcgcgaaatgtgccttctgattgtgagttgtgatctctacgccactacgaacttgtttgattttaatggcctgcaattccccatgtagaaagggaaagggggttaatgttccatgattgatggtaccagtcaactactagtaggatttttcacaatctcaaacgttacagcgtgtccatggcattgtgggagttgatattaatggttcagtattggataggcgtgacttttatgcatggatgttaagactacatcagatttactgctgatcagcctgtctcgagcaggtctgctcttaaattaatcatgtgcaaatacagtctatgtgaatagattaaacttgtgtgtggaattttttggtgcagtatgcgcctaatcgatcattgtttttgattggatgatgtggttacttgcactgtaaacggcctattaacctgagtataatgggatgtttgttctacctgttatgcgctcatttttatctgctcttacttggtgaggctaactgcctagagtactcacctactcagtcagatgagtactcagccatgtagacttggttttcatacactgaagtttatggtggtttctggttaagcatgttccatgaaccgatatttgctgctttgttgctagatgttcatatgaaatttgtggtgtgtaaaattgtcatccccatttagcatttgcaacaacgtgcgtcctcacgtacaacttggtagaacttctttgtccttttatatttattgtaagtacttgttttcttttgttacaagaatttataaatggaccacttttaacttttattttgtgttggatttagattttaggtcctgatgtttcctgtaattgacaggtatttttggtcctaatttctgatgatcattatgatccattggaattctaatatggttacctacatatacagaggtacttaattagacacaatcaattcaagatcaagaaattgactaacttagaggatatctcaaatatagattggagtgccatggtgattttgtttgtgccaatttgtaactgcaatagatcctaaactgaaatgatttctatcatcttgacttgtaacgttgcaaatcaactatctagtattgactactgaccaactcggccttaacaacttggtacatgcttaatttctcaaaactcgaggctgttaagaaagtccgtgttccctttcacttcacatcttattatcttaaaatgtgataaggaactttgtggaacacatgtttatgaccagtttgaaattaatggactgcatgcactacacggcacaacctgtgtgcagatgttttatacatgcacacacggacaaaggcaaacaaaaaatgttgaacttgtgaaatgcatgagttttatttcttaatacttgtcatatataatttttctacttgtggtgcatacttgctttcctgtgatggacattttcttctttacactgttctatttatttccattaaatatgaatgtttcatatgtgaactgagaaatgtttcactgcttccaccagtttaggtggcgtctatataagaaagcttcacaagttctctatctacattttgcattgaagaggcgtgaatttcttgaagaattccatgagaagcaagaacaggttggttatatgaccattatgattcatgatgcttttcagtactggatttcaacctgtaagttccttaaagcaaactcgttgagttgccgtgcagttgtgctgtttgattggagatataattaatttttttactcttaacttctgtacatctcaaaagttagttagttttaggattagaatgggccgcaactatttattttagaattatatgagccattaggtcataataaaaacaactgttaacagtatggtattagagctaggttgaatagagacatccaattcataatatggtattagagctaggttgaacttctccttgttgctagtgtggatatggcatcattgccttatcctcttcagatttaggtcgtccttgttgtcatatgagactattgacgactagaggatctcacctatttgttgcctgcgcggtggcacacctgctcctcaaaaacccctggtgacaccagcaacaccaatctattgtggttccctattgatgtatctccaagagattgttcctggcacaagtaaagatctttatgatgaggtgcagggcatgacatcttctctcccccttgcttcaagtgtatctcatattatatattctatttattgttttaaggttcttgccgatccctttttattttttttctcgaaaacgcaggatgactgcatttcatttaaggagacccctttttattttaaaatgttaccgtaacatcttgttattagaatttatcatcatttaacttttacaagtattgatgcaccctatggaaagtggaggaggcataaatatgtgtgaaaataggatggggtatagaaggaagccattgcatctggtcagatttagtttgttagataacagataataaaatagcttattatttatggctcatacttcctagtccgcttagtggatcaatatttacatattcctcatcagttcatcaggttttgcaaatttttatgttttttaatattatgtccaaacaaaaagaggcagtttccacaaatataaggggttgaagggaaagattgggaaagcagcactccaaaatcccttatatttgtggatacaggcagggagtaagtctttaagcacagatttttatgttggagcaactcacctacttcttcctcgttactttaacttaaatatgacacgttttaaccatttgatatctggagaaatgtcattaggatgggaagcagagttaagcggggagtactaagttgatttctttattttgtgattcaaggtcaaagagtggctccaaaatctgggaattggggagcacatgccagtaggacatgatgaggatgaagcagacgatgtgaatgttcctgcacaggctgaagaaaactccattagacataggtaaaaatttttatacatcaacgacgcactagtagttgatgtatagttatgctttatcatattgcaaatgttgaattagagcagttgagtctccatatgttatcccatgcatgcagtaagcaagacattgaacctgttgtggcagaaatgttccttcaagtgctgttttgcctgtcattcgaccagctctggggcgtcaacactcagtttctgatcgagcaaaagttgccatgcaagaatatctgaaccattttttggggaacttggacattgtcaactcaccggaggtactcattacccaaatctttatacatttcactctattgtttccaattagaataaatgttgaccaaaatatcctatctgcatctagattagttttatcgtcaagagtcagtactaaaatatctttcaaaatacaggtttgcaaatttttggaggtatcatgtttgtcatttttaccggaatatgggcctaagctaaaggaagattatgtatctgttggacacttgccaaaaattcagaaggaccataaagaaaactgttgttcatgtgggttgtttagctgttgcaaaagcagctggcaaaaggtattatattttttgtagttcagttttgtatttagctatcttataatcattgtatttaagatattgaattgaacaatttttcaataggtttgggttgtcctgaagccaggattcttagctttactcaaagatccttttgatccaaagcttttagatgtccttatctttgatgcactgccacatatggatataagtggagagggccaaatatctctagcaaaagagatcaaggaacgaaacccgttgcatttcggactccaggtacatattccattttatgatctcatgccaagttagcacgtttgtttgaaatgcaatacttttatttttggttgttgacgatggaaacatttttatatctattgcaagaatgttgagtttagccagattgtgattgtttagtttggccttgctgcaaagtgacagctagctagatatcagaatattacttaaaaaatcttagtgatttttttgttctgggcctaaaaaagatgcactcagttaattatttcatcttacagtaaatatataagtgcttctggaaagccaccacaatgcccaatagagccttaggagtctgcaggattatctctttctccttttgtcgtatggatatcttaatgaatacataacatccttgttatgaaaaatgctacttttacagaatatttttgtagtgaattgcatactcataaaaaaatacataaactctaaaacaagttttgaatgcggcgattcttttcttatttatgtgggaactgaattatttcttgtggaattcctgccttccaatcaattgatactatcttggtagttctgagctggtccacctgttcatactattttgatacaagcgttaaccttatatttctgtggagtctaaacatatttgtgcttttttggaggaaggtgtcttctggtggccagactttaaagttacgaacaagaagttcttctaaagtgaaagactgggttagtgcaataaatgctgctcgacaaactccagagggctggtgttaccctcatcgttttggttcatttgctccaccaaggggtctcatgccagatgggagtatggtacagtggtttatagacggagaagctgcatttcaggcaattgcttcctccattgagcaagcaaaatcagaggttaactttgtgttgcttcaatagttacatatggagaaaataactccaattgtataaatcttaagataaccgaatatttgatgcagatatttattactggctggtggctctgcccagaattgtttctccgacgccctttccaacatcatgggtcatctaggcttgatgctctactggaagctagagctaagcagggtgtacaggtatcataatggtttccttttaatcaaagttgcagacctgttatatgatgtgtgaggtgcttaagttatgtagcaatgcttgctacttcatcacgtgtcaattgcatgaattgtagatgcctgaatcatagacattttgtatcttctgaaaatggcttactttgtgaggttcaagtctgtttacctttcaagctcaaacaaaaaagaaaaaaaaaatccgtgaatcccatctgctgacaaactattcaaatagacccctgcgatcggggcttctggcccttctgcctcccacacaccgtcatcctcacttcctcttgcatacgcttacaagttatgtaattatcaattccttagagacagagatcatgcaagaagatttcacgatccataggtccctggcactaatctttctttgtgaaaatacattagaagttaatgacttcataataggtccctggcactgatcatttttttaaagaattgtcttaatgcctggttttgtcaaatttaaccaagaacaagctataggggtgtttttggattcacaccatgctttggtgcttatgagttccattgcacacttttgttgtatttattcttattcttaatttttttattgtttttggtgcaaggcaggaatgataggttcctgtcatggcctctggtcattgataaaatatgaacttatcacatgacttgaaaaagcaaaatgagtcaaaaactagatggctcataaaaaccgacagttactgactgtctactctgaattttggtaattatgcagatctacattcttttgtacaaggaagttgctcttgcattgaaaatcaacagcttgtacagtaaacaaaagctacttaacattcatgagaatgtaaaagttctgcgatatcctgatcatttctcaagcggtgtatacttatggtatgacgaatccgtttttgtctccctatgttcaatgcaaactatttaattataacaacttaactccttattttcactttaaggtcacaccatgagaaaattgtgatagtagataatcaagtatgctatcttggaggtcttgatctgtgctttggtcgctacgataattctgcgcacaaactttcagatgttcctcctgtgatatggccagggaaagactactataaccccaggtaactatggtatttcgtttatgatggtatttatgtaggattattcccaaattattcttacctgagttttcctgctgtacataagggaatctgagccaaattcctgggaggacacaatgaaagatgagctggaccgaacgaaatatcctcgcatgccttggcatgatgttcagtgtgctctctacggtccaccttgtcgggatgttgcaaggcattttgttcagcgctggaattatgcaaaggtttgtcttttccattgcatactcatcatagtcttccccttcattattgtaaataaaataccttttttttccagaggaacaaagctcccaatgagcaaggaattcccttgctgatgcctcatcaccacatggtaattccacattacaagggcataggccaagaaattaatagtgaggctgatggtaaacaaaatcatgacaaggattgtgatgttaaaaaaccagtctctgtggactcacgggagtcttgtcaggacattccattgcttttacctcaagagcttgaaccaccggcattgcccaatggagatttaagagtgaacgatttagacgccaaccactctgatcacctacacaaaacaagcttcaatcagcctttgctcaaccggaaggcaaagttggattcttcccgacaggatttgcccatgagaggtttcgtagacaatataagttcccttgagtcatcatctattaggcattttgattcttccaaagaagaaaagtatcacatggataagaactggtgggagatgcaagaaagaggagatcaagttgcttcagtacttgatatagggcaagttggtccaagggcaacttgtcattgtcaggtcagtattgaagttaattttgaattaatttgttgatgccaatgaatgagataatgagcaagagtttctcaaagttttggctattttagttatataactatgctacacaagttacgtggtttgctatctgaagattgtaattcattggaagtttggagttttaacagctgcattattggtagacagtaattcattaggaaataatatgaaatcttttgttataacagatgcaacatgaatgctataggaaaagaggcaaacatggaaaatctgaaaccagggctagtaactatgtatgacgtaacatgtgatacttatctagttcgaaactaagtcgatgatcagtatgagtctaatgactgacacaaaatgtgattcttatcagtttagctacttagcagttctgctgcttttggtgatgttgtcttttcatattctgggttcagattatgttggttatttgcatatttaattggtatcgaaacagaaaaatagctaagatcagtttgttagtctattcataatttattaattcttttgggtgtggcataatgtttttattgaagttgctaaatgtaaattctgtcttcatgatcaccatttcttcaaaagggctgacatataagatgttcctgctgtatattcagatatgcttgtatactaaattactaaactaacattagaaaccattataataattgcatcaaataattctagtaagttaatgaatttatattttggttcaggtaattagaagtgttggtcaatggtcagctggaaccactcaaatcgaaggaagcatccacaatgcctatttttctcttattgaaaaggcagaacattttgtatatatcgaggtccgcgttttgcatttattttaaacatcaaaaattcaatttctaaacaatagtagattagtaggttttactagataatgatctttaaataatgttcagtaattgtcactatcttattacacattattctgtccagtttctttggtataaaaaatcttttttttttgcacacatactccataagtatgtaattaatatccatgagactgccaaattgttaacatcctatttgcgcaccttttttgcagaatcaatttttcatatcaggcctttcaggagatgaaacgataaaaaatcgtgtattggaagcattatacaggcgcatacttcgggcagagagagaaaaaaagcgcttcaaagccatcataataatacctctgttacctggttttcaggtaattttctactgcagtgattaggaatgtttttgttcctggttactcacataatatcgtggcagggaggcattgatgatggcggagctgcatctgtgagagcaatatgcattggcaataccggactatctgtagaggccctaattctatacttcagaatctatatgatgttattggtccaaaagcacatgattatatctcattttatggtcttagagcacatggtagactatgcgaaggaggtcccttggtcactaatcaggtaaagtatgagtcttgtccatttctggagcatgttttgttttctgccagggtcctggcactttgccatttaagagttgtgattcaaagaattagcatgtaaaatatttggcattgcagatttatgtccacagtaagttgatgataattgatgaccgcatcacattgattggatcagctaacataaatgatagaagcttgcttggatcaagagattctgaggtatgcttttctcatattcctgtgtccactatattttggtacgttgcaccttaacttgtatggttatctgatgaggagtatttgcttttcaattaactctatttggtaaatggcaaatcgcttacatcaagtaatgttttaatgttggatgtcgattatctgatagtttacccttgtcaccttgtagattgccgtggtcattgaagataaagaagttgttagttccaaaatgaatggaaaaccttgggaagctgggaagttttctctaagcctacgtctctctctctgggcagagcaccttggccttcatcgaggagaggtttgggatatattgcatttatgctttgattcttccgtcggtaatcttttgttaatagacagatgttcttagtattgcagaatctccaatgtactctttaaccatttttttctaggtatgctagcgattcacataaaatatatggtatgggaaatgtatttttaattaaatatttagtaatatctttccattagatagtataaatacatttgaatctcattccaaatggtagtgaccttgtgaacatctgccccgtgacaaaattccacatacatttcacaatatatttacgtcttactgtactaatgtcttatgtaagccgctataaacttttgacatgtgataaacaatttgatattatcacgatatgcttgatgaagctttcttatattcattgcagcagatagggatatcatgtgcattattttgattgtttaaaatataaatgtgatatacaggtcagccatattatggaccctatcgatgactcaactttcaaaaatatctggatggccactgctaaggtgagagaaaacataaacgttttttcctgccatagtcaatttaaccctagccacttgtatcactcaaaactgctaatgctactcttcctagaatgtagaaatcgatttgggatgtctaacctggtacttcatataatgttaggatgttgctttcttcagttgtaaaatcctaaactgcatggtgcatattatatcaaatgctttagtcatggcaatctccactaatactcataaattagttaactgttttttttggcagacaaataccatgatttaccaagatgtcttctcatgtgtacctaatgatcttatccattcaaggtatgaattgaccattcgatttcagttgctctttttacaaattgctctagactctaaacataatgagcatgcagggcccaatttcggcagagctttgctcactgcagggataaaatcggtcacaatacaatcgatttgggggttgcccaagagaagctggaaacctaccaggacggcgatctcaagggtacggaccctatagaaagattgcagatgatcaaaggtcaccttgtttctttcccgttggatttcatgtcccaagaggacttgagaccatatttcagtgaaagtgaatattatacgtctccacaagttttccattagcttctttttcatggaaaaattactcccctactgccatagttgtacatagtgcagaggtcaacctttaggtgtttcacatattttgtcaaatagggaaaagaaagaaattatcaacccacagaccggtggaaaggttacaagtacagtttagtcaccggtacgttccttctctttttgggcaagagaacactctgctcagttcattctgttcgacacaaagaatataggagtgtagatagtttatacggcaccttttttccccttttttaggcaagaattactcctgttgagttaactctttgttgacataaagaaaagctttcccccccttccaagctgtgtctcagacttccagtacgtgcacattttagtctacaactaaacaatggcattcgatccatacattttggttgaaaccaatgacaatccatgtaatcatgtactggtatcgcctctggaaatgttcagtgttttcctgcatttgtaatgtttcacgcccttagcttctgaagagcagaggaccagggccagttaagactaatgctttcatgtcattctttttttttttgtcacaatgaaagcttacaaaatacaaaggaaacctatacgtgactattgaaattctggaatgcaaaatggtgtaactaaactaacctgtaagcaatttattagttgatctagggttgattgtagtttttccctctaatgaaggtaggattatgattactgacatgtcttttgtttccaaaaacattaattttttttcgtaactattatctggtgtgtagcttttcccctcagatttatttgtaattcttagcacatgagagcgaatatggtagtagattcttttcaccttgcttttataatatattagtcatatctaaccaattatcttaaactcaagaagaggtatgaaaacacatgacctccatatattctcaaccactacctttccatatacctttaaatatgtatccacaaaggcgaaatctcttgttgttactgctgatagtctgctaaatacatgtgaattccgtttaccactcgactttgagttacaaccattggcgcgtgattcgcccatggttttcccacagaattcccggtgctaagctagctacctcatctgtcggtgcggccacttttgcggtgattcgcttgcgttggatgaacaacagaacgaactgggctatacagcgtgcagacgcaggattgtccagcaaaaactccaatctccagaagggttctctttacacgcatgatgtttcatactgacgtagtactactactcatctcatcaaatttaaaccaccaaaaccaaaatgctgactctgatcaacctgcatcggttgatgccaaagtgctcgcttaaattaacacggggcatttgtcccattgtgtcatcagcaacatggatgcattatgcatgatgatggatatacgcagatgcaggtatagtagtatcttccaagatccgacactaaagtctgtaaagaggagtggttgcagaagctagcgccgtacgtgtcacggttgttagaggggaaaaagggacaccatatggtatcgtacgtgttcagtactgcaatgcgccggccgttctctagggtaagtggatgacacgtgaagaagacgacgactagatgcatcgtctaacgtacaaggtgtacacagccttgggtactagggtgtatattatgtgtgtcaagggttaattgctgtgcaacgtcgtaccatttgatttttagctagggaataatggcgatcattgcatcatgcacattcatccattcatgattcatcttatcttatatatttgagtgcattcagtgctgattatgtacatacgttgattctattgatcattagatcgccatttgagatgtacagaataatcaaatggactaacgaatatatgacaagatgctacgtatatatagctcgcctgatgcatcattcataggacacaccaaataattttttgtctagattcacctgtgtgattatggtgtgcacgcccctttagtttctcactatacatgtgtatacgtactcttataaaaccttaacaatatacgaggtttttattgtgcttacaacctctcacgtgggtttaaaattaaaaactgacatgtgtagcaccttataaatgttgggtttattaaacaaccaacacggataacatcaatatttttttaattaaccggcatagtactggtttttaaaaaaggcacgtacttttaacgatggcattgagccgacctccaccgagctaaccctggttttttcaaagtccaccctcagcacgccatcttgctcgctaccacacccttagtaccttccttgttggcacctcgtcctctccaccgcggccgctagcctcctcctcacccacaacgcctctttctctccgctgaactgctggtcctccttgttgcccgcaacacctcatcatctcttgactctctctccctctcctcttcttctctgtgggaggccaccacgtgagtaggagtcggtggcttgaggggtaggcggtggtggtagagtggagacagtgttgcaagggagggagcaattggtctagccaactggagctcaacaacagctcaatgagcaggcattggcgattatttggaaatcgaggactacgtacatgatctagctgccacgtgtttggggttggccagattttgccaatgcgatcagttcgatggcagcagccctcttcactagagctacggtggttccttactccttcaccatctcgttcatcgatggccgcaccgacgctctagcttcttctccctcctatgattttgtgattgttgactttgtggggattgggggaagggttggacaacatgcctgattcttataattcggctcgatgggatgttgattctataatagcaattggagattattgattctatggggatggggagggagggattggctcaattcattttttttagataatggaataaaatatcccggcctttgctcatcagagctacagccaattattacaaaagtaacacccaaacactgagtgtggttcaaatgaattaaacacacccaacaaaataaaaaatcaaactaacataaggagagcacatttattcaagtctatttgtgaatctccatccatagtttgcaaggagttgcatgaccgttgtctcaagcctacgacatgcaaccttcataagctctcgatcatcttcacatatttgcagctgtgcccaaaatcggagccaatatgttgccctggaaattacctgcatatatgagatagatggtgatttgtcaaaaaccatatcattcctagtcaaccatagagtccaacaagtatggcagaagctcgattcatataactgttttttttttgtcaccttgtcggtgatgattgtcaatccggtacttatgtgaaattttgaactagaatctattagatttcttttaccagtgctagttaggtagccaatgttctctctactgcgatactacatatatactattcttatatatatgatactgttgatatgatgtttaaccattcttattgatatttagtgtaagtatatagaatataagtaatacttaaaatatatttaatataaaaaatgttcacacttttctgtccagattcgttgtagtatgaaatgtctcatccggtactaagattgttatattataagatagagggagtatatatctcgtcgatgcacttcttattactgtgtttacataacaacaacactcatccacctaatggcctaatgccctaatctaggactcgaatcgtgcctaggccgtaccagatctgattaactagctaggagtagagccaaacaaacaaacacatcacagctgcatgggacgcgattgatgtcatatcatcactcattggcgcctagctaagctactcctaattagcgcccaggctagcttattagactagtccattaagctagcgtgccgtcacagtggcatccacgcccaccgtcgtcagctcgctcgatcgatgtggatccatgtcatccatatcttggctagcttttccttcagtcgaagaagatgcggtggtgttttttcctcattaagattacgatcttgcctcgattttcataagcaagcttttcaaactactaaacagaaaattttctatataaaagttgttttaaaatataaaatatattcatccgggaagtttgtactcccttcattctagaatatactacatccgtctcatattatttatcgctttgagttttgtttataatttttttatcatttgtcttattaaaaaatttgaaattattatttattttgtttgtgacttgctttattatcaaaaatacttgaagtatgacttctctttttttatatttgcactaatttttcaaataaaatgaatggtcaaacgttgcaaataaaataattaaaacttaatcaatcatgtacagcttttctcgtattacatgtgacatcttaattttaatcttcatcttcatatgtttcaaacgagctagtttgtcatctttcttttcaataatgaaatgttatatgtcggttcaaaataggttcagcctctaaaaacaaaagatatcggtttgacaaaccctcttcctaaggtctcctttagatcggaggattttcatgagaattttagatgattgaatttcttaagattatgtttctatatggccatttggattggaggaataggcttaggcaaaatcctatcgaatggcttcctacctggccccttcattccaaaggaaaataggaatgacgaagtaagaactcatgtttttgttttcttttcctaagtccaatgcaccctctctttctgtctctacttcctctctcattcatatgatatatttcctgtgaaccatccaaaggctttagctcaaacattcctgtgtttcaaaatcccgtagtattcaaaagaacatgacaattcatttctctgtttctctaacatggtcccatatttcaaaggtgccctaataagaacaaatcagatatatagatttctatcacagaagtctaaaggagcacacctaacatacaccgcaactgaaaattttgatttatatccgactaattataaaattatgctgtacaaattaaggctgggtttggtagagtgttttagctcagttaataccttgtttttagtgtatgcatttctcaaactgttaaatattgttttgtgaagtataatttttttaaaaaataatacaaataaaaatttgcaaatttatagtaattaataccccctctgaaaaaaaactacttatataaatggatttagacatatacatatctagattcattcttacaattacttttaactgcacgggcggtccctaaacttattcggatatgtcacaaatacatttttggttcctcaacttgtcttgggtgtcatataagtctaaaaggctccaacccgcttcgtgtgctgacgtggcatgtcatggtggcgcctacgtgtcaatagaactcatatatcagtcacatataaaaacaagtaagaacatattttttatcctctcttttttcatttattttttcaaaatgaaaaacatcattttctcctctttttcctctctttttaaattttattttttctatgtaactaacatgtggatcccactgacacataactgtcaccgtggcatgacacgtcatctcacggagcgggttggagtctgttcggacctatgtgacactcatgacatgttcgggacctacaaatacattttgaaagcttagggacctacaagacatatccgtacaggtttaagaaccgcccgtgcacttcccttactatttttttcacatagaagagtatttaattaataaatcattactaactactaatctgaaatcagcgtaaattcgactttggcttatagggacaccacacattaattaagtggtgtatattattttgattcactgtattttgttctcattagagtaattaagacaacgtacacaagacgcatatttggttgaagagtggccaacatccacggattaattataatggggaagggcgagtacattatatttttctttgtcccatacacaataaatttcgttggtactaccacagccatgtttggcccaaacgcacgtacagatgatgatagccacaaacaaaaccactcgtgaagacgattgcgtcatcttttggatctacaggttgctagaaaattaaatttatatggcgccgaaattaggtgcttaatttctttagaggaattagatgcttagttcgacgtatatatacgacgagcgaccgatgaagagtgtgaataacctgctatagcaggcaaatcggcgatcgagatcccgagatcaatgaatacgccttcccttttaaaataaattgatttctgactgtagacttatactcactccgtactacaaagactctatttttttaatttttagatacaacgttaaaatattcatcgtatttaaaaaaaattatgattactattattattattattagatgataaaacataataatattttatgtgtgactaatttttttaaataagacggtcactcaaacgttgaacatcaaaacccaaaaataaagtcgtagaggaagtattttacgatcaaatcaatcccgctagtcgtacggctcgtgcccatctatgtcatattcatcaatcagcgaacttgttctttaccatgcgggccatgtagataagagatctatctgtctccatttgtgagatttttataaaaataccatttcttaaaaaaaatataaaaaaaaatttgtgagattttcagagaaaccactctacccttcttagtcaactaaattagcgtgattacaatcctcttataataaagatctgaccgagagccaagtcatcgactcattgagcagtcttctttcctaccgtatgagcagttttattcgccaatctctgaactcgttagattttaacctcctgaaaagtctttcagcctatatatccttcggccagaagcagctccaagaggttgatcaccacgtagatcatg

SEQ ID NO: 25170 - DNA, 12654 bp, Oryza sativa
gatggatggatggccgggcgtggttctgtgtttttgaggcgcgggttggggatccagatcatcgttcgttcggggagcagttcacgctgcctatccttttccagcgttgggatctggtttctagccccatcttttcgcttatacacgttttgaatcgcttattagggtgtgtttagtttcagaaaaaagttgaaaacttgaagaaagttaggagtttagaaaaaaaagttagaagtttacgtgtatagggaatttttttgatgcgatatgatatgatggaaagttagaaatatgggggaaactaaatacggccttagtgactaaaaaataatttaaggatcaaacttttacatacatgtttttagtgattaaaaaaataaaacttataatgtatatattcttagcgattaaaaaacaaatactataaaacaatgatgaaaaaatcataaaatcaaaattttaaaatttgacttaagaggtacaagcatgagcggaaaaataggggttcttttggtctacgagatgtgaggagtaaagtatagacatgcatattaatggttgaatttgcatataccttaaatggtagatatgttttggagtaaattgcatgtgctggtgatcaaaactttttaagcgttcgttttgtctattatttcccccacgttcttcatcttttactgtacaattatcatgaattgttataccgttgattaaatatgtatattgcctatataattaattcattgcatatatgacatcctaataagcgtctaactctataggattaatcatagtgtatagtttttaccttgattcatacacagatattttttcaagtttatatagtaccataagtaggacagataagcattattttttcctatttataattttttttattacacgacaaacacaggcataccattacacgcagcaacagtcacaaccctgcttatcataattttagttaatattttttactcaaattttatactagtacgtatacgaaaatgaacttaatttgcatccgtagtgccaccagcgttttgcgtacggatcatgcaaatttgtggatgcgcgttttggattttttggtagtaagtgagaccgagtcgttgaggaaggggtgatgataacactatacttttaacacagtaattactagtcttctcggattcgatcgtcgacgttagcgtagtgctaaatctaatcgatccccatgttgctgtcaaacctaactttcaatgatgctacatgaatgagaatatatatatatatatatatatatatatatatatatatatatgtgtgtgtgtgtgatctagagcttaagcaatactagattacccacaaatcagtgtgataagaaagcgacacaaatgaattaaattcactgtaattaaagaaggctagctagctgttcaactctggagagtgtactgtgacatgagccgcctgtgcactgctagccacggactagatttagtggttactggacaggattaattcagtattaaactgctagtgtactttgctcattgtctgatggcccaatttttccattagtttgttcaaaatttggccacctttttcctgaaccacttcagcttttgacaaggacaaaatgtgtacacatgcatgcatatggatggatgcatgttgttttactttgccttgaccttgtgattaggtaaaccttgatgtttattaattagtctgcatgcatggtcattatcgagtgattagggtcgctgttattcaagtgttttcttaatagttgaaggaaccatgtcgatcggtcaggcatgattaaggtagcttaatttgtggacaagattgaatgggttcccccatagtttattatatctctggttacatctagagtgagtgatgtgaaagtgagctatatgtgttttgtttttgtgggatatttttggtaaatcaagatggaaacacgaagcgaccagattatattgtatttcattagcacaagaaaaaaaatctacacttcactctctctctctctctctctctctctctctctctctctctctctctctctcaaactcctctatttcttagcacacactttaccacctaattaaattactgatgaaattaattcactttattacaacattcccccttatgtttctctttatatacaagttatatttcaaggagaaattttgtgtcctattttaatcttggtatctcagttacataggttggaacttttgcgtacaacaactaacttaaatatcaaaatttataatagcatgcaatatgtcatgaaaatatttaaaattatttgtgacataagaaaattgtctaaaatcatgttcatatgcatatgttaaaaaaaaaagaagaaaacacttctagaagagagagggataggagattggcaagtggatcgatctggttagggtagtattttctttgttataggaagcttgaaagcctctcactagtcactaccaccaaaaaaaaaatcgaaactggcccatcactgccggttcttttagaagtggaaataatatttggtagcaaaatacgaaatactttttcaaacttttttggagcctacgaaatccagaaatctaggacaccactattgcctctagttaaatactccctccgtttcgaaatatttgacaccgttaactttttagcacatgtttgaccgttcgtcttattcataaaatttaagtaattattaattctttttctatcatttgattcatcgttaaatatatttttatgtaggcatataattttacatatttcgcaaaagtttttgaataagacgaatggtcaaacatatgctaaaaagtcaacggtgtcaaatatttcgaaatggagggagtatcaggtattactcgtagtttaaaaaccagcaatgatactccgcgaataccatttgtcgacagtgcgctgccagttaaaaacaaaaaacataattgatgcagtgatgaggcttgtttggttggtagtgcccgtctctctgtggcatgacaattcatttgcacgtagctctcaaaataactagaaatttaactctttcaaaggaatagttagtccacataactgcagtaccctacttaattacgttttcatatatatcatccgtttatgtaaaacgttgtaggcccactacgatattctctattgctaatagaaagcagtttgaatcgttgatcctattcgatagaagagttcagatctatttatacaattatactatcctctaattagcatagtagaaacgcggaggagcattattgtcaaaaaaaaaaaggtgtgaaggggtataatcatcatttagccatgaataaacatttttttccttttctttttagctttttcaatggaatatgagcgatgctagcgtaatggattaccacatattgatctagccaaaaaaagacaaaacgacaaagttacccctaacaatcgtattagtaaattactgatttacccttaataacaaatggttcatatcatttttactgatagtatataatactactagtagagagcaccgagtatcgctcaaagatgatatgataggaacaaatggttttatgtgctaacacgcttgcctatctaaaatgatctttatgtgtgactaatctcgctaccggtataatattgaccacaaggccagggctatgtacttattcccttcgtcccattaaataaggcacgcacgtattttataattcaaccctctaaatatttgaccaattatattttattataatcaatttttatttaataaaaataatatatttatattgatatttaaatttactttcatataattatgattatgttgctatagacatcgtaatatttaagaaattcaaagtcaaagattagttttaaagaccgtgttatatttgaccgtgccttagtcggtggaacgaaggaagtattagacatgaataataggtaaatatatatgaaaaggtgacaattttgacagaaaataagaattgttttgcataaaaataaagcatgtatggtttgactctgatatatgaacatgtccaatggtttggactattgatttcgtgatcgatgctggccctacgtagatggagaggatctgacctgaaaaaggccagtactgtgtgccactgtggcaagtgattgcatcacacgccatactttgccgacaaatagtgcatacgtgagaaatgcctgtgctctgaactatactcctatatatgtttccaaatggacgtcggtgtcgatcgattattattgtttctgttatgaccaccaaaaattttaaaatggttatatttataatgcacgaatgttgcatagcctacaattaatgtgactcggcattgatgataatgatgatgttgctcaattataaattttttatatgggattcggatggtccagtgtgaaatagtaattttttttcttcagttttttctttgaaaaattgtgactcatctggaatcaagcaccaatgccgattcatgccaaggaccgatagtaatgaatttgtattgccaaatcctatactagtagaaattaaggagtaaaatctcatctccaacaatagccataattttatagaataaaaagaggttgtcctgatttcctgagaacctcgaaaataccttctactcaatccagcaataattttcatttccaatgcctcattttttttctcgattatagatgctaataacctaacaggcaattttctgagctcattcctgttaaaagtatacccttaggcaattcccaacccaagacactagacattctttccatcaactccacatcatcaagaaattagtactagacactaatcttccaatgcaaacactactattccatatttcaatttaatgctacttatctcacatgatgtcttgaatgttgtgtagaaaccatgtctgatgcaagacatggtttccttctctttcctcatttattcacctgccacatcatttttcatcctaggtggcagcttatttaatgctatggacactatcctagtcattgggttgggaatggccttagagcacccgcaatggtaaagtaatgtgctatctataaaacatgtacatctcagcaatagactagattaatagtaaaccacttcaatggtatgtctacatgggtatctatagctctctaatccattgcctcatttttctctatagactatctccatattagtagatagttttgttctctctcttcatttaatctcttccaagtaggaaatatgctgacatggatctcttgtagaaaggctatagataaccattgtgggtgcccttatatgcgcaaattaatattcatgggaaccaaggaactttgtatggacacacgacttaactaccacacacgctttaggccctgtttgattcagcttacgattattataatctagcttattaggagtaagctcaaacaaacaagtagattattatagcagattattataatctataagccagattattataatctgataagctgctctagaggagcttttttcagattattgagtggctaaagacccactacccctacatacttgagaaaaattacccacctatgctatcaactgaacagatagctgagggcattatagactttagcctttcaaacccaataatccagacaaacaaacaactcacaacttattctatgccagcttattataatccaacttatagtaatctggcttaataatctagattataataatcataagctgaaacaaacagggccttactgtatttataggcttatagccaatttaatatactcctagatcgcatacaagtaaaaacatgataaacatatttgagcacaaactcaagatagattacatacatgcattatctctacttttagtacatgacactgtttactttttaaatatgtttaagataaatatataactattatttattttgttatgatttagtttatcactaaaggttctttaaacatcacttatacttgtttatgtttccaaaaaatgaataaggtgaatggttaaacatacgtttaaactagaaaaatatccgtgcgttgcaacgggtgaatgttattttaatcttagtattgttatacggtttagctaggataaaattcattgtgggaatttgcttggatttttttttagaaaatcatgagctgcaattaggaggcggactttcatcccaagttagcatgtgagttattttaaagaaatttcttatacggcttattttgtatttccaaaagcaaatgaacttaaattctgactcaaacacgaatttatatttccaaaagcgaacgaacttaaaaactgactcaaatacgaatgacatatcaaaataccgacaaaaacatatttaatttttataatagtagagaagtcaacagtgtcatatattaaaaaataaagagaatatcatctaaatctgatcaagtacgaatttgacgatctgatgacagattaagcatgtgtttagtttaggataagatgtaggataggttagatcaatccctattatttggataagatggtcccatttatttgtttggcatgaagtataaaatgatcccttttttcgaggaatgggagggtgtgggtcacatgtcaatgaaaaagaggaagtgggttttattggtctgttacttttttaagtatggagatgaacgagatctagatagaatattcatttttagagatcatcatatcccacatgtcttcgaaccagagattataggtttgctcttcctcaacccgtcctaaccctctatttccaaccaaacacatagggatgaggtaggatggttggactcattctatttttttaataggatgattcggtctgtccgtttgacatgagagatgggatgtgatggttcagtttttagaggatgtctcacatgtcagcgagactgaaaagtgggctggattggtccgccactttttaaggaaccagcccggatcttagggaaatatttcttttcagggatcatctcatcccacctatttttagaccaagcaccttaaaaagtgggttcgacccaacccaacctatttcatcccttaaaccaaacaaatgcacgcacatgctacagctaccatcgacgatataggcacgtttcacatggagagggctcctctaagacttgggtcgctgacatatggtcccacaagctatggggtccaaatgttagcccccaaaatcagagggcagtaagttagaggatcactttcctgtttcacacatacgtttggtacatgatcatggacaccttattaattaaatagttagcatgttcttcccgtgtattgcttgctaccatcaaaaattatgaatttaattagaaaataccatcgtatatattattgaaatgtggatgtatatgccccacatgtcattcttgtatgtcatggtattttacgtatccatatgatgttatttcttaaacttttcgatctctcataaatactcccttcatcctaaaatgtttgacgccgttgactttttttttaaatgtttgaccattcgtctaatttaaaaaatttaagtaattattaattcttttcctatcatttgatttattgttaaatatatttttatgtatatatatagtttaacacattccacaaaaatttttgaataatatgaaaggtcaaatatttaaaaaaagttaacggcgtttaaacatttagagaagagggagcatatgtcaacgtacatctcttttaagccaaaatctgcagatcatcaactggtgcgttattgctagctcatatttcgttttaaaaaaatctggatgcagatttcacgtgctcgttttagtatttcttttcaaaaataaaaatttttattaattcaaatggtttccccgtaaccattgtgattaattcgtgattagttcgccggagtactagttttgcacatgcgcattattattgttcattactaaggcccggtttagttttttttttcacatcggatatacggatacacattttaagtattaaacgtagtctaataattaaataaattacagatcgattcagccaggaaactgcgagacgaatttattaatcttaattaacccgtcattagtaaatgtttactgtagcaccacgttatcaaatcatgacataattaggcttaaaaagattcgtctcgcaatttccatcagaactgtgtaattggttttttttcgtccacatttaatactccatgcatgtgtccaaacattcgatgtgatgggtgaaaagtttttgttttgggaactaaaccaggcttatttccaccatacagtaaccgccagttaattaactaagtaatcagcagattggacgtgtatacaagttctgagatagccttcaattaatcgagatattatattcaagccgtttgatttgccatttgtgtgtataattgcgtcaacgacattagttgagtacgcccatgcctttcgccaattagtaattaaccagacgcttaaattaaataaacatgtttttttactacagctgtatgcagcgcggatcgtgcaaaaatcattaaggcatgtacaaccccacatataggggtgcgtctccaagagcctcgaagttatcatccaaacagatataaagacagctcatacaacccatagacagaggtatgtctgtaagctgtttaatgctttgcatatagttttgatcaattgcaaatacgtttgtgtataccattgtgtatatcaattgcaacctgccgtgctgtcgcctcgggacgacgagtttgtacaacgatgctgagcttgcctcttccgcctcggagcacgggtcgtcgccgtcgcctcgcgagaggacgcagctcccgtcgcttgactcaaccgggttttttttttttttttgcataaaaggcatcacagagacagggcaaaaagacccgctgtacgtgcccttagtgatttcgagttccggccgtatgtttctgatgccgaatttattttaaattcatttggctccccttctgacttttccctaatttctttatgtacagatcatcagtgcataattaatgttgttgatttgatgtgcctacaaagtactcctatatgccttaaccacacataatatatacccggggaatatttctgtttaattttctttaccaaatcaatatatatatcatacgactgttggaggattctcttctgttcatttcaggtatgaactcaactcactaataatttctgtaatgattggaacaacatgctacctaagctagctagctaggagaatacctaagggtgtgttagctactggaggttcccaaccgggaacagggtgcgcggaaaacggaacggtccattagcgcgtgattatttaagtattagctatttttttcaataatggatcaatatgattttttaagcaactttcgtatagaaactttttgcaaaaaacgcactattcagcagtttaaaaagagtgcgcgcggaaaacgaaagggggaagttgggaaccagcagtgccgaacacaccctaaatcactgctacaaaagagatttttctgtgcggcccgaaagaggttttcacatgtggtagggctagcagcacgcgctcaagggtctgcaaaaatcgatatttttgtgtgtgggtgcttatgtcatccgcacgcaaaaataaaaaaccgaaaaaatccaaaaaatagtcgccctcctcgtggtcgctgttgctgggtccggcccgctcccatctctggagccagatccaccgcccccatgcctccccactatcagattcgccgccgccgtgtgaggggagggcggtcgccgtcggatccacgtgggcgacgggtaccatgcctcaccacctttagatccaccgccgccgccatgtggggggaaggcggtcgccgttggatccacgcgggcgatggccgccatgcctcaccaccgccagatccgtcgtcgccgcgcgtggggaaggcgacgccactcccggccacctcctcttccccatcgtcgtcggcagcatcggtggcgcggatccggccatcgcgcgcacacgcggcgaacgaggtggtggatccagccgtcgtgacggtgatgggagtgatacggagccggctgtcacgcgtgctcccaagccgcccgccacccgaagtcacgttgctggagaatatatttttccatcatttttaatttagataaaactgacggggaaacatattctccagatatagccacattgcatgtggccgaagaaagtttccgttggcagccttctttacgcagctgcaagacctagcaattaccctacatggcccaccagcgaaaacatcataacgctagcagttggcggacatcgtagaaagttgtgtattttcattggcttttggtcactggtggcatcgccagctgcccattttgcagtagcgatggtttcaatgttttgttggtagatcaccggaatttttcgattgacactactagaatgtagggcaatcttaaattactattttcctccctccgattccataattcttaatgttttagacaataattaacatggtctccaaatatctttgactagattttttattataatatatacaataaatcaatatatatattttattatattactttgtaagataaatctatatatgttattatagtgccttttaaactaaataattttaaggttattgataattaaattataaaagtttaacatcaattttgtctaaaatgttaagaattatagaatcggggagtaatagatacatgtatgattcttttatgtattttaataaatacgataacataaatatcatgtgttttcttgtagccgcacacaaaaatagaaaacgagatgcatgatccagaaatgcaaaacctcacgcggagtacaatataatgtttagcttgaatcgaaagctaaccatccatttcatgtccctgacaactttcctagataagcttgcttagctctagacgaaacgaacttgaagcattaaatatacacccggatgctaattgagtcgcagtcatgcgtacggccaaacatttcaataaggaatttggagttagtatttgactgatgagaaattttttttaacctgttatgtctctatctcttggcatatcaatgagctattccatcctgtttttcctaaattttcatcgtttaattatttgaaaaggctggtgggacaaagacgaggattaattagacaaattaacatatcttctcaaagcaccattgtatatatttggaaaagctagcaattgatgcatgcatggtgacatcttctgtttcttgggttagaaacaaaaggatttcgtaagataatggagtactgagatattattgtttaggatttgagtccatatcagacgatgatatatattgtccaattttaaagggaattcgtgtaattctctttttggtgtagcttgaagaaaaaagagagtacaaattaatgctccctttcttacatacttaacatatatacatattgttctagctgtgatgtttggataaagcctaaccaatctccacatggatataatatacccttaattaggctctgtttgaaagctcattaagatattttgcttttgtgctgtacgcgaaacaagaaatattattagcttataattaattaagtattaactattacaaacttaaaatatgtttacttaattttttaaaagaaacttctatataaaaaattttttttaacaaacacactgtttaccagtttgggaaatgtgcttatagtaatatggagagagttgcaagagcgaaatgaaacaaatgaatacaccctaatactcataaaatattttatggtttgaacaagatttcgttacactttagaaacttaatttgaccatcaataccttttcaaatatttaatttaaaaaatgatgtgtatttataccttgaaaagtacatcgtagtttcataaagttattaattacttcatccatttcatattataagagtttttaggttttaaatagatacatgcatgcatccatgtatgtgcttcgtatatgtatctaaattcacataaatattactcccttcgtcccaaaatatatgtatttttagactaggacacggtctctgagatgtactttgaccaataatatatatataaataagatgttttaaatgaaaagagttatatattatgatagattatttgatgataaatctactaacatcaattttacatgattgatcttttttattttcttgttattaatagttaaagttgaaattgtttgacttttcactatgctaaacatacttatattttgggacggagggaatactaaatatggacaagaaatgaacagaccaaaacatctttacaatgttaaacagagaaagtagactttataagctttttctaacatagaattgatagttagtgttttgaaagtttgagtgaattttatcatgaacatgtttagaacatttgtgaccagaaggagtatgttgatatctctaaaaaaaaactattgaagtatcatgtacattaaactatgttttccgagctaggttctcctactacatttttttccatttcttttggaaagaatcacaatatatattgtagaagattaaaatgtggatat

SEQ ID NO: 25171 - DNA, 3970 bp, Oryza sativa
acaccattgactttttagtacgtgtttgaccattcgtcttattcaaaaaatttaagtaattatttattattttcatatattcattgttaaatatacttttatgtacacatgtaattttatatatttcataaaatttttttaataagacgaacatgtaaacctgtgcttaaaaagtcaacgatgccaaatattctgagacggatggagtatttctctccgtctgttgtgcgccatatgtcgtggcctgagtggattggagcgatccaacgaccgtgctgcgcccggtgggccccagagtacagacggccacgtaggacaagcagcaccacatccacacgtacgggcaggggccagcgcggcggtggtggccaggtcggtcagccagctgcgtatcttgtctccacgtggtgggcggcaggcaggtgtaaaatgattatttttgctctccgatcttttgcaggcgagtaaaatgatatacacgggctataaaaatttggcacatcgtgccgtacttcggtagagcagaaagggtagaaaaaataaactcttaataagctttaaagaaagatataaattggcttagatattaatgggtagtgtgtagatacgattaagaaaatatatttgttctcgaggagtagtcctcttgtttttacctgtcgtcgaaaacatcatcaaaaaatttgagaaatttaacaagatggatctgaatcgctccaaaaacatacgaatccaaattcaccttatacaagtagaaacaaaaacgcttgactatgagtagaaagtataattcacagtcaaatatataaattgtgtttctgattgtatgtttttaattgtgtattcaaatttaaacttgtatatttctaagtgactatatcatatatcgacatatcttacttttttttgacttaccatatatcaatctatcttatcattttttatgacttctgacatgatatgtacaaaacaaggagatgtccgcttaagggataaaaatccatctccatctatagctacctattgtaccaatgaactatttaagttagttaattaaatgatatgttaatccttgtagctagcagttggctatgtatcaccaccactgaactgtagtctacttactaagtttgtaaagatttttaataactgcggtagatttttcatctggacccatgggaatgggggaaattgcaaataaaaagaaaggaaaattgtatgttctgttcaagtcacagccttcgaaggcgcagctcccatagatgataccgtgagtactaattatttctttcaccaattaatcaatattatccctttctgaaactttggaattggataaatatataaaccttatcatggatcttaaggataggttttaatagtatgcatggttgctagtgctgaccgtcctactattcttcttggagagtaatggactcatgcattgctgtatgatttgattcatcacaaaaaagaaaaagcaatgatctatctagctaattctgtccagctttttcttgcagccctcgcatgggcggtttggcagatccacaacaatgcaagacggcaattaatataaagaacaagaaatttcgtttgtaccattctgaatctctgatgcatgcatgttatgtttaaaattatttcttgcctgcagtcttggagagcctagctagcttggtcaaggagaggatgatatacatacagatgcatgcaaaatcaaattttggatgaaatgttgagtggtatgcgatgagcctttgttgcacaaacttctactagctagaaacatgtgctagcttagtgacatttattgttttttcttctttttttaaatcctcatttatccgtacatgttcaagtgcaactgctatattccctagttgtctgtcattttgtaatgaatatatatatatatatatatatatatatatatatatatatatatatatatatatatattcaacaaaaacaatgaattatacataaaaaaagtataaatatgacaaaataagggagtgtctagatttcagaagaatgaaaatacattcactttcttatcacctggatgacaatctaataggtctcatcagtctccctattacttatttaaacaaaaccctttttttgttaaaatattgaacaacaaattattctaatctaaattcataaaatttagataataaacgtgactaataaaaaattaaaaccatacacaacaagaaaattgcagcacaaatcatacttacatagcactgcaattttaggcctatttagcaataaattttaggtgattaaaaaattatatacaaattttatggcacaaaatctaccaaataccaaaaataaagttttgtatcacaaataactaaataaataaataagtatgcaacaaattcacctttaaaatatatacatcttaattcctaatccatatttttttgagggaatagattcataacgcatatatgagttccgtactacactcttaatcgataaacgatggagattctacatctcacttatttgtgtgaaaagagtggtccaaggcccggcttacccgggatcgctagcgggcacgtatatgatcgctgttgtttatgtgtttacctagactccaaagtatttacagattgaccgcaatatacaattgatctatatttattaatctagatctaattatctaaagatatatcagaatttccaattagccagtttttatcaagacccatacctaaataaatccattgcccatattagattcagagacatattacgagtgaaatgccacacctaacctgacataccccccagcacattgaagaagggcaattaatagagcatagtatattcagtactacccctccttatccagtcctccacgtcaacaaaagaaagaaaaaaaagctcccttgtggaatatccggggtccccaaggggctatccgcgaaaaaggccaagcgcaccgcgacgcacgccacggacgcggggcgaatgttgctctcagtgcaagcgacggccccccgccatggctgactcccccccacgcctcttcctcctcctcctttataagctctcgcgctcgcgctggagctttcaccacgctcgctccatcgattccttgttctagtgtttctattttttatttttggctcaagtttctagcgtttcttgatctgctgctctgcttggttgcgtttcttgatttggttgggattggttgttcttgggcttatcctgtgtagcccgtttcttggattcaaagctcagctcaggtgggaaggaagtcaaagatcccacctggtgaaaacgtacggcgcagccgcagatcgattaattttcgcggaagcgtccccggccatggttgctgccctcaggccgcaggtgctgatctcttcttcaagataggaagcgaaacagagcagagcctgctcgtggaaggagaagctgagtttggctctgcagctgagactatccatctgcgacgaggaggaagaagaaggagctagcgaggatgcggcacatctcgtcgctgctgcaggggctggcgcgctcgctgtcggtggggaaggagaggaaggcggcgacggcgacgacgggaaggcggcggcggcgacggcgacggcggtgctgaggacatcggggacgctgtggggcgagggctctgagacgttcgccgccgtctgctcccgccgcggcgagaagggcatcaaccaggactgctccatcgtctgcgaggtcagtcagattctgctctcctctgcttcttgttcttgctactttgctctctctctgatctgcttgtgaaacaatgatatgatcacaattattggtggcatattagcacgtagtaactagtaacaacaatacaaatggcacatgagagaattccaacatgttaagaaaaagaaagaaattatttctttggttcatatttacagctgatttactactagtcgtctcaaatatg

SEQ ID NO: 25172 - DNA, 5747 bp, Oryza sativa
ttctcatttctgaccacacaagaaagcaaacaaacttcctgttcttatgtactttctattgacttctctctcgattgttcacctaatcttgtgttttagttcgctttgttctcttcatgacaattaacactatttttattattagtccattaactaactagaccagtgattgattaacgacagggtcaatttcagggtcagttaatacatagtttttgaggcatgttgttttaccaagttcttggatctggtgtttgtttttggcttctaggggttttctgatctgtgccaaaagggtcactgattacgtgtcatttatttgctgaagaaacaaggtgttttgggttctttggtatatctcacctttttcagtttgttggtgtctgggattctaaagctgcttttggttagttaaactctgtggctaaggtggatgcatggaaagtagatcacatcaacacattcttgagagttcttcctagatatgatttttggatataatagtttgttatcatcataaaaaggagagagaagagagagaaggaccttcaattagaggatatgtttttcttttcttaatatttacagcagtcattatgtaatgttcacaagcctttcttttttctttataatattgtaaaccagtaagaggtatcatagaataaacagcactggacaaatttggaaggacaggctgcaattagaaaaaatgatcgctcttttctattttatttatttatttattttgcaaccaaaggagtaaggacaaccatgacctaccagctctcaaaagctggcttggttcagttggttcaccatgatgtcacaatggaatctttaattttttgcattaacatgcatgattgtaccctagaacgttaaacaaatactcagagcagaaccacacacgtaatgtcaaaacaccgcaaaacaaaaacgaaaaaaaaaatcaacaagaacaatgtacaatttgatcatattggcttcgtactattccatccatttcttattacaagacgttttattttttttcctaaagctagcaacatttataatatcaaattagtcttattataacagcatttaatatattttgataatatgctagttttgtgtcaaaaatattttttaaaaaaattgattaaatttttaaaagtttaactagaaacaaatgaaaaggacttgtactataaaatagagggagtacaaaatttgacaaaaaaaacaagtaaatattagatttttgagctgaattctgaaccaaagcaaatttgtcttgtgtgtggtcagggattcgggtgcgaggaggggagcgtgttgtgcggcatcttcgacgggcacgggcagtggggccactacgtgcgaaggcggtgagggagtcgctgccgccggcgctgctccggcggtggcgggaggccgtgacgctggcggcgctcatcgacggcggcgagaagcggctctgcgagtgccggcccgacctgtggcgccagtcctacctggccgcctgcgccgccgtcgacgccgagctccgcgccagccgccgcctcgacgccgtccacagcggctgcaccgcgctgtccctcgtcaagcacggcgacctcctcgtcgtcgccaacgtcggcgactcgcgcgccgtcctggccaccgcctcccccgacgacggtggcggcgcccgcctcgccgccgtgcagctcaccgtcgacttcaagcccaacctgccccgtaagttcgccgtcaaacactcacggagacatcttccagtcgtttacatgttataaaaaaattaaaataataaattaatatataatagattactccctgcaaaaaaaaatgtttttctacaacttgtataagttatttattttaaagacaacttgtataagttaaacttgaatggagtcatttatcacatattaagctacgttattgttttctaaaacctttttataaccatttacatgacataaccaacgagaggatgtctctctggagtttagaataatttctctgcttaatataagagtatgtcctaccgctattgctgatgtttgcattgcgtggatgcagaggagagggagaggatcatggagtgcaacgggagggtgcagtgcctcgccgacgagcccggggtgcaccgggtgtggcggccggacagggagggcccaggcctcgccatgtcgcgcgccttcggcgactactgcgtcaaggattacggcgtcatctcggcgccggaggtgacgcaccgccggatcaccgcccaggaccacttcgtcatcctcgccaccgacggggtaaacaaacaaacaaaatacatatacttatcatctctattttttttaatatatgacatccttaattcttattaaaaaaatttaagtaaatatcttgttttttttacttgatttatcgaattttaagcaatattaatatttttaagatttgcatatattcttttaaataagacgaataatcaaatgttacaaaagaaaatcatcaatgttatatattaagaaatggagagagtacaaaataaaattcattccatttttttaggacaaacatctcaacttgttcgtcttcgtctgcgcggcaggtgtgggacgtggtgtcgaacgaggaggcggtgcagatcgtggcgtcggcgccggagagggagaaggcggcgaagcggctcgtcgagttcgccgtccgggcatggaggcgcaagcgccggggcatcgccgtcgacgactgctcggcgatctgcctcttcttccactcgccgccgtcctaaacaacacacacgctgacacgcacgcagccaacaaaaaccgcacacgccgacgacaatgtcgccgtcgtcgttgagaggcgccacaaaaaggaaaaaaaaacgcagattgttacatgccagaagaacaatgcaatttgccgccatgattgggacggtgcacgattgacctgacctgccggtgatgaactctgctgctgctagtggatgaccgggaaaaatccaatcctccggctttcacaccaccgtcattgtcaaaaagttgtccgagattcaattcaacagcagccacaagaaaaaggcagggaaaaaaaagatgcattttgtcctcatttttttttttctgcatgtatcatatggctccagaatttctgtggtggtggtggtggtgacaaaatagtcactgttattgttgtggtacatcaatcattcaactctcccatgaagagggtcatgaatcacaatcttcctctgaaagtctgaacactatgtggcccgaaaaattggaattttggtagtattatgcactgaagcatcagggattatttagcagaattgtgaggaacaccaccaaccgtcagatttgagcgacagcgaagcggatggaagttcgatccatggtggctgtgggagtcgacggagtcgtcttcgtggagctagctagctcgctagctacccgccatagcggctttttagcgattctggaggctcctcttccatgatgccggctccggtagtggccaggtattcccttattgtggttgtccggtcacccagataggtgtggtctaggaagttgctgtatgctggttctccaagatttttcgcagcgaggacactgcaaattaagcaatcagtatcgtgaaaggcgactctaatagcagaatggccaagattcaacatgcctaacaaagtaatggctgataatgacatttcaatagaaaatgtgctgctaatggatagttcaaaacaatgatttccctttgcttcagaaatgcatctcactttgagatgacccaaagcaatagcattttggttagaaatgcatcttgctttgacatgccatcgatgggctgtacccactggaataaaaaaataaaatgcctaaccagtggagttaatcagttgataggtgttcagtggtttcaaatagaacaagatacattttatgatgttaatcataggccaatttaagttactaaaaaaacaactctgcagactgcacataagatgttagaacagaaagcactcaccaatgtctaagataagcacgacagggtaaaatatcgtctctccatattctatcaatgttgtatcggccatagcgctgataatatatttccttgcttcctacagaaagaatcatgtagtatggaattagacacaaaattataattctgagctgtctactgcaatccctgaaagtaaataccttacacctgcctaagaatgcattaatttgacatggacgtgtaagggaagcatccaaactaacacaataaatctaatatctgacaaaggaaatcaactaaatgtcccagtattcacagttaaaaaaaagcacacataacaacaatcttatagaatctgataggatgtcagatgaagtcaagaacagattagtctttactcaaaacacgaacaatttatatcctgtaatagacctaacactgtaaccaaattatgaaacctcatcaacatacgaaacaagagtaacactaactgtccagaattgtcataacacagatatccataccagtatagtcaatggcaagatattaaaatgaaatgtacaactgatgagaaaatctggttgtgatatagattcaacctttgcatctcacttggaaatattcttcatcgctatagcgtgcacagacaacctgaatcaaagcagaaaaaataattccattgcagggggcagcagctgaacaaaacaagacactacagctagaattgcagtaacagaatataagcccttactgctggatttgcataaggcaccccatccagtccttctggaacaacctgacagcatattagagataaagaaaaattaactgcaaataatcataaaagacagcctaaattacagaccaggacttaaaaaatctaagctccaaacagcttgaggtttccaatgaagaaactgaaaatctaactaaataggttagcatccaatgaattatttggcacctaccgcaagaaacctaaactcatgctccctctcgatgaatgctgggacctgaaaatatcacttttcaatccttcctcagcaaaaataggttcaaaaaagctccattcctttgccttaacagatgtgaagcattatcacagggtataaaccacaatacctcatcctcctttatttcaaacacagtgacaacgatcagttcaccctcacatggctccacacttaagcttgagaactcctacaagtcagtccggtgctccagtgaaaatgagagatttatcataaatccaagaagcaaatgcagattcctaacaaaagcacttactagactacacaacttcaatcaaacaaatcaatcacagaatttttttttcatagcttaaaaaagcactctgcttccattcgttcactggccataatgagcaaaagcaaacaatccccaaatgcatattgcagaaaagctcactcaagcagaaactaaattttatcatgcttgtaaaatgcaaccttatagcctaggtagtagtttcccccacttttgatgtcacgccaaactataattccattccaaattgagaaacatgtgattcgatagtttcatttcatatggtaatcaacttgtagctccatttcttttgcttctttttagcatctacagtctgcagcgcacactctaacagtagcaactgagtccctgaccttggtggcctcgatggcgatgccgcgctcgaagaagatcggggcggagtgggcgaagacgcggcggaacccgcgcagcgccgc

SEQ ID NO: 25173 - DNA, 5201 bp, Oryza sativa
cccgatccccccaacttccccctccccagcgccaccttcccccaccccaccccgaaacccaaccactaaccctagttgtcgtgacgcggtcggaaaacgcgcgcgacttctctccctacctggccatcgccaccccggcgcggcactgcccttctgtgtgctagtaccttgatctgattgtgtgctgaatcttctctctctctttctctctctgttcaatgctctatgctctatctttctctctttctacttctcctttttttattattttcttcgagcgaaaatatttttaagttctttgctagcagttctggtttattagatgaagcacaaaggataacgagtagctcttcagtactccagtttgttttttcaattccggtgatgcattttgtcctacgtttgcctttgaaagtgtgtaacgaatggtcatcagttgcagcctaaaatacgctgtaatttcatttcctctatgtttcacatcgacgtttttcaaaccaagcaccatctttatctcatcgtactcttttttgttttctgttttaccagtttttttttacagttcttgatctgaaacggagacaatggcgagagaggatgagaaggctgacgcaatggagattgatgggcagcatcagcaagtggccaacaccgccgtaccagatggcttcaatgctgattacctcaggatctactatggtacagtagtgcttccctttttcttctaatccgccactgaaatttaagaaactaggcaccagacagtgtgctctttttgctgattattttctctttgtcttggataatccgcagaaagctgcgatcttgaagcaaaatatttttctagaacacactggagcaaaatattttggcatatatatacactgtaatagtggttgtaggtaatctatatgctttctccatggaaaaatgtcgcaacttcttgcaactgcagtccagaataatagttattggtctgtgcagttcaaatggttttaactaaaagatgcttaatttaatatcacagttgatctgccatataatttccacttaaacaattgtgatggccaactgccagtgctaatggttttgtatgtatgctacaattgcaggaaagctcttccctcatgttgatttcttcaagtggctttcatatggaaatggtctgttgttgttggttcaggatctagttgtttactaattgtttcatctatataatacgaatttgtccttttttagacgggaaacatccaggatgtgatcagtcgtatgttggacgtcgagagttctcatttacactagagaatgacatctacgttcgtttccagtcctttgatagcgtggctgaaatggagaactctatcaaggaaaagtgccctttcaagattgatattggacctgtatatagtgtagatgtatgttgtgtaatcacttaacttggacattattttttttatgtgagtttgattttccgcattaagctctgttttttcaatatcttgatgaaaactgtttattttgtagcctgcaaagcggcatgcctatgctcaatcaggcaacaacgtctttgtgccagttgagagagaacttattttcgatatagtaagaaacctgcaaaatttctcctgtggattttatttgtatttttcatcaagcatctgttccaagctgtgaggcatttcaacatcacaggatatatcagattacgatgatgttcgctattgctgctctggagctgatgtctgcatggagtgctggcctttaatgaccattgctatcaaaatcttggatgcttcacttagaggcatgttgttttgcaatgcaattaattaaacacacatgcaaacactcgcttttatttcagtttaattgacttgaattgcagatctttagtcaactattttcttggttagtttgacttgtaacaattgaaagtatgtgtttacagatgattttggtttcaatcacatattgtgggtatatagtggtcgtcgtggtgtccattgctgggtttgtgatagtagagcaagaaagtatgcatgatgtttttccctttttcatttctccatttagtttggtgatcctaaaatgctctggtactttcctgttaggctcaacaacgaacaaagggctgcaattgctgattattttcgcgtctacaaggtggtattcctttattcatgatcctagatgtcgttttgttgctgaaatcttcctgtatggatcttttgcagggtggtgaaaatacgatgaagaaagtttcattgactggagctgttctccatcctttccttgcgtatgtctgaatgatctcagttccttgtttttcaatcataagttgaaattgtatatgttttatcagtacaaattgaaatatagccaaataggctgtaatgaaactctattttcctacagacggtcatacactgatgttctgaaaggcttctttgaagataagctactacttagccaacaactatttgcatctgaggagagatatcagaaaatacttgatcttatccctgatgaaagtaagaatgcaaaccttaactagaacaatatattttagtatcatcctgctatcaaaccatttctcatttgtcaagtcttgaatgtcttcaatcattgtaaagtgtgtgtcatttctagatgttgctagtgagctccatgataagtggcaaggaaacagacgatcttctatttcaaaggaagatgtaaatgctaccaggtgggagcaactaaagtcaaccttgcagtcaggaaaacacaaggtccatgcataatctctcgcaatcctacttaattttatttgcacatttactggtgtatcagttttaatcatatcgagtattgtattctcgaggtttcatcacaatgttacatgtgggattggttgctaattttcattctattttgttgaatgcacaatgatgttttttttttcatgtttcttccacaggggcttcgaagatgtatagaagagattgtcttctcatacacatatcctagacttgatatggaggtaaaagcaaaacgatcaacagcacatgtttgcagcaagtcataaattcattttctgattcctattcgacattctggtgcatatcaggtttctaagcacatgaatcatttgctgaaagcacccttttgcatacacccgaagacaggttagacccaagtatatttcctattttttcatctaatgaatgaagatacttgtttgcactagaaactgtttttgttggctgtccgtgtgtatacacttcgtgtatccgttggaaatctctaatgcaaatgttccttgagtgacacatttttcacatttatatgcattcatttcatgcttacacttatacgtaaaatatgttctgcctaatgagttctaagttctaacaattgttttgaaatctttccctaggccgtgtttgtgttccaatcgatccaaataactgtgatgattttgatcctacgacagttccaactctgtcacaggtgtgtccttagagccaagcattaaaaaaaacaatattctgagatctaatttacctttggaagcatcattatgctaaactgacttgttgaaactgttgaacttaaccagcttttgggtgagctcaatgcagctggtcttcgtactgattctgaaaacggcaagtgataaattcttcacttttaggaatcctgtgtttaactatttcatcctaaaactttcagtgatcttttgataatcctttaatggactacagattgggaaagaacatctcttgaaaaatctatcaggtttttcagggcatcgtttctgcaaccattgctgaaagcctgcaaggtatgcagtatttccttctacatttctatggcaggaaactggatatgcttgtttagttcccagtcaatctcttccatatcttaaactgaatggatcgggccctatactcgtatctactctcgctacagcgctttgcttgcaagaaatcgtctgtgttcttctggttccatagttttccagggtcaagtctcagtttctgccttgtaatgttgcaggaggaattagaaagctcatacaatgccaagctccagcagtccaagaataccttgacttggtaaaattcactcaacttccagctgatcttaccaacctagtgccccatgaaaagcttcttctccatgagacgaaccactgaacccggcattggctgtgttaactggttaaccacaacgctctatgaatgaggagcaaaatactctccgatgctgctgtcatgttagctttgctccaaggaagttgcaattgtagaatatccagtgaccgtcttagaggcagcttggtgctggcttgaaccttttgatctttcatgttgctgacttgatgttattaggataaattcctttaattgttgtgaaatgaattttataggattcctataagtcgctgaaaagaatgattgttaaatgcttcataccaagctagtagccgctataagatctagactagaattagtaaaattaaccatcaagattgcttagagcaatgctcggtttgtggttgatgactgttgagaatttctgtaagatgctgtaaaaataaaagtttcatcgtagtttattttacatatagaatttaatatggcaatatggcattcaattaccatattctccgctaataatatgttgctatgtttttgtcaaactgaaataagttctaaccttaaaaaaacaaagttaaaacatctcatggcctgtttggcggcttgtcaaagcgccgcctagcagccggacgctagttctgtggacacatttgttaagaaagtaggtataattaaatgatgaaaatgtgtgattggttgaaaattggaggtaggtggggaaattgaattgtggaggtttgtgattggttgaaaatgaaatgttggtagagaagttatattttaggataaattctaaaggctaaatgttatatttttgggacggatggagtaaacaactgttggctgtcaataagcgctgaatgttgcagccaaacagacccttataatataaaacggaaggattatttacaagagtggttgggtgtgttactgtccaaactaatttttttcatgtgatgctaatttatacaattatactacactgttaaacagaccccgtctctgtctgatccattccgtcatggatggaatcatgtgaccaggatagtgatgtac

SEQ ID NO: 25174 - DNA, 9741 bp, Oryza sativa
tgtacagatcccatgtgaaaaaaaatcagggcgatgatcccctgatcccatctggacgtacacgcacgaacgtcggcatgcacccggttggttggtagctcctcggcgaaatcatcaaacgaatgaatgcgcgcttgagtcagtgcgcatatgcactggagttgggacacgtggccggggcctgcaggctcgtctcgtcacagcaaatgctgctagctatactccctgcatcccagaaggtagcatgggtctaatcctatcaagatagaggtagtagtgatactctttatgctaaaataataaatataaaatagattatgatatatgctcagattaattatacagtgcaagacgatgtatgtttatattgtaaaacagaggaagtagtagtatttaatttaaagttgatttattttgaaacaaatacgtactacgtggtgacgaccggttggaccgggaccggattcactgcgatgcagccaaagcagtagttccatgattttgctctccgttattgcttgcagagtggagcagcgaaccagtggggtttggtatggtttccagtggttgcttccgctacctctttgcacctactttcgggcgcattgaacaactgccatgtcttcgagcaggtaaaaaggctataagccggctataaacatattttaaagaaataaagctaggaagagagaaaaaacagcaggctacagatctgtagctagctatagcacggactccaagatgtaatgtgtgtatgataggtgggaccatgtattaatagtatagtaagcaactattatatgaattgactattatattggctatagatgatttgaagctactactagtaggctacactattaaacttgctcttctcaagctacttcaagctttttatttctggtgagtggtgaccattcctagtttcctacccctcatgtttttctttctttatttttacagcggttaaaaatcatcagtgcgagcgacatggaatggaggtaaaatgttgtgacaatttgttagggaaaaacataaaatgtaactttgttcaggtgattggtaatccgtaaaaaaatataaacgaagcaactaaaattaatttacgaatgaacctccatagctgtattcccatctatttagaaggcaatgatatataaaatataaattactcctttccaatcctaagttaaatattttaatttttaactatccatttttataaactcatatagtttaatgtcataagataacttaggataaacgtggaacaaaagttacacttttcaatctgttaaacaatatgtttttttaaaagttttctttacgaaagttgttttaaaaaaaatcttattaatctatttttgaaaaaaataactaatacttaattaatcatacattgttactctgttttacatgccagagggatgagttctcaattcaaccgaacgaacacaaccgtaatatgattaaaaaaaaccccttaaatcaactctagaattaaaattaagttttaaaatttaaattttggttgggttggctggtaaaccacaaacaaacgttggagctgaccttgaagccttctagaagacaaagggaatcagagctaaacataaccaaagggatcactagcttctcttcctctctctctctttgtttttaagatagatcatgcgtttgactctagtacaagtgtagtgccgctaccgaattctcgctgtcctcctcgcagccatttttatacgccaacctcctcttctcttctcttctccaagaaaccacagccaggctagcttagcgcgcgccatggccggaggagacggcgccacctacaagggcggcatcaaggcctactggaagcgccggggctacggccggctcgatcccgcctcctccgcgcaccgccgcccgcgcctccccaccgcggagctcggcgacggccgcggcgcggcaggaggagcggggcggtggcggcgagggtggcgagtacgccgccgcgggctcgggcggcggatcctgcgggcgctctcgccgcggcggctgctggcgcgcctccgcgacgcgtacgtgcggggcatgctccgcctcgcgtcctccgccgccgtcgccggcggcggctccgctctgtacggcggccccgccggcggcgccgaccccttcgggcggccgcggccgctcagggagtacgacgagaaggcgctggtggagatctaccggtccatcctcgcgcgcggtggcggcggcggcggcggggtcgtccccgtcgccggcgacgccgccgcggtggtcgccgtggcgcggctgcccacggtggcgggagcgtgaccgccgccggatttggcgcgaatccgaagctttgtcacgctcttttttttttctttttcttccctttttcccctcttaatttctctcatgcaagacttgtgatccagaattttcgtactgctgtcctaatcgtgtctgttaattaatcttctttaaatctgggggctgcaattttgcagtgtattattcgcacgtctaattatgcgatactgggttaaattaatcttcttaacggacagcgattaattgagttcaagaacgagtaaaagtgtaaatttacttgtatgttttactcatcgatacaaagacttcgaagaaatcattttaattatacttgcggtagaacatcctagtatagatatccgcgatgtccatagcacacgcactacggcactacaatcctaatagtgtaatccattttttagaaaattgaggtgctagcggccgcatccgttaatcatttcgactaaattatgtgcatgacattgttttttttttggggtgtgaacatgatcttaaaatacaattagaggcttataggaatctagagatattgatggttgtgacaaattttatttatttgaatagaaccccttctccctctcacaagtcacacctccacctccattatgaacactagaggactattagaggtagaggagcacatcacaataatagcaaaagatggagttgcaaactggaagatgataatgctagtgaaacaaactactcaggtactcgcagctattacaatttagaaaaaaaggttcatcgcttatcctctctaatgatgctttgtaattacaggtcaactcaacgtttctacactctacactgtaggggtacgtaaggcctgacgatgacttctcaggtttattttacggattaagtataatattccccctgtcccataatataagggattttgaagggatacgacacttcctagactatgaatctaaataggctctctgaccagattcatagttctagaaagtgtcacatcctctaaaatctcttatattataggacagaggcaatatttgttcatgatatttgtggcacccggttacacttactgtactgctcttaaataatcgtcatgacattctcacttctctctctggaacgatgtgtacatatgctaaaacaagtggaaaattgcttgtgtcacaaagtctattagccattggttgctaatgtctattagctcatttaaattagaaaaaatatagacgactgttgataaatgatctacttgtgtatagaaataaatcaaatattatatatattacaaacctaataaagctaatcaagaaatgttgctatagaaaggtttggagcaatacttttgaaagtgttcaagaaatgttatcctcacgtcgcattattttatcatttccggtggaaactgagagagaaacattggttaaagacaagtttgctcatgaacccacttgtcaatatcacatatcctctctttctctcttcctcttcttcctcatgttgttgccttctctctcttatctctctcttcctcttcctcttccccttcagtcaggagcgaggcatcgccgatgagcagcgatgggggcagaggggattgcggcaatgagcgacgatggttaagggagcgaagggagccgacaaccccgtcctcacctcctccatcgccacgccctccactcatcttcttccgcgtcactggatcacgcacccgcttgctggcttcgtcgccaagaactgcaagcgcatgggggaaggtgtgtcccagctgtcttcgtgctcctcttccacgaacgcctgcagccgccggaggaagggagtgaatgggacttcttcctttgtccgttggcctcaccacgtctcccaccagctcatcggcctctccgccattagcatcctctcccgcgcccactgtctcctctgttgccaccgccgttgtcgccgtttggctaaaaagctggcccccaaacccatcctttgctgctcagtattgtgctggagcaggaagaagacacagtcaccaggggcacattcgtacttttcacagtttctctcttcatttgcaccaaatataataaaataataggtccgatgtccaatagctaattaccaagttttatctatgtccatgagaatgtacacgttctttgggtggccgtgtctcgtagcaaaggccacattagaatgtactatagcaaattttgccttattgttcctatgcatgggaaaaatctatgggtgttcgttaaaaaaaaaagggaaatcaccgtgtagcccaatctggcccataagcttttacaaggcggaataagtctatattgcctccctcaactcttgccttgaatcgtccccctcaaccgcaatacctggtataacgcctcctctatgtttgaaaaccagagcaaattagcacccttggctgtttagatagcgatttcatcatacatgacacttataggacccacatgtcagtcagaaaaaataaaaaaaaaataataatcctacatgtcagccattctaatcttaattatttttcttttccctcgtctctctccgacgaggcgacgacgacccgtctgcccgtccgtccgctccttcctcggctggagccagcagttcagttgttcggctgccgccacccctgttgccaggctccctacgaaggccacgagcctgttggaacaaatcatgacttgcatatgtctttggtttttgcattagttgcatgtagagaggaacgtgatatgttcatgtatcttgtaagtgatgtgtatgtgtgcatcacgtaggttccatgtttgcatgtagaatcagtcagtgctagtgaatggcagctgcgtgtgttgcagcacaactagcaactaaacaggttaggtgaataacaagattagcggcaagttagttaggagcatgcaggattagtggagcacgttgtggcgtggctcgcggtcagcccggaggagcgaatcttggcgtaagatgcgcagatcgttgtatgagtgagtggctcgtagtcgtgcgtgcgacccggccgggctgttagctatgtgcatgtacgggaggctatataagccgtgtaatcatcagttagttttagcagatcagcaatatcagagaagccagcaaagacgtgcgtcgccgacggaatctgttgtgtgtgtgtccacccaatttgctgctcgtgtgtgttctcccgtgagtttgttgcttacgtgagtttgtgattttcttgggccaaagctaacagagcccacgacagcgcctggggcgagggacgacagcacgcggaaggcctcctgtagcccgttgacctcgcgcctcctggtcatcgacgccgcccaaggcaccatgcccactggatttgtgcgtgacgaggccaagggaggcaaatctggtggcgtcgcgcccctccgccgcccggcggcacatgtcccgtgctccttcaccgctaggagtgcttcgagcaagaataggggtggaggagtgctcgcgacaagaagtctacgaaaaggcaccgacaccggcgagaggtggcaagaagtgctgtaacgcatgtctttcaggctctcatcactcacctctcgtctcgctagcaatgtcacaccaaatcctcaacacctcagcacacattcaccaccgcgccctgcatcggcgacttgccagtcacggccaagccttccaggatgttagcagggaaaatcaccattggcctcttcggcgacgaggtccccgccggtgcgtcccggctcctgtcgcttggtgtcggctagttaagatagtgtggggctacatgcaagcaggacggtgtggtgtcacacccggccatcccggcgctgaccgaccggctagcggcgaagatggacgccgcacgcgcgcgcaatgcgatggggacaggagtggcgtccacccaactcccacggcatatggtgacggccggcgaggcagcggcggctgaacaactgagcttctagcttccgtcgaggaagaagcgaccgaacgggagagggagagagagaggaggaagagagaagcgaggaaaaagaaaaaaaaacaaataagtgccacgtaggacatgtggggttattgttttttcttttcactgacatgcgggtcccctaagtgccacataggatgaaaccgctatcaaacagccgagggactcaatctgctctggttttcaaagatggaggagacgttatacccggtattgcgattgagggaggttatttaatcaggggcaagagttgagggaggcaatttatacttattccttacaaggcagggtccgacatttccagcccaaaagaatcggacccatttattcggcccaatctggcccatgctcggggcctagtttttccaggtaaagttgaccaaaagtcttcacctagtcgtcgtcttccctcggccggcctgaccatgaaaataaacgctacccaacgactccgcagtcacctcaccacacgtcgatggacacggcgcaccagtgaaccccctcggccccaccaaccaccaccaccatcaacatcctaccttacctctctctggcaaccgggtcccacctaaggtccacgctacacccggtccaccaacacccgtgggccccaccgctctctcgtcgtcgcaccgaccccaaccgaagcggtaacaaagccaacgtcccaccaccaccacacgcgcgcgctcgcacagacacacacacagcacagcggagaaagagagagagagagagagaaaggaaaaatcggcaccaccgcgaaagggggaaaaggggggaaggaagcgaggcgaggctagggtttcgattcgatcccgccgctgccatggacgccggtgatgcgtggggccgctcctcctcctcatcctcctccgccgccgccgccgccaggcgcctgcaggcgcgctacggtaagctcacacgacgacgggtcggctttctctcgatccatcggtcgatctccccagctgttggattgccatgggctgcgatttgatgcgtgggtggtggtggtggatgtgtgtgggtgttggctcagatctgtacatggggttcgacgacgcggacgcggcgggcgtggaggaggtggaggcgcgcggcggcggggaggcgtacaactgccccttctgcggcgaggacttcgacttcgtcgccttctgctgccacgtcgacgacgagcacgccgtcgaggccaagagcggggtatatgccacatcctcccatctgacaccgattgtaaccgtcagtatcagattgttgtgtttgtgattggttggatacttggaccgggccttggtttcggaaatgtgcaattcgtaggcacgcgtgcaaattttttttttagaacaggatgcctccgcaggtatcaacagatttcaactgtgacgaaccaagaccagcgaaagcttgcaggttttaggagttggaattttggactttttggttggagttataagattggttgttttggggtttgggtaggtgtcttcgtttgcttgattggagaaaaataattcgtagtggctatccatgtcggggagaatgattgattttaattttggggggtttagttggggacttgagttttttctgtctttggggggagtttgggactggcggaaaacatttcttgtgttgttcatgctagtcattagcctattacactctactgtagtttttatttattttctttcttgttcttagtatctgatgaaatatgttctctcagctttctttattttttgtaaatctgtggtcattttgcagctattaagatcccagctctattctctccagattataaagcacatcagcacttgtttctcttgaaagtgaaacatccataccaaactgacaatattacatattttcatttcaatctaacaatattacatattttcattcaatctaacaatatgatgattgttcttggcttggtggttaggattattatttgtctatggaagaaaagagtggtactaactagtgatcactttatgttttgtgattgggacttgttcatgattaatagtgggattcagtacaacttattacaatatcctttatgaactagttcaccagttcccttgcttcgatcacaaaaatgggcataacttttctttgttttgtcttaggtggtgaagctcattgaaattgcaggaattttcatgttttattgctttcgtaggatcgtttacattatatttggatttgtgagatacaccctttgattaatatttgaaattatgatggtgcttggatacgagggaaggaagtttagatggttactggtattgttttatctggtgctggtttaggaaattctcttttatctatttctattttctaagatgtttttctcagatattggttgttagttctgaccatcttttgtaaataaaaataacagcttttgtctgttgtatcagaatacctgtataattagtgttgatattggcatctttgtggtactatgtaaatattgggtagctgccaagctggatagtttctgggtatgtattagtaacgttggatttgtgacattttatttggtggtgatgtactttggtctatctttttgtgatgctattatttgtgcctcatctatataaccatgcccgagagctttcttgatatattcaagtcagtttatgaattgaaattttcaatgttagccttttcatgaaagatgtgacatgggtgtgattcataactgtttaatgtgtatattttagttgtcttgaattgaattgaatttcgattcttccatctttgtttaggtatattgttagactctttgaaacataataaaactaaattattcactgtgtgcttctgaatgattaaactttttgtataatcatatgcaattgcccttgaataggcattatttgtctttatgttagatccaatcagggatcgctatatgttactaatagaaattatttatctcaatattaggaggcaactaacaaatcattttcaaattcaaagcagaaatgccttcaattgagttggcggttctagccacaatgggcaaacatgagacatcttacaacatattgcacgtgaataatagtgaataggatcatgcggtactgtagcttcatacttcaacataaattggtttattatatagagagagtgttatgttgatcttattgttaaccttgagattaaattgttagattctacataaggaaaggcagcatgtaatttggatcaacttagaatgtaatgtctttctctcctaatgttttctattatcccagtctacagtatcctctctatctgaaaataccccccttcagccatattgtcctggccctcttatgtgcattgttaagcccttctatttataagaaagtgtttgatttcatatctttttctttatttagttggcatagcttaag

SEQ ID NO: 25175 - DNA, 2889 bp, Oryza sativa
gaaaattgtcagaaactaatgaatataaagctaactaggcgctttaagatatttaatataacatcctgcacaatctgcacggctgagtgagttcccattgtgtccatgctttttattgagatctctgaaccatcaaaagaacaaattccattgctgacaattggttgattgcattgtcacttagcacctcacatggtttaaggagaatgcaaattcttagatgtgccatgagaattttagttgaaccttcagaaatgatttttttttgctgcagcttaatgtcctattagatagccatagatgattattcactgtcaaatgttgattaaatatctgtgataatttttcagagctgaaccatctctgtcggagaaggatcagaaggagagggctcaaaggagtaaatttgtccgtgggcttgtgctctcgacgatatttgaggatgataacttgtaagggaggttatcaaccttaatatagcgacggcatggcatggtcaaggaacagaaaatacaggagaacaatctatgcaatgcagcaaccttgttcatgccgtcgctaatgctgcttccagccttcaaggccaactgggggccacccatcatgtttatgtatgcacgtacgtataatgtatgtctgccttcctgcatttgccgagagggcaacaggaaccagctgagtagaggagaaaggtgtttgtgtcccaaccttccacgtcgaataaatgaggacattgtgttccttgagtggctttgtgcatatatgaagagaggagagctactcgcaatgtattaggttctctctattttatttgatcaatgtaatgtaataataggaagtgttgtacaactgtattgtaatcccaatggtatgtgatactgctttgttttgtatttattgaatagccagtgtggccaattgatctagtactacatgccaagagagctagagaaaaaaaaagctagcgaatgcacacaactgttacggctggaaggctagacgagttctttgcctccagcttcactgctacctctcctgaagcgtgcacatgccatctcttcctcaatcccctctggtatgaattggttaggactagtaagtaatgggttcatatcctcttccataatgtcactaccgttatcaagatggaccataatggcactaccattaccatggtggaaataaggtatgtctccataccctatgtccacaatgttcaaggcaagaaaggcaagaatatatgttaagtgggtcccacatttatgtaaacaaattctacttcaaggtaggtcccaccataccataatctattctcatcctctttaatgtgtatctgtgttttatctcattattttatttcttaaggttgagccataagcttatggttatttttagcatttatgtcttatgactaaagcacataatgtatatgactagtcataaggtcttatggttcattcttatggcacattgtggatgcccttatgtgtggggtaatagaagggtgagacccatatactagtaaccgtaatggtagttgatattatggtagaggatacgcactcataaacaacagctcaattgtcactatcctacttcttttacgattaaagtagagggtttgtcgtttgggttaacatgattgaagttagtgtttctcatatttaacagtaaattctatagaaattatttgctaagtcggatgaagctcacatcaaaatctacggctcagcaataaacctctcaactttgtgttttcattgtggcagttgaagaggataaccggtctatcaagcggtatgcacgtcaatagaggccctagaatataatcgtcatggtaatgcctcagtttcatatcaatcacatcttttgttgttgtatggtttcactaggagtttatttcctttgttagaaatgaatagtgagggtttgtttagttcgtaaaaagaaaatttttgggtgtcacatcggatgtttgaccggatgtcggaagggcttttcgaacacgaatgaaaaaactaatttcataactcgcctggaaaccgcgagacgaatcttttgagcctaattaatccgtcattagcacatgtgggttactgtagcacttatagctaatcatggtctaattagactcaaaagattcgtctcgcgatttcctccctaactatgcaattagttttttttatttatatttaatgcttcatgcatttgtccaaagattcgatgtgatgtttttgagaaaatattttagggactaaacggggcttgattgtattttaagaatatatcataaatagataaactaacttatttgattctatatctttataagctaatggttatccacttaactaatatcacaaatattagtttacttaaacaccgtgggattgctggagaggtagggtgccacgtcagatgtcgcttttgcaaaaaagcccccgcatattggtttacttagacaccgtgggattgctggagaggtaggggtgccacgtcagatgtctcttttgcaaaaaagcccccacagttttgttaattacgcattggttcccgctgctatccaccgtcatcgtccgttggatctcgcctaacatcgatctgaccgtccacgcgtccaattgtgcccacccttcctcagccgtgcgatcgtcggttcgggaatgaacggcgcagatgtcgccacgccgcaccaaaaccctagccgccctcctcctcctcttctcacctgcgtagcgccgccaccccgcctcacgcatggacgcaccgcctccgcctcgacctcctcctcccctatgcgcgccgtcgccatggccgccgccgctgccaccgctgcaacgacgacgaagacgacctatacgacgacggcgaggacatgcgatgggagtc

SEQ ID NO: 25176 - DNA, 10174 bp, Oryza sativa
tgtaactgtacatgtgtagagatcgagacaagaagatgaagcttactgtttgtatgctcgctgctactactatattttgtaactgtatatgtgtagagatcgagacaagaagatgaagcttgtgtgtgttttgtaactgtttttaccatgttctttctttgagctggaaattataattgattctggtaacattttgtccttctgtttttaccatgttctttcattgttgctcgctatttttgtacacaggatgataatacatatgcatccatggtattctttgcggatgatcttacgatggcaatggttctcacgaaagattaaacctgacaatcttggcatactatcacatcgaacctttcaatttggccactctggaggtaccattcttttattctccattttttggcttaatttcttgatatgtatgtaatagcaagtatttaccctttttattgacttaatttcttagtctctatgtggtagcaagcctattccaggtctatggattatacattaacagttcttcctagcttcggcttatatcgatttatttttcagcatgtactggcttcaatgcctaaatatatagggatctttggagttgtggatgcgcttttgttgttttctaccagctgatgtactgtgtggttgtgtgattgctcatcaagattatttaagttcagttccatgctagcatctgttgttcatcatattagttagcttttgtttagtgttcgatctattgaatgacctctgttgccttccattttcttaatcccttgccactattgtcgttggcagaatgacagagcatttgcatcgatgatgttcgttatggacaatcttacattggtgatgttgatacatatggcatagaagactctgaaaacttggcaatctcaatatattataacatcatacctttgaatctggccatcctataggagtataggtactgttagtttctatctcctttttgtttcacttaaattcttgatttctatacgcattcggagatagcaaccttagttattctaggttcatagaagaaggaattcgctctagcctttacttaagattggtttttgaagatattaacctgatatgctcggctatttctttatgacaaaggctacaatattaatgtgatctcccttaccatatagtcatatgcttttatatgactcaagcattttcgatgatgctgactgtaatagtacagatactgatattagaattttctccaatgtttcatttttctaattctttatctcatcgaatgattactttatgcattgctaatagttgacatgtacagctcagtgcaatgcaagaaaacaaaagcagtacttgctgctcttctcatgcaaatatggtgtaatagcttcctacataaggtaatggtctgaatcccaatgtggagaaatacaactttttcttcattttttgtttgcatagatcaatttgaacttatttccataagtgagacagttacttatattccatgcaagctaggtgatctacaatggggagttttcttctttgagtaaggagagtctctgtaccttttttctcccaagttttctttaaaagttttttttttaaaaaaaactctaaaatggctgtatgttctgaaaaaaatcagactaaatcattagctcaaaataatccacatgctctgtattatggctaatatctttgtcagatcaaacctatagattttacaattcaccttatagtcagggaatgcaaatgaacaaccaaattaaatatttctcttggcaaattttccatctatggttgtttggatcgatcaaagatttcgaaactggtcagaaatttaataggtcaacatagctacattgtttaatgtcttatttcgctaaatcagttcaagatatatgcaacaatataacattttctgatgtactatcaatatattctatatatgctcgtataatagtgtgattgactctgtaggtgtttcacatccagctaaccacaaaggatcaatgcataggttaacccacaattattgcagccctagaaagtattgctgaactttgcatcatggaaagagtatatgtaccacacaaaatatcaatgcctttattatatgttggcatttgattcagtataattaatgtgattctacttgagtattactttcgaacgtggtgggcaactttctaaaatatctacctcatttcaattgagtttcgatatggcattttattgtatattccaatatggtgcacatggcatttttttcttacaggcaacattgcttatgtgatttttctgctctaatgatttcctgcttttggaatttactactgatctatccttttgaattgagattttgctttcatggacatgtttataaagtgatgattatatttattcattataggatcacttgccagtataatttcattaagataccatcttttgaccatgcaatgttttgtgcaaccctttttggaagaggaggatatatatgccatgtagaacttacatattattttttgcaaagcaattgctatgttaaaagattgcaacaattgatgaagagaagtatgcgatgatgttgcaaataaagaaccacctttttatgattgtggttatagcaccgtttcagttctctgatccactccattgtatgtttacagtattttgttcattgtatggttgctaattttgccgaaatgcacatgattgtacaaatagttcatagacagatcaatcggagcaattcatatttgaatctttatggaaatcctgatgtatgtgccagtttgttttcactgaatgttgacaactatgtatatatcgagcatgcagtgtagcgcgtgatgattgctagtacttatcatataccaagtgtaatcctatcttaccataaagttgatgtccactaactcataaatcttaacatgcaaccataccacatcgtcatccacttgcaataattatatatttaaccttatgcaagcatacaacatcatctataatttatttatttaattctacaaatcaacatgcaagttatagatggccataaggcccgcccggcacggcccgacccaagcacggctaggcacgacccaccagccatcgggccagcacgacccggtagtcacttcatgccgggccatgctagcccatgggctgcacctccggcccaggcacaacccaccaacagtcgggccatgccgtgccggcccaaaggcacgggtggcccattgtgcctttttttcaataagtctattttccctccctcctctttgggctgtgatatactacctccgtcccaaaatagttgcaattctatattgtttagcatatattaaggtttcagaagaaagactatggtgccccttattaaatggtgtttatgtgagagtgggaagatggttgagggtaaaatagggagaaatttgaatgagatatgattgattgggcaattagtactctagaattacaattatgtatgtatatatatatatatatatatatatatatatatatatatatatatatatatatatccctattctttagaaagtggcatatatatgtctatttttactaccttttctctgtgtgtcgggcctagctgccggcccatcgtgccgggccgacccaacatgccggtggggggggggggggggcaggcatggcccggcggtcaggccgggtcgtgcttgggccaggccaaaatgccgtgccatgggccgggccatcgggcctcgggccttttggccatctgtaatgtatatctaatcatcagccctcacatcattttcacaatattttaacaaatatgtctatcatttgtttgttttatgataagtattgataaaccctcatgtttcattattttcttttccttttactcctagctcgatcatcgaaaaaaatatattaaaaattgcttagtagttgccgtagcaaagcgcgtgaaatcacctagttagataaaatgttaagacaacttaaaagcaccattaaacttgagtcgtgttgtttcaacaaatttaattatatagagtagaacatcctattatcgatgggttgtaccataatggtatttgtatagtatgcgagacattgataccaagttatacgtagtcgtaaaaagatgggagttgtggatttttatactggttcaggctctaagatgggtaatagtcctaatccagtttgataccagcgatcaaccgaaaccaatgaaagagaaaactgtaaatttaccactgatttgaatcgttattttaagactgtcgctagtaaaagattaaaaaataacactagaagtctagaaccatcgttcaagtgatatcatcgcaaatttgagaaaactagcggtaaaattacaaatgcccaatggaagacaatggaatagatcaccgccccgcttgattcacccgtccgatccaaatccaacggtcatccttccatctcccccatccccacgcctcctctccttccacgagtcgccgacgaggcgaccacgccatctccatctcctccacgtctcgtcgccatctcctcatgcctacccactgctagggtttgcccctaagccccccaccctctccgccatggctctccctctccacgacgccaccacctccccctccgaccccgacgacctcggcggcggcggcgaggaggaggaggagaggctcgcctcgaagccgctgctctcgtccccgtccacctatccttccgcggggacggaggagggcgtcgaggagctggagctcgaccggaggtacgcgccgtacgcgaggcgggacgcgtacggggcgatgggccggggccccctgggcgcggcgggggcggggcggctggcggtgggcgccgccgtgctcttcccgctccggctcgccgcgggcgtgctcgtgctcgtcgctactacctcgtgtgccgcgtgtgcacgctgcgtgtggaggaggaggagcgcgagggtggcggtggcggcgcggctggagaagtggagggggacgggtacgcgcggctcgaggggtggaggcgtgagggcgtcgtgcggtgcggccgcgcgctcgcgcgcgccatgctgttcgtcttcggcttctactggatccgcgagtacgactgccgcttccctgatgctgaggtatgtagtccttgatgattctacttctccacgggacgcctcctccgagttttgtgtttaccgttgcttgcttcatatctcagtagattgatattgtgaccaattttgtttacaaaaaatgataatatgtcacttcttaggtagcagcgcctaatggctggttggattatgaatgtcgattttgtactctggctgttgaaattggaaatacatattagagccgttctgcaatttactttatatctactgggtgagggttgggtaatgcttgtttgtgctggcataggtgttttttggactggttcacaagtggttctggtatatgttctgatagctgatgctagaaattagcatgcaaatgcacatcctgtcagtttggcatgtctttatcagtggacttctaacttctgtgaaggcttgcttatttgctgttgtctctcacgacatgatgcatgccttgtgttcatttttggtggaaatgtgctaatattatacagctcttggtgatccttcgaataaactggcacctttaaatagtataatagtgtaatgtgatgataattggttatcgtggtaattttatttcattgcttagttcaatattatgatgataatatgctggatcaggtggtggttttatgcccttggttagcctccagtaggtgagaataagataacgattgagttctagtgaccggaatgatgttcagaacttgttctgaattataaatatgactctgacagatttattttgtttcttatccaagatggatatagattttttggtgatatggtgttgttctaagatggttaaatgttttaaaggattttgcccatattttgggacaagtagtagggaacattattaaggaataatagtctccaagcagctcaattttctttttcttgaagtatgaagttttaatcagtgcctcttgtatctattttatatatccaactgggtactctgttttcttcaggatgagcatcaggaacagtccaaagaattgggaagaccaggggcagtagtatctaatcatgtatcttatgtggatattctttaccacatgtcatcttccttcccaagctttgttgccaaggtactgcaaatatgttgtaactttgtttttgtacttgtaattttgaaaaactgtcattacaatgtactcattttgacttgtctcttttacacatcatttttgaagagatcagtggccagattgcccatggttggtctcataaggtacttgcattcttgtttggatttgcctcagttgtgtctgtacttttggtaaaaaaggaaaaaaaatcttacaattttgtcctgtgtgtctatctctagatacaagtcactattcaatgttttgaccattaacaatattctgtatcgattaaccatgtgaaattaacttcacttgaactttttgcaaaatgacttcatgatgtatatttttatttttattcccttttctactatagtatgaatgtataacaacatagtacagccattttttttaagagcatatatctgttgatagagggagtacagagagtagaaaaatagttgggtttattcagatgccgcatacagccgtacatttacaaaatgacttctgttttcatgcagcaaatgtcttggatgcatttttgttcagcgggaatctaaaacctcagatttcaaaggcgtttcaggtacttgctgaatgctgatgtccatagccttgagtcaatcatttacttgtattgccttaacttcaggtcagaacagcatattttccctttcattaagagttcacatctgagatgtgacttgcacatgagcgtggccacttaatttggccaaattgacaacatagcatatatgcgcatcagagtggtgaaacatgtaaaacataaaggggccttgatcaaaaagtacattttcttcttcataatgaccaaaagttcacaggattgaagttcaaaatagtgtgatgagatatttacaccacagtaactgaactagattacagcactcggtgcacttctactttctaaaatatttctgtgacggggcagctatgtcctttctgttgtatatatggcttcattttctgttgtcatgaatattgttaataccacttagctaaagtattcagtttgttgttgcttttgctaatccattcaatgcacaggtgctgtgactgagagaatccaacgggctcatcaacagaagaattctccaatgatgctacttttccctggttggttcctgattattgttttggaccctttcagttttgttactaacttagattaaggataatatcaatccatccaacactaaatgtataactttagttgcagcgatttctctctctctctttttttttaatttttaatgcaaggaatacattgagattgtttactgaattcccttttgaaaatggaaaataatgaacatatccaacacaatttaacatttttactgaaaggcaaacaagaatgtagaactatggtatatgatctgaaagtatatttaatacatcactctctaaattgcttcactttttatgtaattattttcttatgtatcatatgtaaatactgggctgttgcattcttctattacagaaggcacaactacaaatggtgattatctcctccctttcaagacaggagcatttcttgcaaaagcaccagtgaagccagtcattttaagatatccttacaagagatttagtccagcatgggattcgatgtctggggtgagtatcaatgacttttatatctttttattcatatacccttaaagctggcaagtgtttggcttgaaggccatgcaaggcagtgtctgccttgccaaattttacttctttggcttgtatttggccccacttggtttatcgtcaaattcttctaaggtttcttactttctttagcattggctctacttcattctcttttaaatacttggtaatgattatccagtgctatgcgccaagccatctatgtgctttttagaactttgtgagtttgatgtcatttttactaatcatatgctgaacaatttcaacttgtcgctccttcatctgtttaacgtatctatatctcatgggaaacttgtatctgttcaaccttactgaatctcatgaaaaattttcaggctcggcatgtatttctgctcctttgtcaatttgtaaataaccttgaggtgatccatttgcctgtgtattacccatctgagcaagagaaggaagatcctaagctgtacgcaaataatgtacggaaattgatggcagtggaggtatatacatttatctttcaaaatcttaaaaatggttttcaccatccacattttctttataatccatttgtatcacctgaaatcttattccattctaactaatattacatttttatttttgttctcaggggaacttgattctttctgatcttgggctagcagagaagcgtgtgtaccatgcggcattgaatggtaataatagtctacctcgtgctttacatcagaaagatgattgaaatgccttgccatcgcgcttctgtatactgatgctgagtgacttgcttgtaatatagtacaagttcctggtgttgcatgattcctcatgttgagaggagctatgttaatatcctcccagtaaactgtaaaattatttgtccatagtgtggttcagtaatcatgtcagttatacatgattacattcacatgtctgggacacacttcacatgcaatccatcgatgtgagctttataactgctactttgttacagaaactgaatcatctatttggtcttccctgcaggattattatgtcaaagctaatttggatatgcgtgccgttaattttcctatttgtccctgaaatgttatcgtacatgaaccgaagtcaaagtttgccattagtttttctcaccaaagggatcctttgtagatgaccacagaattttgcagcaagaatcagctaggcattaaaccacaggaattaatacatagggggatgaagggggtaaccatagaaatttccattttcttcagctcaggatcatgtttagtagtgttgatgtgtcatcactaacaatgttgtatctggtgtaccttccaactagcgaattaccaatcaaatgtaatagtttttatggttacctatgtgatccatttcccttttttagcttacaccatcttagtttaatatgttgattggttcttcattaaccttactctttacaatagcagaagttggggtgatgcctacattcaagacacaccctcccactctgtattcaatacatctgttgtttgccacattttcccttgcacgtatgcatttattggttgctaattgatctcatgcgttcattatataatctttaggtctgagattaattatttgttgccttcccgtgcacgtatgcatttattggttgctaattgatctcatccgttcattatataatctttaggtctgagattaattatttgttgccttctctaatttttgatcttatactgtatttatctgccatatgccatctaccataatgaatggggactatactggtcagggtagaaatatattggacctggctattcaagcttcccgttggcagaacgttactgaccagtatagctatcagcggtttacggtgatgtttctttctttgcccagcactattaatgaatgtatattggcttctttaacaatgttgctcctgtaattattattattttgtctttttggtttgaaaatgttctagtgccaggtatgcctgtcaattttagactcatttgaaacgcatgaatttcttagaaatgcagtcggaccgtgggtgattatatggaagtacgacaaaatttctaagaaattcatacgtttttgtcggactttcatgcaatccccctgtagtcagactgcgttccaaataggaccaacctagtagtaccggatttgagatcgctttggggaaaacaaaacaatgtactaaattgctgatgacgtttcatgctccaaaaaatggataaaa

SEQ ID NO: 25177 - DNA, 12639 bp, Oryza sativa
tagtttatcaaaaatttaaaattcagtttgatattttttttaaaaaaatgatggtttaccgagcgacttttatcttgagcaaaaaaacctttcagtattcgtgaaaactgagcggtttctatcgcctcttccagcaaggccatgcaagctaggtggcctgtgtccagctccaatggtacattagtacttatcaataactttaaaaaaatttagtttaaagacactagaataacttatatagatatgtcttacaaagtaaaaacatttctttattgtatataatagaaaaacataatcaacaatatattttggagatcgtgtcattatcaatagcgatcggagggaataaattttcagtgctcctatacgactagatgatggatatgggttaggattggatatccaatggctcaaaatccagctgaatactttggaacttgggaatgcacaaacagttaactgacatggacaaaccaaagaactcgaaacctaatttgctctactcgtgtaacttcgatgtaaatcgacagaatttacaacatagccaacattggcagccgacaatataggaactaatccgacaatatagccaaacaagtctgacagctttctaatctgcttgttacatgtgaagaaatgtaagttttgcaagcaccccatgagaagggcaaagtatcttacatcaaaattttacacactgtaaatttcaaatggccaatagcaggatcaactaaaaacctgaaaaacaaaaaactgagggaaggctccactaccatcaattagggtttgccttgctagttacttcatgtcagcaccaggaggcctgtcaggcctccaatatagaattgtattagctccatctgcaatatccatgccaacaactgcactgatctatcctagaattatatagttttgggctcgtcgcagggaaaaggagccaaaagaaggacaatgaaccagccagaaatgctactgatgccactcctggaacacaaagcaccaggtaaaccaatgtaagaagtagcatatttaagactcaaccatgcttttgatttctcgaaataaatcaaggtacacacctcttttttgtggtgatgagaaaactggcaaacccattatgttacaaaatatgtgggcaacaataggagagacgatattccctgcagtattttttgaacgaagtgattgaacaaccatgttgtcagaacaatataaagcttcaatcaaacaattgaattaggtaagtgcagtggaaggatgaagaaaaggagactggtgtattcaggaccttgctttaaagttcagctcttctagaaacaggttacatacttcataatcagtggtaacaattgaacttactatgcaaatcctagaatcattcacaaaaagatgtcttctcaaatatagctacctaaactaatttgaataattggagaagtaattcccgcaacaagaatatgcatagctggaaacaacaaatgcacaatgtacacatgcaacacacaaaagaaagagtaaaacctgttcgggtgaacaaaaatactgcataccacccaaaaattacagtgtagcctaactggacacctgtgaatgaaaggcaaaaagttaaggcaagcccagcaaaatgaagcaaaagtgatatactttgagaaaaataatgtacaaaatatgacgaatatattgaaagatcaaacatttgtttatagtttaagaacgaatacaaaggaaccactaacaaatattgacacctgtagttgatgttgtacgaagtcaatactttattttaaaaagttaacagtgcaatataatgatgatgataaactaatatgctaaataccaatgactgtgattagatatgaaggtgttgctacatcactataggttgcaaatcaacacggtgttgaaataacttcataaacaaagatacaaaaaaaatcgctttaatttcacatattagaaataaagtaagttaaatatagatcaaacaactttactctaaaaatcattaaaaggaaggcgttacagtaaagaatagaactaaaaaaataagaaagaaaataccaacgatcaggagtgatctcgtaaaattgcgtccctgttgatgtagttcgaataaatggttcaagtgtgctgttgatagaaaggctcagttacaaattaacagaagaaaacatcaacacataggtaaatcttaagggttgtattacgcagcagttcttaattcctatagaaacaactagataaggacagacaacatgggtataaacaagttaatagtaccagatcagacccttagaaatgaaattttggtacaatataaaagctatttacctaggctgaagaagactggactcagaaatataatgttatatattttgaatcctccacatagaagaagaggtaccatgcacgcccggaaaaccaattcctctgtaattggtgcctgaacaaacaagcatactcaaataaaaatcactagtagaatatataaaggaaaccatcgtttcagtagtaacatttgcgccatagaaagctaaaagttttgcataagtggtaatttttcatgaactgttagatggtaacatcctacagatcaatcgtactatatcaattaattgaaaaattccttgatcatcgccacaccacataacattccatcgccggtttacaagacaaagcaaatgcatcaaagcgaaggagagaacaaaccactacgcagttgcgccaaaccatcacatctcctacggaggcacggatccggtgagcaagcctctgtgcccagcctatctccggctcttcatagcctccgccgcacgaattcgccagcagccagagcctcgcgacgaacgagccagcgtacactagcgatgtaaggaggaggggaatcgccaccgcttgaagctgcagccaagcaccaacaatttcagaattgaagcatcaccaagctcaaacctgttagtattactgacatgttcagaaaggaaaaaaaaaaaacaagaacagtaagtgaggtcgcttaggctcaccaggtgatctctccgaatgccaaacacggcgagcacgacggacgaatctccgatgctccacacctaggaaggatggggaggagaagacgctagggacatgagattccgtttagggtttagggttcggaggggacaaggtggggggcacttacgcggaggagggaggcggtggcgaggagggaggccgaggaggagaaggcggcgcagaggaagcggcggtggaggaagacgtggagggaggtcgggggcgggaggcggaggagggccgtgggggcgtagagcaccgcgacgtaggagacggccatggcggcgcacgcggccaccgccgccgccgccgcgccgggtatcgccggctgcggggaggcggggtggtggaagctcgccggcgtcgccattagctccggcgagcggagggagtagagtagtgtccgtcagtcactcaagagactgaagacgggggacaccttctcccttctcgtgtctatacttctcaacataaaacaatgtaaaaactgcttttataatttggagtataatataaacatttttacattgtttactatatagcaaatgataaggcttagagaattttttttattaaattttaaagtgcttaaactcccctcttatacaattactttataatataagtagacaattgggaagattagctaccctatgatcagatggctaagtggtgcgattgcgtacacagtttattatgatccgatatgcttcctccgttctactgtgcaagattttctagcattacacaaatttataaatatgttaatgaatataaacacatataggaaacgtatacattgatcaatggatgaaccgtcaaaaagtttacgatatgaaatgaagggagtattactcgctacattttggcatatcactttctacggtgttcttttttttttcttttctcctgaagatgaatattaagtttttttacgtaaaacgatgtggtattaacatttgattgattgagttttaattattacatacttaaaaaataaattaatatgatattttagagcaactttcatatagaattttttcgcacgaaacacaccgtttagtagtttgaaaagcgtgccaaaaaatcttaatcttcatccaactcttgttggagaaaagaacgggccgtaacattttataatccaattactatctgtctttggccatatcactgtttttcagtgaataatgttgcagcttgcaaagtagcttcatttccggtcgtttcaattcaacatattgccaccaatcggagccgaccaaaggacggtggcaataccatctaaatttgaactgtttttctatctttcatgttcagtacaagccttatactcactttataagacgcatcatccgttttgaattaacggtccagatttgagcttgtgccatgctcctcatatatgcatttattagttcatggttgcactgcagtgagcatcttcgtccacattggatattggacattatcaccacattctaacacaagcgcagcacatccatttgccgcccgtatttgcaatggtgcacagatacacaatgatgttcatagttgcactgcaaaggtgtgttctgcagagagatacaggaggaacggaaccaggcgagtactcaagtatggcccttctgaaggcacaaaacagggctccacattgaaaaaagtagcgcacagctcaaccagctccaggcaaaaaagtagctctattttgatgttggcacagccgacaaaactgcggtttcatgtccacattcaggtcttcagaggagctttcttctccctgtcggatatgcgagcgggcgcgtttgtgtgcgacttgaagcggcctcgaccgccgtcctccttctcctggaagtttttaggtcatagatttagcaccatttcaattattgatagaaacaccaccttaagagttaattttgatgtttttaagtgtgatgaaagtaaaccttcttctttactatctggacgacatcctcgtcttgaagaacatggccaagcccacaatgttgcgggtaatgcctcgcacttgttccccatacaagtacatacttcacatccttgaccaaactcctatggatatggttgcagaagtcttcaactgtgcagccacctctatcctgttgacacaaaacccaagtcatcaaacatattgcagtcctttagaacaagtagtgcaaggcatgacaacaaataaagcttacagtagaaagaacaactggatctgtgaaatcaggttgctgtccttgtggctttgtatacactctcactagccccatttcctcccacattcttgctagtagcctgtccaagtttagctgcaaagaaatagtttatgttaaattcaagataaagaaccacaaaatggaaaagagaaccaattggggacagaaaactcaatacttctgcgtgcactgcggttttcaagatgctcacatcacacaaggcccaagggaagtaccagaaataacttgagaaggatataaaggtccccatcgtttggcatatgcttatgcttatcagccaaaatttgaattttcaatgttaaatttggagctgattttggggttttttcatcgaagtttatttttcagcctttgcttttggatcgataagaacacatatataaaagttttattcacaaactgctactcgtttgcaaatatgccatttggcatattctgaaaatatgccaaacgatggcagccaaaatttaactgagagagtaaacagaagatatataacatgcctgcaaattgcagctgatcacaagcgaatttggttgccgagcaagcttatccacatcatcaataccaacaacatcaatcttgttatatacataaacacattttatgtacttccgatttccttcaataacatcgatgaagtcatccacggtagcatcctcgcggaataacacctaaagaaaaccaaataactgtgttaatcatgcgtgcacaaacacacacatacacaatcataagagtgcgtgtgtgacctctgcgttgtgaattttgtactcatgcagtatctgatagcagagcttctcatcaacatgggtcaagggaatcatgctgttgaaagaaattccaccagtcttcttctttttgaaatatatctgttcatacaagcagaagtgattaataatagaccagggaaaataaacagtacagatacacatacgaaatgattcattagcaacaaagaatatgatttagaaagagcaacaccaactgtataaacatgactcaggtacaccatatgtaagacttgattcaaggaactagtcagcagagttacatggttcaaatagtccacagaagcttgctgaagagtgatttatgatatacttgcagatctatgtgcagaatgacttagcactgttatatttactatcagtagtttgacaaattatctgacatggcaaggggaatctgcagtcaaccctggcttgccactccacggttcacgtactgttttcttatgtaggcaaatgtatattttaccaagatgataatgatacacctggaattaatcctaatcaagcacatgatgctcaagatgtcatgcaaattggttcatttgttggaaatggaatcagatgaaacgaatgttgtttgagccccaaattgtccatcttgcgttttcaatgttgaattctaatttcgccctaagcactacctgaggaggccttttgttcagacgaagtccaacagcttccagttctctagttaatatttggcggtgtccttcactctgaaatgaaattcagaacaagaatccaataagcaaacagagctcaggtaaagcttggatcatgttcaatcacatatagaaggggaaagattggatgtaattgtaacatttttttcattaagaaaagaaaaggaactccatcaaaccccgcctcttgatttgcatcaatctaaccttaacaaactctccactaaaatcttctaagaactttcaagcaactataaaattgatagattcatttaaagacagtgtataaaatttcctgtctttataggacatatttacaaaatagcaaacatgagcactcaactgaacttgaagttcacctattttactagtaatattacaggagtttttattaagaaaagagaaaaaaaacatctagtgaaggagatatgcaatgttaaaaaagaaaaatggccttggtgaataagtagccaagtgttgagcttatcacatgattgtttgccctatattgtcaactttaaattcataatttcccctatttatctattgtttacaggtcacaaccccttgtttcttgtctcctaacttttaggttttcaaacttttagtttcctaaagctcaaagttacctcaagtaagataattttatcattataaaatatatgcaggtgcttgcagagtaagacagttgagcattctaacaacagaaggcttaattgaaaatgtggatactttaaaatattctgctagtaaaaggtgttgtttagctagtcctgagttcagaattatatcaaaactacgatgactgagactgattttctagtctatcatgatggatggacaatcacactacaaaagagaaaaaagtacatcggaccctttccaatctttaagaacattagctcttcaacaaagtaaaggactagaaaagcaatgaagcaaagccgatacagctacactacttacttttgaggcatccagaaccatgagcacaagatctgatgactttgcgacagcaatgacctaaaatgattaaaataaaaattaaatacaagttatttttgggtaaaaagacacagatgcaccgtacacattgtgataataaaaacattcacaaaatttacctgtctaccacgccccttgccttctgatgcaccttcaatgataccaggaagatcaagaagttggattttggtatcattgtactggataataccaggaatgcaagtgagggttgtgaactcatatgatgcagcttcagaatgggtcccagtcaacatagtcaaaagagttgactttccaacactgcaacataaatttcaacacggaaatcacagtgatttaataaacctgagaaaagaaaaagattgggactcaacagtttttagtagagagttgggacatagatgttttcatcttaaattgaacttaacaaacaacgtgctcacatgcatgctagaaagtatatggaatacaacatggaataccaatttatcatgggtaatccatcgttctaccaattaagatatttagatatcaaattcccatcgttctttttcaagtcattagatggaagagttagaagacaggcatgcacaagaatacaaggcagccaatagttcgtaagagctggaatggcatgcacaagaatacaagggaggaaacaatatatcgagaagattatattacaccaggttcttatacagttatactgatcataacagactccatgaattctaaatctatcgctacaaactgaaaggcttgaaacacaggattttagggtactcaatttatagggatgtaggcggaggagagacctgggaaatccaataagtgcaacacgaccatgcccaaactttgtgacttcaaaaccatctcctccaccagtggaaccctatgtgaccaaaatgatgcagatgtgacaacagaaatccatggaattcccatgactatgtcaactttttatattaccaaaagaacttgtaaggatatgatcaagatgaaaaataataacaaaaggaaatatcaacatgatatttcaaatatttcaaataacaaaagaacttgtaattccataccctacttgcaacaaaatatttcaaataaatgctcaaacgtcataaataccttagggggctctaataattgtgtcctcaactttgctatttttgctttcagttgtccaagatggtattctgtatgacaaccagaaataaaaattattcccagataacaatatgcaagacatttctcacacagtattgagtatgggtgggaatgtaagagatcagagataatcgttcattagctaaatacaacattgttaatagcaagttcacgttcagatacataaattgcatatatgcaaacagagatactcaattactcagttatgcctgttcttctagcaacaaatttggcatctgactgttgatactggacgagtatagtgtgtgtcaatcagaaaatggataaagcagggtatgcagtaaacataaatcaggcaataaaagacgaattccctgagtccactcgtcataacatggatgaatttgtgccaagcaaagaacatgtggcaacaaatcaacaatttcggatctgaacattgactagtggatgcacaaataaatggcccactggccatcattgatccaaatgtccataacactgaataccaacatgaagagaaattttagcaacaaaataaactggaaggttgagaatcgtcagtggccagtataactaattaagcagcaaataatgaagtaaaaaatcctgaaaataaacatatacttgcgatgctcatttgacatccatccaatccaccaagttaatttttatatcaatcactgacccagtgaaacatgctagtatagtttcatgatgaaagaaacgaaaaaaaaataatatgaaggaatgaagatgaattacagggttgtattaaaataaaaaacaacctgttgctttatttttctgtgtccgagccatctcggcttcaatctccttgatcctctcaaggatacccatcttttaacttgtgacgtatgcgaattactccaaggtaggtgaatatacgacctgtcgcagaataaaagaaacaaaagaattacaatgcagtgatttgtgcaagcatctgaggctgcccgacagctccatccctagacccccagtattgaaggctagactttggcaagggcaagacggaaaaccccttaacactaacaggggcggatccccaaactttttgggtgaacaaacaaactgttactagttgtattaagaatagaggtttaaggctctcagattaaagaggaagaagagctttcttccagatctacaagagaagctagggtttacgaacgcacgcgcgcaagcaaattccagacaaaagtagtcccggtgaggtgggagagagatgaatcagaaagagaaagaggatgtggatgctcaccaggatcccctcccctgccctgctctgctcgctcgccagatggagatcgccgcccctcccctgttctgttcagccgcgactcgtcttggcggcggcgcaaggagcggaggagacgaagtgacgggagatttctctttcttttacgcgatactcgactactccaactttatctcagtatttttattactttaaaactgactacttagagattactccatccgtcccataatataaaagattttaagtttttcttgtaacgtttgatcactcgtcttattcaaaattttttaaaattattaattattttatttgtgacttactttattatctactgtattttaagcacaacttttcattttttatatttgcaaaaaaattttgaataagacgagtggtcaaacgttgcaagcaaaaactgaaaatcccttatattgtgagacggagggtgtcgagggagaaccctcaataacagagagtcgtgagaccccctttcgtgagttcggccgggggcggaggcccgtctctcggaattcgtttgctcgtccctaagactatcaatgagctagtacacaaacggattatacaggttcgggccgcaatagagcgtaacaccttactcttgtgtttgggattatcgatgaagttacaagggttcctttactccggagagcactcttgcctcctctcttccgaagtttgggttttctcgggttcccttccttgcactgtgggcagggtcctccttttatagttctaaggggataccacacgcgccgattctacctactctccaccggggaaaggggggaaaagaccccacttcacctttttggccttcaagacgtgccttctctcggaagctaagccataaccgatccttgagcggaacccagcgccgtcccccgcctgacacggtggtcagcccggtcattccctcataaatgatcgaagacatgcaacagcccttcctcgagcagcactcggatgtgacgggtcacacctacccccattccgccggggtcaagggtgacgtgatgatatgattaccctatccatcggatgtgacggaaacgggccggtcacagaccggtcacatccgactggcaggggttagccagacgcaccacacgtctgccgcgagggacagttggggtgctgtgcatttacggctgttcagcctgtgctcccctctgccgcgtggcggccaggcgagggcctcggggcgaaggtgcgatagggcttgagggggcgatgtcataccccgagggggcgacgtcgtaccccgagggggcgacgtcgtaccccgaggccccccccgctgcttctatgatacgcgtggcgtgtgagtggggccatccggccaagccacgtggccagaggaagagtaattctcctctacctcacatacccccgggcccatatctccgatagagggagtatttctttttatgacggatggtggcctacgtaacatcaatactttaaagaaaaaatattaacaaactcggttttagagattgtgtcgacaacaatctccccagaccgcccgcaaccactaattgccacactatgcaccgccatcaccgttctttcttcatgagccaccattgttcctaggggtgggtaaaaaaaagactgaaccgaaaagatcgagactgagaccgaattttgtttggtcaattcggttagtctcctcagttaaccgaatagaccgaattaacaagaaatgtctaaatgcaacctacaatccactaaattcaataggattaaactctaattttcacatccctacttcttcaaggcatgcaacctaataagagtttttattcatacgtgtacaacatgatatgtaagtaggatatgtcacatcatgtactagattaacttattcttatcggaggtagtaataagagtaaattccctgtgtaccctgaaaactcactcaatccatttcatacccctaaaatttataagatcccttctatacccttcaaatttcaatttgatcccttccatgcccctaccattacattttccttcatttcattattatgtttggttgcaaatgtcttttttgcccttgatgctttaagtttgaatataaacttgaaaaacgattgaaaattttgtttgagtgcacaatatgtgcattttatgaaactaatgtgactaaatgattactgcagaaaattttgacataagtttaaaaataaaaaaaatgtaataaattaaaatatttatttgaaattttaatatgacaatggaattttttgatcgggaacattcataagaaaaatattgtgagcgttggtagtcctatttttgtataaatgctcctcaatttttatgactttttttaaaaaaataaatatattttttatttcattatctaaaagtaaaatttgtgataa

SEQ ID NO: 25178 - DNA, 9562 bp, Oryza sativa
acagtcaaatacataacaaattctcaacaaaagtttcatcacaaatcctaaaatccccagcccggctgccgccgaccccgcctcctcctcgtgcacccggccaccgcctggccctccgcggcgcccctccttgtgcgcccggcggccgcccggccctccgcggcgcccctccttgtgcacccggcctcctcctcgcgcgcccggccgccacccggccggccggccctccgccgccggttgcccgacgtcctcatcgtgtgctcgctcccagccactgctacgctgagaaacatataggggaaagagataaggagttagagtaaggaaagcgataaggatagttagaggaaaaagagatagaggagagaggagtttgcgaggacgatagaagaggataagtattagggattatatagagcgttttgatttttattcccggttagtaataccaattgggactaaagttaggggaataaaaatctcgggcgccctgacacggcttgacatggaatcaaccgggactaaaaatcacatagtcccattatgcttttaaaccgggactaaaaatgctttctagtcccagatttttaagtaaccgggattgttgtggtttttgggcaaccgaccaaagatggtttctccagtagtgtatgaaacataaattggttaagagtagtgcataaaaaagtgaaggcgcaaagatcacatgatgaatggatgcaagctattccaagatagcagcgcttaaagcaatggctggtatgcaaattaatcaatttacacccatctaattcacactaacatgagcgtgcatgtaatgatcgaagaaactgatcaaattatagtatgttgggaatgataatttgaatattcgactgatggatcaatgtatgatatacactaagtaatgcatccgcacttcatcgtcatcaaatgataaatacaacagagcaaaaatgacccattttagttttgttctgtcccgggccaccaaaacctcaggacggccctatgcatatagatgcacgaatgcgagtgagttcttattccttcagtaacctaagctagctactagttcacttgatgatattgaaatcatggtacctagctagtaactcgttattactagctcctataataatgtataagtatgtatattaattatttctctatgccatttcattaattaattttgttgtccgtctatatctccggatcatcgtcgccggcggccttgtgcctctcctgcttcactcctgccgccttcagctgcagctcctgtccttttccccacaggaacgcgtagagccccacaatgatcagcagtgccccgatcacgctacacaaaaatagttaagaaaaaaaaagtctcagattaaacacgggtattcatatattttccgtatttcctaccctacacttagtaacaagtaatatacatgacatatatatagctagcagcgagagtaatatatatgctacgtagtatagggaatcgaggtacactcagtgtttaggtgttacttttgtaataattggctgtaactccgatgagcaaaggccgggatgttttattccattatctaaaaaaatagggaattgagctatatatatatatatatatatatatatatatatatatatatatatatatatataaaattgcccaaactcacttttgaggggaaaacactccataaacatgataatttggcagtagacaccgcgccgattaaaataataattttcgattaaagaggagggagaaatcgcgtgaaatttctaaaatacccttgggcccacaagccatatcttccatctctcttctctctatccctatccgacacggctgaggggatgatggtggccggccgacgactcctcttcacgtgtgcggctagccgggaactcctctccctgcgtggcgctagccggcgaggtccttcccccgcgtgtggccagccgacgactcctctccccgggcgcgaccggctatcgaacaactatccccccccccggcgcacggctggccagcgagctcctctcccgcgcgcaccgaccagaacgaggaccaggatctccccgcgcacacggccggtcgacgagctcccccccacctcgccgaaacccacaggacgccccaccgctccgcgccaccagatcggcaagcgtgacggctcgtcgtcttcttccctccattaaatcggcagatcaactcatcgtctgcatttctcagttctccaaccaatttcccgattcatcgatctcatcgttcgttcgctctagctatcgagagtgatggtgtggtctgttcccgatgatggtgctgctgccgaccatgctgctgctgcggctgaggctcccgggcgacggatcgtggtggccgtggacgagagcgaggagagcacgcacgcgctcacctggtgcctcgccaaacgtcgtctcctcctccagcggtgacacgctcgtgctgctccacgctcgccgcccccgccccgtctacgccaccatggacagctcaggtacctcaatcgaaatcactggacacgcttttgtggtctctgctcctaattcatcaagccaacacctgggttgttgttgcagggtacatgatgacctcggacgtgatggcgagcatggacaagtacgccgccgtctccttccaggtgcgacagacatggggcggcgccggcgattgcaacggcatcggccatggaagtgtgggaggaggggatagggagatggaagatatgacatgtgggcccaaggacattttagaactttcacgcgctttctctctcctctttagccagaaattattattttaattatcgcggtgtccaccagcaaattaccacgtttatgaagtgttttcctccaaaagtgagtttgggtagtgtcctagggctaaaaccacatataaacagtgtcctgtagcaaaatttgccacatatatatgaccatcaagataatgagtaatattggcggctttgctttagtcgccaagaaaattaactggctgccaaaaaaattatgttttcttgtagttatatactcccttcgtctctaaatatttgacatcgttgattttttagcatatgtttgaccgttcgtcttattcaattttttttgaaataggtaaaactatatgtatatataaaagtatatttaacaatgaatcaaatgatagggaaaatattaataattacttaaattgttttgaataagatgaacggtcaaacacgtttaaaaaagtcaacggcgttaaatatttagggacggagggagtactagcttatgatagttataccttcctagatagatgtttgcgccgagcaacagtgagtccatgacggtggtgatgatgagcgagagcgagttgaacatggaagggtagatcggcccgcgacgcgtgattgcccacgagatgagcacgaaggtgataccggtgttgaacaccccctgccacaccacgaattacatgatacatcgataaatttctttagataacggaaaattcattccgacctttactttaagaaagctatgaccaattattattatgattcattatctaaaaattattattattacgatttaagtcaacaaaatgactatgaattatcgatataatgcaactaaggcatatactccctccgaaaaaaaaaatctaattgtaggatgaatatggacacatatatatcctataattagatttttatttttttggagtgagggagcatatacataccgagtaggcgacggcgagaaggcgcaggtcccagctgagcttccactccgaccagtcgccggtggtcaagacgccggcgacgagtgcctgcaggctccctgacaggcatgtcagcaccgtcgcccagtacttggacgggaacaccttggctagcttcgcctgaattcatcagtgtttttgcaaattagtttttgcaaaattaatttgcagtatagctagtgaacattacttggatatagatatttttgcaaaacatttttttgtgtgtgccaaactatcatatatatatatatatatataggaagaaattagatcctatatacagctatgatcaaacatgcatttccatatgccaaaagactcaaatcgattaattaataatgctaattaacctgcacgatgaaccacaaggcgtagctcaggcagctgccgcacagtagcagtgtgccggagatcgtcgtgccggcggggctcgacgacgatgacgacggcggcgccaccgcggcggcatgggaggcgcagcaggtgggtgggccagaggtgcagcagctgacctctgaagaggctgacgaccatcgtgccgctcacggacaggaccgtgcccaggaccttcatcttgccggcgcagcttgctatcgccagcttctcagcacttgatgaaaaagaaaaaaaaaggatgaaaaattgcaaatatatgttgaatgtcaccatatattgacatgacaactgttgattaattattttgtctattagtaccttgtatatggtgagtattaattgtatattttagtattaatatatatcacgaggtaaatttaaaaagtatatatgatgtcatacttctatatatagtttatatatgtgtgttgttaagttttttttaaaaaaattatatattgtgcatagttaaaagaaatgtaccggaaaataacggcgataatgaaagtgacgatagggatgagattcagaaagttggcggaataggcggcgttcgtgtcacgcagaccgtagtagtacatccctgttgccagtagaactctacaaattgtcaaaaggttgttagtttcaaaatgttagtttcaaaacatagaggaaattatattgtgaggtttggttttttaatttcttaaataaaagggcaattcacttttggtttttgctacaaaaggagtcgctaagggaacagacaaggtggcggcatatagcattcggagacgatggtgatggaaggatatttcaagcatgcatggatgcaattaatagcttttgtgctttagatggttttcattcaagcttggagtagcattggtatcattcaagcttggagtagcattggtatagcatatggctaaaacagtaaaacttttcctcccaataaaaaagaggtaaaactgtgtgatattagtagtggacggttgaatgtaggccttattatgcagaggctagaataaaaaaaaaatctctgtctgaaaaagttataatttaatgcaaattttgcgatcatatataagagaataatgttgagcatgacaagtaaaaacttagccttgtcgttgagtataacagtgctaacccgaacgttgcgttgatcgaaatccagccacacactacggcgttcatctttttcatcattcctctgaaacatacagaagaaggaagcacaggtagaaaaccagaaatacaagcacataaatctataaacgagtagcatacatttttccacacaccaatgcattgtacatcgctacatatatatttgtccaatactcaccccagaaataaacaagtgtggtcatttttaagtattgcttccatacatcgtcaaaactaataaatttctattgcatcatggtatatctttagaagccataaagttcatctaaatttgaggcatgtcatctttagatgatataaatatatataatgtgcctggtttatagttagttctagactccattatcaaaagttctacaagatgagtatacgttaattacatttagaataactttagatgcatatgtcctctatatctatatatacttcccctttaatttctccatatttatttatctatcaccatttggctagatgtagaaatcaaacggcctgatgcgtcacgagcttttgcgtgtttacatattattgatgcaattaagagcaaaagaggtgatcatcaagaggacggcccatggtttcactccacctacatatgcggcgaccatacaatgcagggctgaattcaagtcattttttgtctctttctaacttagtgtttctgttgagtgtttgacacatgcagtgagatgatatttgtccgtatccagccaagtcaattggctcttttcttttcttgcaatttttctttctttaggctgtttttgacacacgaaacgataggatgtattagcacataattaattatgtattagtaaaaaacttaaaaattacattaatatatttttaaagcaatttttctataaaaaatacaatgtttaaccgtttgggaagtgtgcatacaaaaagaagaaagtgtgagttggcaatatagacataagaatacaaccttaaaatcgtcaactagttgggtgggcggctaaaaaggtagcctccagctacgaatgctctcgaactttcctcgactggtagtatacgtacaaagaaacatatatagacaaagataatagcgtaagccatgtatagtattactctagtagtgcaattaaatatatttattatttctttttggaatgaatcaattaattagaaggcatgaatgctatactatgtctttgctcacggctggcactgagatttcgcacgtttcccacgagtttccaaagcacctctctctttaattctcaatttctcatatagtaaatgaattggatcaggcaaataaaatcgtcgttcgatccaagcgtggattagatttttttttaaaaaaatggtttgatttcttttcatcgtttctaccgatcgatgtgctgtacgttctcccattggtaaagcgaacgacgaagatgatgaagaaaacagaagcaagatatatactgtatatagatgcatgcatgagacaaaataatttattaattaaagtgataatatttcagcaatgtgtactaatttatatgtacacgtatgatactggattattggtggtaattaacaaagaagaaagagagagagagagagagagagagagagagagagagagagagagagataatgtggcatttactggacctttcgaagaggacggcgagcggcgcgacggcggcagcgccgacgaggttgcggtagacgaggaggacgagcggccgcgcggcgccggcgccgagcgcgagctccgacaggagcagcgtcaccgcggtgaacacctgcaccatcaccatccccaccggcagcagcaccgccgccgcgcccaccgccgccgcctgctcctcctcctcccgctgctgctctactaccgccgcctcctgctcggccacgccgaccaccacgacggcggcctctcccgtcctcgccggcgacgccatgtatattttgctttgctagctatagctagagctaggggcacgatcgatcgatcgatcgacgcgatacgaaatggaaattaagaagaaaagtgagacgcgacgagtcgatcgaggatgggagtgtgcgagaggcgagcgattgattgagcttgcggtggtataaatagcggggggagagatcgagagagagagagatgatatatggggcgcagaaacggacgaaggtagggatagatgggttggtggctggaattgacgtggcggtatatcagtatcagtgtgtgcatgcggcatgcattctcccatcgtccggtcaacttcaactccacctgtccatcagtggaactggaagtgcgtgtggaatgcaaccggctaccacttcactccatctcagcttgttaccatgttcagtgtgtaactaaacttaattcccaattagagtttaaacttttgtcccaaaacaaccttcaggcccttgttcggttacacagggattcattccgggccggttatgataaatataacaagaaatttataatagatacaacaagagaccaggaatatttattccgggtcaggaactaatttacttatattaggtataacaaaacatccggattagttccacacctcttgactagtggattgattccggtctattattgtccctatcatgagtaaattggttcccggcccggaataaatctcggtaaatcgttgtatatatcctaaatttcttactatacttgtcattctcggcccggattgaatccttgtgtaaccgaacaaggcctaagagtaaattttatagaatccaaactattatatggtccaagtttcttaaagccgtataaactttggccgatgacacataacctcaagtattatggttataacgttttacaaaaccacattactaataattttgagtttggtataccatgtacacttttcagttctacaatcacatctcaaatttatgagcattttattcattatataaatgttacattcatttttttatttcaatacaatagtatgtcaaaatagttaacggtgtggtttgtgaaactttaggagtatataatacctatagtttgtgccacatgtcaagatacctgtggttttgtgcaacttggactataataggtgtgtttaatgaaatttattgtatctttaatttatacatagtattcttctaccatgcttggtccataaatcaagaagtttaattttatccttcaatactttacctacttaaccaccaatactatatattttcctattaataagagactctttggttattttccttcctcgccgaagttctcttaggattctaatattcaacttacttacttcattcaaaacataagcactttgaggttttgcgcatggattatgaaagtaggaagatttgaatgaggaatagtatgattggttggtatgaaaaaatagacaaataaattaaatagatgatggttgtgattggtttccagttaaaaattcgcattgacaaatatttgattatacagtagccaaattgatacgaaattaaaataagagtataatgcattggcagcccttaattaaacttatcacgtcatgttatctaggttcttaaactttgaaaatgcacatctaaatcccaagactatatcatataggttcaaaactatcacatacccccttcgagtgctcgtgtggctaacacttcactcatttaatgacactcaatatgtgaacgtcgacgtcatgcggatactcaaaggggcatatcccagccactaatactggagaggactatggatcggacgtccaatgttttgcataacgtcggacagtgttgcatgacatttgtttcaaagtgtttcacatgtttcatcttttgatgggaaaatatttcaacacaatatggagaaaaaatgattcatcatatgaaaaaaatgtttcaactgttgaaaaaacatgtttcaacataaaaaaagatatatgtttcaacaattttaaattatgatacacaatccaatcaatactgaaacattttcttacaacaaatgaaacaccaattttgacctactgaaacatgcagatgattaaaaaaacaaccactgcaacattttagtctaaactaatgaaacatccaatatgttaagctgaaacatataaaaagaaaaaagcagcctagatatatttattcttcttctccagtggtaggtaggccccatgttgatgccggatcgatgccccccccctttgctaacctatactccat

SEQ ID NO: 25179 - DNA, 3226 bp, Oryza sativa
ctagtagattggtcagaggtctgacgattgtagaatagtcctcgatgaaccttctataaaagctggcatgtcccaagaagctgcggattcctttgatgttcacgggaggaggaagctgatctataacatcaattttagcacgatcaacttcgattcctcgttcggacactcgatgaccaagaactattccttcacggaccatgaaatggcacttttcccaattaagcaccaggtccttttcttggcatcgttgtaagactttgtctaaattctgcagataatgaccgaaagtctttccatagaccaagaagtcatccatgaagacttccatgatgtattcgatcatgtccgagaaaatagacatcatacatctttggaaagatgcaggagcgttgcacagtccgaaagacatcctacggtatgcataggtgccatatggacatgtgaacgtagtcttactttggtcctctggatggataggaatttgatgatacccggaatacccatcaaggaaacagaaaaaggaatgatttgccagccgttccaacatttcatcaatgaagggtagcgggaaatgatccttttttgtagccttgttaagtttcctgtaatcgatgcacatcctccattcggttacggttcgttgtggaattagttcattttgagcatttgcaacgaccattatccctcccttctttggcacaacctggactgggctaacccactcactgtatggtacgggatagataatcccggcatgcaggagtttcaagacttctttctttacaacttctcgcattgcattattgagccgtcgttgaggttccctagagggagtactctcggggtcaataggaatacgatggatgcagagcacgggattaatccccttaagatcttgaagcgagtagccaagaacagaacaatgcttttccaacacggcgagaagacgttgagtctcgtcttcaaagagcttgtcactgattatgacaggggcctctctgtcatggtgtaagaaagcataatgtaggcttgggggtagaggtttaagctcaagcggaggccaaggtggtggttccatgatcggcaggtcgagagtctcaccgggatccgcttcctctttgatgaaatcagggacctcatcttccagaagggcctcgggagactcgtgagggggaactgcaataacctcttccgttgactcaatttctggcagagggtctgtcaagacgatccttgcccgtgagaatggaattgaaaattcagtctctcccagtgttattttgaggctatctaatcggggtgtgttgatgagaagttgctcaattggcagcccgattaggatgtcaaaatcttggatttcaaagacgtggaaatccaagatcgcctccttgtcttcaaagcagacaggcacatcttgcataatcccaaatcttttgatgatatttccgcttggatgtttgaagaatttgtttgtcggggtcactgccttatcgcttaaataagcaaatgcaaaagacccggaaacgaggttggccccgacagttggactgtagagaatactgacgtcgttcccttccagatggcaaggaatgattcggggagcggtatttatccgaattacttcggatgaaagctctgcctcccttaaccattcatcgctcattatggttgttaactcccggatagtttctcgtaggaacctgagttccataggatcgggaggtggcaaaggaacgagtggtttcctcttgctaaaatagttcaaggtattgccatagtcttcatcaaaaccgtccttgaacaggattgtggcacaatccggagtctgaatttcttcattctcgacggacggctgctcaggaaccttctcatcaatcgagctagcgaaagtggatggttcagcaaggggctcgatcgttagaggttcctctatcttggacacggatgcctccggctggggttcattgggttgcgtcatgaaggaagtattttctagaatgcggtccaaaattttctttccttctgacggtgttttgtgcatgaacgattgacggagcgtggggctcctcaccgggagaccgcgcaggcccccctttgccggttcggccgggggcgctaagtgaggttcttcgccctcgatcaatctggagaatgttcgcgagagagcaagtgcacgagacacgggcgatgtagacaggttcgggccgctgagaagcgtaataccctactcttgtgttctggtggatctgtgtgtgaaggagttatagagagccggagagctagagagttcaggctccagaacccctctagcctcctttttttctttctcccccctttttggtgggcaaggtcctccttttatatggtgggccggaaccttgggggccaacggacgttccgaaggctcgccacaaaggctcgacagccggcaccgccaaccggggacacggggggctggcccccgtgcccggaccgaagtggcgctccggacgaggaagcgccctccgatgcgtgggcagcacggcgatcattgcgccggccctcgatattgaagcgggcatctggccccctacgcacatcttcttgggttggaggcgttgacgagggaatggcggacgaacggcgggtaacggccgccgctcgccgcgccctccgcctcgacgacacggagccagcagtagcaacgccagtggccttggtggcggaggaccgccagccggcgcctaggcgctgctgcgccgtcatgaccaaattggccacgtcatctagccaacgttgggttggagtctctggatcagggatgacgggcgggtgacgcaggagcgcgcccgcagcctggagcgcgccctggggcgtgctgccatcaccgtagatgaggagacgacgctccccgtctcgccgtccttctccatcgcccgcgtgcggcgaagtcgcggatctttcgacctcctcgagcgcctcctcccgcccaagacttcggcgagagggggacagtggagtacgagctcgacggcgcgggttctgctccccgtcgtcaccgctagcgctcggagagagattgtgcgccattgcccgttcggccatggggctgagcgggagaagcttggcacacacgaaagagaacgagggcttagaaagacacacgcgccccctacctggcgcgccagatgacggagcgtggggttcctcaccgggagaccgcgcaggcccccctttgccagtt

SEQ ID NO: 25180 - DNA, 7026 bp, Oryza sativa
gggcggccacatcatttttgggcccgacccccccccagggggtcaggccacatgggtgattgcagctgccccaaacctctagtcaagatacccccggtcccatgtcaccgacagtagcccccggcgttacgccagggcgatcgcccccctcgagggaagcgctcgggcgtgacgccactccttagacctggtgacagatggggccggtctctacaggcggcagaaacccagcggtcgcaaatcgcgcacatcggcaaggaaaaaccgaccgacaataatgagcggctttcttcaagaccgctacattacttaagtagcgcgcgaaccgggacgagccggttcgtttcgcctggagatgtgatgacggtgcatcggtcggcgagcgtagttaacgcgcgcacgatatgtcccatctcgactgccacggccgcacatccgcctcgtgcgccgcaaacgggcgagcgggattagtggaggcgtgggcgcgagagacgagggggcgaggtagtgggcgcggggatcgaggagccgggcatagcgttggcaagggtactaagacatcaaggaagggatttgtttccttcctctcgtcactcttccctttgcctttgccacttgtgctctgactctccgtttccggcgccctacccttgccatactcgctcgctctcaagctcctcctccgccggcgtcatggcacggggctccgcaccgctcgagggtagcgtgctgccgccttcccgcatcgtgagcgagaggcaggccgggctgccgcgccgattcatgccggaatctgccaccggccgggaggtggtcgcgctgggcgagggacgcccggcgccgcattacccggggcggtccgtcttcttcctctctttcgcaatggcagggctggtcccgccattctcttctttcttcatggatgttctggagctttatgatctccagatggcgcacctcacccccaacgcggtaatgacgttggccatcttcgcgcacctatgcgagatgttcatcagggtgcgcccatctctccggctgttccggtggttcttcaccgtacagccggtgtcgccaccgtcggtagtcggtggctgctacttccagccgcgggggccggtgctgaaccgctacattccctgcgtccttcgcaagaagtgggacgactggaagagcgactggttctacacccctctcccctctgaaccgctacgacgccgttcttgaccgcctggcgggtctgcgatcccaggggctcacgggggccatggtgttcggcgactaccttcgtcgccggatcgcgccactccagcggcgcgcccggggcgcctgggagtacaccaggtccgaggactacatgaggacccaccaggggggcagatgggactgggcccctgaggacttcaagatggtggtccaacgggtgctgaatctcagctccgtggaggcatccctcatcccccaaggtgtcctccccctctgcagcgatccagagcgcgccaacatcctgaccatcatgcaggcggtcggggcgtcaggggagcgggctcctcgaggccacgatggcgcgggcgggagccgcaggggggaacaatctaccccgggagggggtcgtgcttctgggccccgtgacgggggcccggggggcagccgccctgccgacgcccgggggaagaggaaacaggaggataccccctccccatctcctccccgagggggcggggcggtgcgtgccagcagcaggcgcccggagggtgctgtgccgacgtcgcagcccgagggggagcgaaaaaagaagcggctccgcaagatggggggaccaaaccatgccggggaaacctcatctcccccccaaggtggtcgtttagccgacctcctcgcaggttcgtccccgcgcccactgtggccgtattcattctcccaaggcgagttttcacttacccgtttctttttgtcttctggtttttcttccgctttcagcgagattccgtcgcgcctccctcaccattccaagtccggccggtctgaggccgaggagacagcaaccgtggaggcccggaggcgggaagctgtccggcgagaagccgcggaccgcctccgggaagctgaggaggctgcccaggaagccgtccgggttcccaggctgaggaggccgctcgggaggaggccagactccgccgggccgggaagtcagcccgggaggcagagcgacccgcgcacgccaggcggcctgccaagccctcgacccgactccgcccgaggcgacgacgacttccgaggccacccacgatgaggccgcgggcgcgccgctcggacccgacccttcgggcgacgttcgggacgagccagcctcgggggacgcccctgagtccggcacgtcgattggcgggccgagccgcacagcgcccacaccgaggcggctctctcctctgccttccgccgccccactgaacacagagcccctcctgcaggccctggccgccgcgaacacgacggtgctgggacgggttagggcccagatggaggtttccttgcaagcagagcgggcggagctcgacgcggcgtggcgtgcgtcgatgaggggcggcgctcggtggaggccatggtggaggcgggccgcaaggcataccaccggcacgcctcagagctcgaggtccgtcggagggagctggcggagatcgccagggaggtggaggaggagcgggagactgccctcatcgccaccgccgtgctcaacgaggcgcgggacgatctccgccttcaatacgggagccgggtggcggagctagagaagaaactcgacaccgcccggggagtccttgacgccgccactgcacgggaacggcgggcgacggagaacgaggcggcgtcccggcggcgcgaagtggcccttaaggctcgcgccacggcgctggaagagcgcgcccgcgcgagggagagggacctggcggaccgcgagaccgccgtcactatccgggaggcaacggtggcggcgcacgaggccgcctgcgccgaagaggagtccgcactccgcctccgcgaggacgcgctcaccgagcgggagcgagctctcgaggaggccgaggccgcggcgcagcggctggcggacagcctgtccctccgcgaggcagcacgggaggagcaggcgcgccgtaatctggaaggcgccagcgccgagagggccgcactggatcagcgggccgctgagctcgaggcgcgggcgaaggagctggacgggagggcgcgcagcggcggggcggccgcgggcgacggcgatctagccgcccgcctcgcagctgccgaacacaccatcgccgatctgcagggcgcgctggactcgtccgccggggaggtcgaggccctccgcttggcgggcgaggtagggcccggcatgcttcgggacgccgtctcccatctagaccgcgccgggcggcaagcggccctctggggcgagcggaccgcgaagtacgccgccaaccaggggggcctcgcccagcgcctctcagagatggccgggactctccagcgcctccccgaggagctcgaggagacctcgcccggggggcagtggagcttgtactggcaagctaccaggccagggacccggacttctccccgtgggcagcgctggacgagttccctcccggaaccgaggacgatgcgcgcgcgcaggtccgggacgccgccgaccacatcgtccacagcttcgagggtacggcccctcggctcgcgttcgccctcgactccgacgaggagggcggcgacggtggtgtggacgacagcgaccacgaggccggcgacccgggagcctcgaagtgagcccccaggcccccgccaatcttaaatagtttttcctttcttcttccgaggccttcgggcccccttcttgtataaactaatttaatctgcaatcaaataaagaagaaatttctgtgtcaattttatttgttgtgtgtatgagacgaggatggtctgtgccgcggtccttctgtgtcttggcttgaacaagggctcgtgcccaggtcccagcctcaaacggcgcgggtcggggctagtgcctggggagatccacgtgtcgagactagccaggccgggagcgcggtgaccgagggttatggggacccgattgtgggcctttgccgattcccccccggagttcaccacgtcccggggcacggctcggttctgggccccgtttggcgatttccgccggctcgggccaccgagggcagggtcgagcacgagcgtgctaattcaagccaagactcttcaaaaggaaacaatggcacagacacagtccttaggaaatcaaaaaagcttttattgaaatacggaagagaaaaaagataagtatatgcatatgtggtagcccccggccaaccctgcacgcccgaggggggtgcgaggttggccagagcccgagacctgacacccgacccccactaggggtagaagcgacgaaggtgttcgatgttccacgggttaggcagctctgtgccgtcgcccgtggccagccgaacggagcccggccgggggacgccgatcactcgatacggaccctcccacattggtgagagcttgctcagtccagcacgcgtttggacgcggcgtaggacgaggtcgtcgacgcagagtgatcgggcccggacgtgacgctgatggtagcgccgcaggctctgctggtagcgcgcggctcgaatggccgcgcgccgccttcgttcttccaagtagtcgaggtcatctctgcgaagctgatcttgatcagcctcgcagtacatagtggcccgaggggacctcagggtgacctcggatgggagaactgcctccgcgccgtagacgaggaagaaaggcgtttccccggttgctcggcttggcgtggttcggttcgcccagagcaccgctggcagctcctcgatccacgagtcgccgtgcttcttgaggatgttgaaggtcttggttttgaggcccttgaggatttctgcgttggcgcgttccacttggccattgcttctggggtgggcgggagaggcgaagcagagcttaatgcccatgtcttcgcagtagtcaccgaagagctcactagtgaactgggtgccgttatccgtaatgatacggttaggcaccccaaaccgagcagtgatacccctgatgatttaagtgcggagtgcttatcgatcttgatgaccggataagcctcgggccacttagtgaacttgtcgatagcgacatacagatactcgaacccgcccggggcccgtataaacggacgcaggatatcgagcccccagtcagcaaacggccatgacagaggtatggtctgcagggcctgggccggctgatgggtttgcttggcgtggaactggcacgccctgcactgccggaccaggtcgaccgcatcgttgagagccgtcggccaatagaaaccctggcgaaaggccttgccaaccaaggtgcgtgaggcagagtgggctccgcactcgccttcatggatagcggcaagaagctcgacgccttgttcccgaggaatgcactccaggaggactccgttagccgcgtgccgatagagggtcccttccaccagcacgtagcgcttggagatgcgctggacgcgttcactcccttcgcggtcctcgggtagagtcttatctgcgaggtacgcctggatctcagcgatccaagcaatcaatctaagggagctgggagcgctcccctagggtcccgaggcctggactccgacgggcctcaggggccgttcaggcgcgtccgtctcccctagggggtcgggtcgcgccgacggctgggcaagcctttcttcaaaggcgcccggtggggtctgggctcgcgaggaagcgagccttgagagttcgtcggcgaccgcgttatcccgtctgggcacgtgccgaagctctatcccgtcaaaatggcgctccatacgccgcacctggcgcacgtaagcatccatctgcgggtcagagcactggtactccttggagacctggttaacgaccaactgagagtcgcctaacaccaggaggcggcggatccccagtccagccgccactctgagtcccgcaaggagtccctcgtactctgccatattgtggttgcccgaaagtcgaggcggaccaggtatttgaggacatctccgctcggcgaggtcaacgtgacccccgcaccggcgccctgaagagacagggagccgtcgaactgcatcacccaataggcggtgtgaggcagctgcgaagggcccgagctggcctcggggatggagacgggctcgggagccggtgtccactctgccacaaagtcggcgagggcctggctcttgatcgcgtggcgggtttcaaagtgcaaatcgaactcagagagttcgattgcccatttcaccacccgtccagtaccctctcggttatgcaagatttggccgagggggtaggacgtaaccaccgtgacccgatgcgtctggaaataatggcgcaacttcctcgaagccatcagaatagcgtaaagcatcttctgggcctgagggtatcgggtcttggcgtcccggagggcctcactaacaaagtagacgggccgctgcaccttttggcggggccgatcctcttcgccaggggccgcatctccagggcgcttttcgtccgagaggccgcgcggggcgcactcggcttctgtgtcgacgacctcggggtcggaaggcgacaggcgtggccttcccgcagtggccccggggccatcctgggggtcgggggctcctggcaccgtcggacaagcaggcagagggccagctccggtcgtcgggggcctcgggcagccgttcggctcgggggcctctcctccctgctctctcccgggtcgagtcgatacagggtgctcttcgtccgagaggccgcgcggggcgcactcggcttctgtgccgacgacctcggggtcagagggcgacaggcgcggccttcccgcagtggccccgaggccatcctgggggtcgggggcgcctggcaccgtcggacaagcgggcagagggcc

SEQ ID NO: 25181 - DNA, 1758 bp, Oryza sativa
cgggcagagggccagctccggtcgtcgggggcctcgggccaccgttcggctcgggggcctctcctccctgctctctcccgggtcgagtcgacatagggtggggatgcgcggagcgagggtcgtcctcgtcgcgctccacgaccaacgccgcgctgaccacctgcggagttgccgccaggtagagtagcaacggctcatctggctccggggcgaccaggactgggggagaactgaggtacgccttcaactgagtgagggcccgttcagcctcctccgtccagataaacggcccgtagcgtttgaggagcttaaataggggtagcgccttctctcccagcctcgatatgaaccgacttagggcggccatacagccagtgacgcattgcacatccctaagcttgctggggggcgcatccgctctatagctcgtatcttctcggggttggcctcaatgcctcgggcagagatcaagaacccgagaagcttgcccacaggcacgccgaacacgcacttgtcggggttcagctttatgcgggcggtgcggagactttcgaaagtttccgctagatccgagagtaaggtctcctggttgcgtgttttcacaaccaagtcatcaacataggcctcaacattacgtcctatttggctacccaaagaaattcgagtagtacgttgaaaagtaggacctgcattctttaacccgaaaggcattgtcgtataacaataagttcctatgggggtaatgaatgcagttttttcctcatcctccctagccatgcgaatctgatgataaccagagtatgcatctagaaaacacaaaaggtcgcaccccgcggtggagtcgacaatctgatctatgtgtggcagggggtaagggtccttaggacatgccttgttaaggtcggtgtagtcgatgcacatccgaagcttgccgttcgccttgggaacgacgaccgggttcgccagccactccggatggatgacctctcggatgaatccggcctccagaagtcgcgccacctcctcgcggatgaaggcttgacgttccggggcctgccgccgcactttctgccggaccggccttgcgcccggccgtacggcgagacggtgctcaatcacctccctggggaccccgggcatgtccgccagtctccaggcgaagacgtcggcgtttgcccgcaggaaggagacgagcgcgtcttcctatttgtcgtccagaagaccaccgattcgtgtggtcttggacgggccgtcgcccagggcaacctgcttgatcgggacctcgtcacacgtgatcatccgctgcctcggggcggctgggacggaggtgctgagcctctcgtcgccacccgcgggcttggatgccgcggcgaggtggtccgcgcgctgctccatgcaagcaagcgcgactttgaggtcaccatggacggtgatggggccaccggggcccgacatcttcatctggagataggcgtagtggaccgccaccatgtacttcaccaacgcaggcctccccaggaccgcgttgtagggcagactgaggtccgccacatcgaagttcacccgctccgtgcggaagttggcggaaccaccgaaggtgaccgggaggtcgatatggcctagcggccaagtgtgccccggcgtcacaccgatgatcggctgggacggccggagcaccatccccggggccttgatggcgtcaaaggcagcggaggaaaggatgttgagggctgcacccccgtcaatgaggacacgccc

SEQ ID NO: 25182 - DNA, 10363 bp, Oryza sativa
tcccccatcaacggtggcgacggtggcctcagctcctggaaccctaggtcatcgtcgccatcgttgatgtcctcggcgggggccttctgcttggcctcacctcgccggttgccggcgggagccgccggggtattgccctcacggcgctcctgcctcctctcctcctcccacttcctcgtccgctcagccaaacttttgaccgcgcggcagtccacgaggtcgtggagggaggtgttgtgcacggtgcaccacttgccggtcgggcgctccctactgggagcgccggcctccttttttttgtcgctcgcaggcctcccctttcgggtggcccgcgaagcgccctcgacggcgaggacgtgaccctcgtcgtcggaatgggccgacctcttcttcctcctcctgtcccgccgccctgaccgagcagtgggcccgggggcggccggagctgccacaccggaaccggaggagttccaggtccaggcctcctccttgcgagccacacggtccgcgagctgaaaaagctccgcggtggtctggggctccttggaggcgatcttctcgagcatgcggttgtgccgcacgcccccctgaacgcgtagatcaccgcgtgtgcagggatgcacggtatggtgttgcggacttgacaaaaccgctgaatgtacgagcgaagagactcatcgtcccctcgctgtaccgcgtgcaagtccgcttcttcacctgggcgcggatatgtgccctggaagttcatggtgaactgctggcacaaatcctcccaagagtggaccgacgcgggtggcaagttcattagccaaccccgcgcctatcctttcagggccatggggaagaaattcgccgtagacgaggagacgacgctccctgtctcgccgtccttctccatcgcccgcgtgcggcgaagtcgcggatctttcgacctcctcgagcgcctcctcccgcccaagacttcggcgagagggggacagtggagtacgagctcgacggcgcgggttctgctccccatcgtcaccgctagcgctcggagagagattgtgcgccattgcctgttcggccatggggctgagcgggagaagcttggcgcacacgaaagaggacgagggcttagaaagacacacgcgccccctacctggcgcgccagatgacggagcgtggggctcctcaccgggagaccgcgcaggcccccctttgccagttcggccgggggcgctaagtgaggttcttcgccctcgatcgatctggagaatgttcgcgagagagcaagtgcacgagacacgggcgatgtagacaggttcgggccgctgagaagcgtaataccctactcctgtgttctggtggatctgtgtgtgaaggagttacagagagccggagagccagagagttcaggctccagaacccctctagcctcctttttttctttctcccccctttttggtgggcaaggtcctccttttatatctcaaggggataccacatgcaccacttctacctacttttcttctgagtggggacctaccctatcttgaccaaaacttggcttgcaccttcgcctggaagctaaatcacaacttgtccttgagtgaggctcagcgccgtcactcgcctgacaccggggatctccctgttactccctcattaatgggcgaagatttgccatggctgctttccaaatgaccatccgatgagatgggtcatacctacctccactccaccggaggcagatgcatcgtgggagcacggttgtctgccgatgacgcgaccggcgtcagaccagtcacagaccggtcattcttgtccaccacgtgtcagtttagcatgctacacgtctgcccttcttcatacaatgacttccttgcaatggttgcgatgaagcctggaatgtatctggccggggctgacgtgccaactccaggagttcccacgccggctccggctagggacgagtgcctggaggctctcatcattccgacgggacggggcgaggcgtgtgtcaggccgcctgttgccacctaacccgcgatctgaccggtctgtgaccggtcacacactgtgacctgtcacggaccgaacgagtgtgctgcgctgcattaaatgcggcgtggggcgctcgtccaacccgcaataaacgcggttaggtgagcgccgctgtgctcacctaacccactcacgtggcgccaaacccacagggggtcggggcgccccagccctcggggccgaaacgggagcggcccgacccctcggggagacagagggaggggcggccacatcaccctcgggcccgacccccccccccccgagggggtcaggccacgtgggtgactgcagctgccccaaacctctagtcaagatacccccggtcccatgtcaccgacaacgatcctccagcgattatgtccagatagaatgcagactccttatccaaacccgtatggaaatgttgaagaagcacatacccgggtaaggacagggttggtccagactgcactaaattagtgaatctggaccaggctgcaccaattgattcattttcgatctgcttaaaactgagaatttctactcgtagggcagtaatacgagtaactgggaagaaggtaagacagaatttgtctcacaacttttcccaactaccgtttacacatccaacggtagaggtgtaccattgctttgctctctcttaaagagagaacgggaacaatttccaccgcacagtttcttgtctcatgccacgaatcttaaggcacgagcagacttgttcaaagtctcgcagatgatggtagggattttctagatcaaacccagaaaaaggatttttccctaaccatactgattagttcgggatgaatttcatagccagttgtataaatgggctctgatgaaggaggtggctcatagaattcaccccgaggagcagacagctcaaaaagcggttgctccatggtcgagaagagtttgacaggaatacttctttaggatagcaggggtagatgtagaattaaaaaaacaaaaaggatacgaggatgaataaggtacggaaatgatcagcaaccatttccccggaaacggcgccagaaatgcttgttggtatttcttatggtcacagataaaatttgcaagcgcacagatataccgatgtagcacttcccctacggagtattccaagggtatcgaatccaatggaacgtgtgtgatcagatcttcctccggttcatccaaggacaccaagcaaatgataggccaggatagagaggatttactagtgagaaacagtgtctagggaaagcttaactttaatcctaacgcaatacttcaggcactggcaacccgctgttcccagatgtcgctctactacgtacccggacagggaggacttaagtgatctcgagggctgtcaccacctctacacccacctcaaacgtactgtgggatacgcagtaattactggataacaattacttaaacatcacgtctaagcaattactgtctactttagtgtttataactcaccaaagcaatcactatatttagttgattatagtgaacaataattccgtatgctatttaggaactaaccaagagataattctcacaaaataaatctaaattactcaagaagaatattatattgaattcagagtaaaaaatagaataaaagaaataggagaagattaccgacaactccggaattcttccgactcctactctactctcttccgattgtaatatacaatatagtacaatagagcctcttataatttagctcaagcttggaagtgtgtgtgtgaagtgagagagtgaagcctttatatagaggtaggtatgacggttgtgagaagctgaaatgtccgaactgccccgcaaccgccattaggagatgatcaagaccgtccacgccaaaccccagcctggatggctgagattaggagatgatcaagaccgtccacgccaaaccccagcctggatggctgagattgtggtccggccgaacctgggctgggcccatctggcttggctcttggcccatgttctcccctgatcctcctctattcattcttcggtattttggctgattcactgatgttttgatgaagttcacaacccatccttgcagggatacacatttctcctcactttagtctgattttcctcccaacatcggggtttatcgtctgcatacaaatatataccaacacttgtggaatatgtgagattaagcacatatcactatgttggatgttttattatccgaactttatgcagatgttggcggtacagaatcggtatttaataaccaccaacagacaccaatgtgcctacggggcctatatacctgagggaccgtggggaaacggtgaaggagcagtgaacggttgagagacaccaatgtgtgaaaggggaaattgttgattagtcccacattggttgaccgtgggtgcctgcgggggccatatacctgagggaccgtgggatctctggcccgagggacatagtatgtgaaggcttgatggaccgtgggtgcctgcggagcctatatacttgagggaccgtggggaaacggtgaaggggcaatgaatggctgagggacaccagtgtgtgaagggggagattgttgaatagtcccacattggttatgtaaggacaagggacctaacatataagtggggtcccctcaccttaatagctagcttttagggtgggaaagaccctttacgatcttacaagtgagcccatccacaaggcatgacaacggcggagggggctccagtggtccacagctaaggaggagaagaggaggcatgtgagggagccaataagcaagatgacgcgctcatattcctctacgatgcatgtggtacgcttcttggcagacttggcctcgcgctccaagcggagccgctcctcctcatgagagcgtgcaagctcaacctcgatgtgcgacgacttgcgggcagccatcttgcacgacgcgaaggtagaagtggcttggccttcgcatggtagcggttctcaaccatgcaggaggcgacacacggcgcgagacttggggcccttggccttgcgctagtactcctcctccttggcgcactccatgcctccatgcggtcccaacggttagccgccgtgatcgcaagccacctttgccttggagttgacacccatcttctttggcatcgcggctgttcatggcggcagtggctggtggcacggtatggggcttgagcgaagtcggattggcatggtagatgctgaaacgatgacgacgaggtatatatatcccaacctacccatctcccttatctctgtcctctcctcctttgcagccatagatagccacggtcccatcctctccccacggcgagctcgagctcgccaactccctcgcctccctcctctctccactgtcacgggccaccagagcctcctcatcatcgacctcccactgctattgccacctcctgcaaacgagctcaccggccactacccctctccccctcgatgagctctggtggaagagaggggagaggtggagagatgggggaagagagaggataggtggtcggtgagctcttgtggaagtgaggggagatgtggagagatgggggaagagagaggataggtgggaagaggtaaaaatccacttacatgtactccctccgtaccaaaaaaagacaaactctgggtttccgtgttcaatgtttgaccatccgtcttattcgaaaaaattatgaaaaaaattaaaaagacaaatcacgcataaagtattaatcatgttttatcatctaacaacaatgaaaatactaattataaaaaaatttcatataagacagacaatcaaacgttggacacgaaaacccagagtttgtcttttttttgggacggagagagtagaactcacatgtttttaaatatttctttttattgactaggatgccacgtcaagacaaaacaaccattcataatgtcatgagacttgattggacggttttgctaagatgagtaaagatttctggtatcacgatttagcgatgttaattaaactctgaccgaaagatttaggagacaataagtggacttattcctttgagtaatgcaaattttataaggctagtattgggccttagggaccagaattcaactaagcccagagaaaacaaatagcatactgtttacgtgctttataaaattttcattctcaaaaaaaaatctaagtagggcaatggtacaccgtacaccacacctctcaacggaaccatatatggcgagtaacgcagtgctgggtgtgtttgtccgaggcgaaacaaacccttagaagagcagcttgattcagagttgatacatagtagtaatagcatagagccatagaccattccaacatgtacattgtacaaagcggagtctttgtcgaacgaaacaatacccaggagatgctgcaccacaaaaaatcgaagcaaaaagggcaaaaaaaaaaagaaggaaaaaaactgagaagttgatctttcgttggaggaggttagctatgtacaggttcagcatattcacacttgaccattgcaaatatatagtactcctatataacaaaactgccagtctgctccaaggcatatttgagttcagtatcacaaaacgaatcataaaagaggaataaaatgaatggagcaattattgtatccacataatagtatctttttttttttcatcatcatcatcatcggacaacataccccaccaaaatcaccatgtccccacagccctaaacccatatacctcctcattgcatgctatcaaaagtaataatacacacagaaatgctaattactgtcctacactatgatttgtgctttcagtggtagctacctgttgcattatcaaaatctcttttaggagagccttctaacaaaggtaaacggtgtccatggatggttttactgggtttctactcaacagtgacaacatggataggggcacaaggattgtacaatcaatgcttcagcggttggggttgctgttcaggtaaaggagggaatacatcaagaaggaacctgtgaatcatctcaaagctggtaaatgttattactgcggcaggagttgtccgcaacagattagttgcacatccacggtagaaaccggtcaaaccctctatatgatagacctttctgatgcagtccattacacctgtatatctcgccttggagtgtgctccctgctcctgtaaccttgagcgaacaacctgtaacgaatcatttcagatatatagccaccagttggccagaacaaagttcagtacacttattacaagactggcatgcatcgtaatttcaaagaaaagactctacctcatgaggatatgtcaaggttgacgcagcaacttttgccagggatgaagcaacagcaacatcaccaaaacttaatgcctccactgtagtattatctgttaaagcatgacgctgttatatgtgtggaacaaaacacaatctggagtgtacaaatgtagtaaacatgtgcaagccagataagctttgatcttctcatgtgcaggaaactgaatagcaacatgactgataccagccaaggacagaagttgagagagtacctcgctcagccagataagctttgatcttctcatatgcaggaaactgaatagcaacatgactgataccagccaaggcagggacaagtccactttataaaaaagaaaaagaaaaatatcagccagcgcacaaaacatattatcatcaaacggtgtaaaatcttgcatctgtggacttccatggaaagctacctgtacagtccacgaatgccttcttcatgtgctattctcttcaaagcagcaagtgtacctttgtacgggatcaccccagctcgtatcccttgggtctacaaaagggaaaaggatacagatgatgatatgactcaaaataaaatctttgaatcaatttgtctgagtatagcatgtagatgttgactgcttagtatggacaggtaaaagatctaaaagaaattcagcatatttataagtgattataattaatgatagctccattccaaatgggcattcagcctgtgtaaagaccatcagtcaacattaggaaagaaatgggaattgcttacaggttttaaacacttgcctaatataggccagacaaaatatttggtatgcagcattttgaaattgcaattatgctatcaggcgtcttggatcgactactggtccagacaagttgtggtccaaggatacctgaaatcttgtcttcacaacccaaagtggatttgttgcaatagtagttgcacctccagcacatgatgcagcaataacatttgcccctaaggacaggtgatgacttctatctgcaaaatgaatgtacgataccacataagaactgacaaatgatatgctgtcaagtaagtcatatgcagggtaaaacactaaccattggaagaaagcaagcttttaagctgctcatacacagtaaaatagacctggaaatccacaaggatactattagctccacaatagatcatagacacttgattcatctatagtgtagtgtactactctactcggtgccatacatgggtttgcatgcagatcaacttatagcattatcattagcatcgttgctttttacatagaatttaaaaacatctcatcaatggagtaagtggagctataatgtaagggtaaagactaaccgcccagttaggcaagagtgccagaatagttggagataaaccacgatacattccccgaaaaccttccctctgagcaatctgttgtaagcttccaattattacactacctagtaatgatagaacaaagaactgatgtaataaaccttagcttctgaagaatcttggtatagtagaaaacaatttagtccagacataagcatttcagaaaatatgctactcatcaaacttctattgacaaagatgcaaattcaacagtaaaaagtacgaagtaagtgcattatcaatgcaccaatgctgttggccacgtacataggatgacctgctggcattcttcagagcataacgggccacacatatgccagcatccatgaatgcagctaaaacattttttgaattcaaagcatgtacgtcagctgatgttccaggcaatttaggttcagcaaatgtgtaccaataacatcagaaatccaggcttggaagtattacccacactatactacacccatggacatcacaaagtctgttggcttttttcacatgttcatgtatgctaatgcttttatcatacatcaacgaattcatgcaacagcaaatagcacgctgcatgctttccttccattctcaatgtgcacgatctcataagttcccaacaattccgctcaacacatgtgaagctcccagccccactttgattggaggtactgatagattcaaggtgcgcaaaacaacaacgagagaccaatcaaaagcctcagataacagaaccgtccaaacaagcaatccgaaaccgttacgacatctaaaagcagagagcagatctttcgttgccgacaagtattttctcaactccctgaatcctggaagtgtccgagtaaagctacacaaagagaaaggcacaaaatctgcaccggtttaccatcattcccctgcatgcatgatgcatccactgtatattctgaccactatatgcactgactttaagtgctcaaactcctatgtgctcaccatgcttcatcaagcataggatagaaattgcagtctataatagatttatgtgcagctctagctctgcagcagcaaactgtagcaagcaaagattcgcaagaattcctctgaagagacacgcacctccaattgtgccggtggcgagcttgggccagccgtgcacctgaaacctcgtcttgatcacatcgagcgggcacacgaaggtcgccgcaaccacacctgcggacaagccccaaaaattcaacgcttgctccacatgggcatccccgaaacacacaaattgacccaaaaaaatggataagatagctcgagcggtcatgtgttaccagcggaggcgccggcggcggcgtggcagagcaggccgcgggcggaggtggcgtggtggctctgctgcgaagacgcggacggcggcgccggcgccggcgaggtcgccacgtcccccggcatcactcccccacacacacaccgatctgctcctcccctccctcagggcacggaaccgcgcgccgccgcgtctagggctacagccaccgctaccctcccctacccctaggagaaggtgaagcccgggggcgctacgcgagggcgcccgatcgcatccgccttcggggggtcgcccgcgacgtccgtggcgcgctcgtcgcggcagcaggaggcg

SEQ ID NO: 25183 - DNA, 4954 bp, Oryza sativa
cgtggtcaccagccaaggccgtggggcccacgagtcattgacacgtagtcctcgtttacgtgtacgtgtagaactttaccagcttattagttaggccacatgtttttgactcaacgaaccccgtcacccgaccacgtcactgtcaggtgggaccaccgcgcggtgggtccccggtgtcatcgatggcgggacgtgggggcccacggcggtgtctggtcgccgcttaccacccggggggtgacgtggtggaacggcagccgtgcatcggggacgaggcggaatcgaccggacggcccagatgggctcgcggggaccattttttatttttcttttcctcgtttcgttttctttcgctatccacagcgagcgagagaggaaaagataagcacgaagaattatgttgctttgtttcgccatggtgcggcttgtactgatctctcccccttctctcgatttgtggggacagattggaaaatcggacataatatataggtagattgtccaagtacttgaaaatagctcaaaattttgtcttgtttgtactacccaagtgcctaagtagttggtacacgtacgtgactcttatcaatgactttggttcgtaaacataggtatttggcaaaatttggtacatgagtacatgacatcatgacttcgatatcttcaccgtacgacattacacaagtgactttagaaaaaaacactataaaggtgatttatgattaaataggggagaggaacaatgtgaaagttgtgaactattgtttctctcccatcaaattagaaatcaatattttaataggtacggcatccatgagttaatttttacgtttgtagagtattttcttccaaaagctacttttgtacgatgttctacagctaaaaccgctaagtcacaacattctttattaaatttttccttattatttttatcattgctctgtgtttttatcctgaatgtttcttgccattttttttctttttgttgttatatggcataagtactcccttcggtcaactttattttattttatgtatcatttgttaaatatagataaaatggaagtcgatccaagtggatttattggaccgtagtaagccaaaaattgaatttacaacttaattttcaagttaattttttatattatagtttattttatagtatttgcttttgtatcgctaatgagtaaggacacttatataaatattttacccatatttttttctaatcctttataacccactaactcctaaagcttaacatgcaaaggtgccacatcatcatccactaacaattaatacatttaatatcatgtaaacatactatattatctaatttaaaatttattacattttagagcttttaaaatgaaagcatgttaaatcatcatcccacataattcacataatatttcaatatatattttcattattttttataatatcttatatacctatacaagttcatcctcacttggttaatattatttctctcttctctaaataagccatatcacataaattgattttagtgcttatgtaagtttatattgtttagctatattacatattatttttacttattattatcatattgaagtcccgcagtaacgcgcggggtttcacctagtaaacatactaattagtataaataaaagcgaaaagatgagattgtaagaagttgataagttattagcttgtatttgtattcgtaaattagagtggatctaatttatggttttgacgttacgttttaacaacttatacgttattaaaataaaatgaaaattacttaaaaaatcaaatgcggtactacatctaaccggcacgaaataagtgaacccaacatgaacacgtaccctaaacctcaaataacaggccaagaaacaaggtaaaccatcattagctacatttaagataacccctctaattacaagttattaccatccacacgaaaccgtatgaaatacatagaaataactatttggataaaccgtaggaaaaacacataaactggaaattcctacaatgttaaaactcttgataatttttctccaaaatctacattgagcaaatttataaggaattctatagaatttgggaagatccatttctttatttcaaatggtcaaataggaaatattcttacagaattagaaccctaaaaaaaattctgcacaaatccttttgttgacaccttcgaaacagacacgcaatagcctcttatctgtaaagaaagagttgactgtccagattagaattggctgtccaattcgatcccccaacaaacagaaaccaccctatccatccagccagagggaagatctggtcggccaagaaccgaatccagtgctatcaagtatcaacacaagattgctacagccaaccacgaattgattcccgaatgcaaagtaattatcaggaaagagtgacagcaacccaggagatcgaaagggagaatgatcgcctttaattcctaataattcttcagtttttctgtctcgccttttttagatctctgttgatggtgctggtaatgccacgtacgagcaaaagatgaaagcatagttaggaagtaataattctgtataattatatgtacctatcacgaataatgagagaacttgcccttttaaagcttagatcacttgaaaaaaagtaatgttgagaactctggattactttgtgccttactggacttgctggacttgtgggaatctactgtactgccacaactatatggaatacgagaaattttttttaaaaaaaaagttcctacattcccgtaaatgaaggaaatgaattcccttgagcaaaggtaggattcacgttcatctaaatacaaacattctagtgttagttcatgaaatttcaatcgtctccaactggcacattggcacatttctatcatgcttcctgataataaagtccattgccaccaaaaagatgcatgcctgaactgtcataggctcatagctcctaattagcgataacacaacatggaagaaatctgagcatataatatttacagatggcagcaacagctgctgagatcatgtaagatgtgagaaagatatgaacagattgattcttaacttcttcctggctaacactttagcaagatactacgtccacagtcaactttgatcagcccttaattttagaagcgtaatgtactccgtgaattcttcacccgagaaacctgcaacgatggttaaaatgtcacatgatgttcaggattagcatataaacatggcagtttgatactttgatgtttttagattgcacttacaatatgggacttccattccactttgcatccctcggtgacaccaaactgaggctgtcccttgacgtgatggaatatatgaacaaggaccacagcatcaagggcagcatactctttctgcaaaaggaggaagaatctctctgttttagggatggcgctttttgtcctcgatgaacagtaggctatcaaactaactcgtggctttagattgcaagatgaagcatgtttgacttagttttaactaatggtgtttaccaagataagcttagcacaagatctgatagaaaatttgcttgtacatgagaataaggagaggcatcttaaggtgatgttaaaaatgtggtaatcgacaggctcatttctaaagtaaatttctttttctacttttttcatacaaacacctgtcatggttagaaaagtattgtgaaaataaattcagaatgagactgaaaaaaaaaactcacaatacaaaattatgagaaattaattaatcactcataccaacaaatagggcctttcaaggaataaggactcgtgaggacagcttttaaggaatatgaaagatgacagacctgattctgggtgagagggcgctgttcccagttgctattccgtcgcgtcttgttcaaaccagctcctaatattttctgatacattccgtgataaataaagatggaggaccagatgattcacactaaactataagcttaaaaaaaatcaaaactggttcaacgtccagttaagtggagcctataccgctatagcaattaccttggacagcccagatagaccaccagtagtccctttgaagagcttctggatatcaagcagcatttcataggactggaaacatttcaattctccatatgattgtgatagttgatgcagatcacattgcagattatatcctttggtttacaatggggcaaaaataagtacttgtttaacaggatgcataagaaagaaatgttgttttcaggaaaacaagagtgtatgggaagatatgggttttttaatcaaaatagtacgctacctagctttagtatgtttgaagaacacataattcgcctgaagcagctatccaacacttttgggtcatcttcatacagcttgatcagatcaaaaataaaagctttcttatctgacgcaatttggataatagagacctaaccatagagcaaaattcaattaatgcaagaactgacatagatagataaaatgcagaatttctgaaagaggaacaagtaaaaaatatcatgggaacttaaggataagatagtcgttccaaaacaataaacactgtaaagaaaatatcactgagatgatcacaaggccatagcttactacacagggagtgatatggataactgaatactagaactactaaattgcttaaatgatacctaatacaatttatttatcctattttatccagtgatgccttttgaggaagaacagggggagattttcattcagcctgctgtatcgccacaataatgcaacatatgattaccatacattaggaaaaatgattataattgtaccagaaaactaagttaaacatggaaactgacagaaatttaaattaagacatcgcttaccttattaggtttgctacctttctcaaaattaggcttccattcacaatccacaccaataatttta

SEQ ID NO: 25184 - DNA, 1313 bp, Oryza sativa
tgaccgtctggatcgcttcccaccttgaatcattccctttgtgcggcttcgtggtggcgctgctcatgctgctgcgtgagctctcatcacttatgtcgctgctcgtgctcgcgcgacacatgctgctcttcccactctcagtgaaattagccctgtcacttgtcttagcactaccactggtcttcctcaaactattcgtcccatcactcactttagcagaagcaaaactatcgctcgtactactcttctgtgacgtcttcttctcctgattcccattacaatccaagttttggatctccttcagttcgccggaatcttcctcctccgcgactaacgaatcatccaggatcccagactccgaagagaggcctgaaagctccttgtccagcgtagatgccggagaaccttgatgctggtcagatggtgttcgctcctcggaaaccacctcagcatcacctccctgttccccagtgcccttcggctttgccgcttgaccaggcatgctttgcagcggtgatttggacgacatgaactaagcagtttatcagaaacaatcaagcgcggaatcggacagcaaggtgaacaaaatccctccacccccaaattcagtacttcagcagggcggtcaataattcctcatctgaaaaaaaaggagagaaaaatttccccattagcattaccatgttaccaacataacaactagggtttgttccacagtcactccgatttcattcacacaaacaaacaactcgaggggatcaagaatccaaccaaaaaaaaagaagagataaaaacaaagcggcaccgatgaaccagccggtcaaatcgagcagaaacccacctgaacctttcgaacaaagagagaacccaaaaaaaaacagaaagggaaaaaaaaaactttccgcgattcaggatcaaagaaacacctacggattcgacagatccagccccgccacatcgccactctccaaaaaggggaagaagaacaagaacaagagagtgcttgctaggaggaagaaaaagatgaaatcacgaggcccccggcatttcccacagaaatagggggtggtggggaagggaaggggggaacaatgggccagaaaagaggagattaataacaaaagctggaatctttaagataatcccctctcctcggctaaaggaggaggcagccacagcacagcacagcacagcacacacactgctgctcctcctcctactcctactatacattgcagcatgcaacctggaacagcacagcacaactgcaagctcacaagaagcagcacaccatgacacccctcctcccccac

SEQ ID NO: 25185 - DNA, 9309 bp, Oryza sativa
taaaattgattaattatttgctcccaacttcacaaaacatgattcttataccgtattactaaggctgtttttttaaggagtttaaaattatgagagcttctgaaatttttctatttttctgaattctatagattgttaaaatccaaagatggtaatttcgatcgtttaggggagttggagattctagataaaccaaaaagaagcttcccaaacatagtctaagtttaagctatttatcagtataattttaccattcttaaggaactactaagagatatcataatttttaatgtaaaatttggtactcacatataattaaatatctcgaggtattttctcagggattgcttattctcatataagtaatcggtgattattattcgcttaaaatttaaatcaactgggccctaacctctctttttttttttcttacagtaggattttaagacggctcattaatctatcttgcttgtgcttttaggactttgggggtgagtgagtgagtggtgactcactaatcttttgctggttaatgcttaagactaccaactaatataatctcggtgttgcttcggcatttggggtgagtggtagctgctggtacagcgtgcattggcgacgttctctcgtggcccggacccaaaaatattatccacagggctagcttggaaaaaatctgaatgggaaaaattaatcctgataattcactttactgatttctaaagaagtatctggaaattcgtagggagaaggattttactggattttttttgtcagataagtgcagttactcaacaaaggctacccaagcaaactcatatgcttgtactatacgatacatccatttaaaacatgattttttttgggatctttatgtgttaaaatcacatgttctatgatgtatgcgtaaaaatttcttcttcttctttttttcatgtccaaattgtcaacctcttatgtaaggcttctaaattattctggttttctttccttcgggaaaaaataaactattctggtatgtccaaattgtccttttatgtagagtggtttccttttcttcaatttccttttttctggtgatagccaaactttagatttcaccagccactgttatttagctgcactgcaaacgattgtgttcactaaccggtgccgagtagcaataaccatgcaatcaccactgatcaatcaaatggtttccagtctacagccggcagtttcggtaatggggataaactatgttgctactatcagcattatctaatctgtaatgtccaaagcttaccttgaactaatacatcttaaaatctctattagagtggggctaaccaattaagcttactttgatgggctggttaatctcactgtggggttcaccaatcttgagagctagcaataaagctagagccaagaaattgtaatcatagctgctacaatcgagggctttgtgcttaggtcacatgtatcattaacaagggcatgagaaataaactataaagaacagttccatgagcaaactcaaggtacacatggaaaattactgtgtgattactgaaaagagttgtaaaactcatgctttagggttcatctttttttgcaagattgaaacagtgatattttttcttgaaactgttggtgtttcttggccaactggtgccggttgcaaccatcatctgaccaaaattttcatatctagctaagcagtcagtgagcaaggcaggcagacttagctatcaaccaggaatttggtgaatcaaatcagaaaaccacatcaaaactggcacgtagatttcgacaattccatcagaatccattgtctgtaaagactgtaatctgaatctccaccattcgcctcctgaaatctgaacattgcaactgaccaaaacagtttggcacctccaagcagacagcaacctgaaaacagcctatcgacaagcaattcggcgacgctcttaaacatatgcatctatatctccctatcactgtacatacactcatatagataccacgtggtccatggatctacagatacataattcagaaaaaattttggaatctttgaagtgttaggcgttaggtatgcagaactctgaacacttgaccgttctctcgctcttaattttaattaaactagctgggtggcccgcacaattgcgcggctagcacccaaacaaaatcatatatttttttaagtatgattttacttaaaatttattaaatagctatctcattgtcttaagactttgaaagaccaaaccttatcatcatcgagtttctaattatatagtttttaaaagtcacaccagttgctaccccttatgtctcatctccttctttatttgcttgctagatctaccactatttctattcattcttattagaacctttaaaaattagattttatagtttttagagtttattgtcacgttgggtttcatttttataatttctagatgtctcgtcaaacattgctattatactcctctatgacacgtccactgtcttatctctttattgtcattgagaatttaaaaatcgaacataattatcgtttaacttcatttttactttttagaagtcccgccaaaccgttagcggctttgccattgtaatcctctacggctcgcccgctgcctcccttctttatttcattttgattttaaaatcgaatatgattatcattggtttttttacttttcagaagttccgaacctttaaaaattggacttgtagttttatttttaataatttttagaagtgccatcaaacgatgtcactatgtccccgatctacagccggtccgccacctactctttattgtcattgtgattctaaaatttttttttttactttctacaagtcccggcaaccgccttacttgtttgcttcacggttttagatgttacttaatatatctcgtcatgtgttttagatggttttttattttaataatctttatttttatcaaaaattttagttatttataaattgtattcctaattgaaatcttatttttcttgttctaattttagaattttttttaaaaaattatttaataccgtattgtgttattttaatgtttttattttttattttcaatttcagttgtttcaaaattgtattcctacttgaactctcttttattgttttctaactttggatattaatttattttttattctaaattttattgcttcacagcctccctgacgtctctccttttaatcgtcattatgattctatttggtgttttattaacaatttttatatgtcatatcaaccgtcaccactctactcctttataggcatgttacttaatatatctcgtcatgtgttttagatggttttttattttaataatatttatttttatcaaaaaatttagttatttataaattgtattactaatttaaatcttatttttatttttctaatttttagaatttttttaaaaaattatttaataccgtattgtgttattttaatgtttttattttttattttcaatttcagttgtttcaaaattgtattcctacttgaactctcttttattgttttctaactttggatattattttattttttattctaaattttaattaatctcgtattgggttcttatatggattcttttttcagtatgcttatttttaattccgaatttcagctaattttaaattgtattcctacttgaactcttcttttattttctttttctaattttagatttatttatttttattccgaattttacttaatctcgtattgggttcttatatggactcttcttttaatattccttatttttaattccgaatttcagctatttttaaatcgtattcctagttggactcttatttccttttctaattttggatcttattttatttttattttgaattttgattaatctcgtattgggttcttatatggaaacttctttcaatattgcttatttttaattccgaatttcagctatttttaaattgtatttctatttggactctcctttccttttctaattttggattttattttatttttatttcgaattttgattaatcacgtattgggttcctatatggactcctctttccatattgcatattttaaattccgaatttcagctatttttaattgtatttctactttgactctttttttctttttctccgattaatgtgggaatttctagccccacggcgaacgtggtgccttcgtttcgagctgtcttaataatataatagattctacagacaatggaacagtatattagtgacctgtgagatgagatggatagctaggcagggattattaattaacaaatggtgatgattagtttaatctctacacaacaaaggctaggtttggagccatgagcactggcacatggagcccctcatggccaaaaaagctagcttcagtaaacaactcaactaagatggcctcaccttcaaaagaaaagaaaacgaagaaaaaaaaagatggcttcagagactagtactactgtttgaaattcagaggctgcatgtgcagatgtacaagctggatgaatgacttggaactttgatgacgacagagacagatcagaccaggtaactagtacgagttaagtggagattacaactactaacagtctatcagaagtgatgactggtaagtttagtatgcacgcatatgcttgtcatttgtcaagatgatgcaaagtcacagattgatgttgaagtgttgaacggtgcaacgaagagatgaacaatctggtcgtcgggttaatctgtcccaagataaactagtaaagatgatggtgatgggaaattcagagtagaaaattttgcagttgttgcagaagatgcccaacgacaaagctcacaaaagagacggactttaccggtcacctacatacaactacaagtctaaagataagcagtcgaattaggataagccagggaagaaaaagcacaagacctgcaaagcatgacacgcaccagcaacttaactgatgtgcagagaaactaacaccatggaggcagacagaatgaaagaaagagattgttcagatgaatccaagaaggcaggagagatgttggcatgcagttgcaagatgatcaaaagcaatgatcaaaagcaatctggtaggttttggcaggcaagagagcttcagttcagctgatcaggagatgcagcagcatcagcaaattcagtaatgcatccaagcatggatgaagcgagagcacgacgcaatggacagcgacatggcgtgtgatgtgatgtgatcctggtgtgctgatacgcagcacatgccggcgccaaagttgcaggcttcttgcagccgcatgcaggttgtttaattttcttcccccccttgcttttctgaaagaagaagaagaaaagttcagacataaatctccatttgttggttacagatttgatgccgagaaaaaaggttgcaggtgtgaaaggaaatcccacttacaaaaagaaatttcatgcgggggaaaaaaaaggcaagaagtaatcaatggaggctgtacaggagaaggccaaattggcatttgtttttagttccaacacacaagactgaaaccagaaattgtgaagaattttggctgacaattggttggttttgctttggataaaaatgaaaaggaggatacaatccaactccaatactccatcgaatgaattttacctaaattccagtgtatatgcattgaatgattccaaatcaaagaagataaaaggttcagaaataatatacaggctctaaagagaacaaaagaaacaagaaatagagatcgtataactgggcctgaatcaaattgccaaaatgaacctagatcaaattaacaagacgggcccaaatgggcctacacgaatttatcaaaatgggcctaaactaatttatcaaaataagtctaagggtacgtttaagagatgaagattgaagaaaattgacaatatacacaaaactaggtaagtattagtacatgattaactgagtattaattattttaaacttaaaaataaattagtatgtttttaaagtaattttacttcattttttttaaaagaaaatacattaataattattttaaacataaaaatggattaaaatattttttaaagtaactttactattttttaaaagaaaatatatcgttcagctattcagaaagcgtgtgcgtggaaaacgtagaattttctcacactatcttcctctctctcaaacactgctctaaaccaattttactaaatgggcctaaccaaactgcctgtatgggcctaggagtacatgggcctaaatccataggctcccgtctaaccagtgggctaacccacttcccattctcgagggctcgtgtcttgtccgagtcgccggcggcggcggcggcggcggcgatgttgcggtcggcgctgcgccggggaggggcggccgtgaggcacgccgcgtcgtcgtcgtcggcggcggaggcggcagcggacggatctccgggtgcccttctccggcggaaagtggcggagcgggagcgcgcgcggaggcggccacgggacccgtcccgcgacgagttcttcgtggcgacgccggagtcgctcgcgtggctcgactcggcctccctccccatggtgctcacggcggccgccatcgcgctcttcaccaagctgctcatgatggtatcccttctcccgccgcgctgattagccttgtcactggggcgatgtgcgtcccccacccctagggtttacttgctgatgatgctatcttgctagcgccgtgtgtttgcttgaaatccgagtgagccacatgatgaatgcgcctgtgtatgaccacattatacactggattaaattcccatgctgcttttgcgaattgcgacggagccattttgctctattatgagcgtgtgcagctgttaacctttaggaacaagtagaaatgtctttcggaaatgattttgtaaagtaattgaagattgtttggatatggaaaatagatagatatagaaatgccaagattttctttagttgtttgatgtctgtctgaatgtatagtttacagaaaaatgtttcctatgggatagggcttgttgaaatctgcaattcaatcatggcctttggatatgcatttttgtttgatattacacttcaatccatatttgtctcactccaatttcacttcattacccatgagctaataactgccttaagttttgatggtaagatttgggaattcttcttgactcttgtgaactaaatcaaattagttgttaccaactgcatgatgtgcccttccatgggaaatgacaactgtgctgaattttagttgtatgttgtgggaaggaacatgatgcagcagatcaagaaagaggagacgcaagataaagaatagccaccctgatcaaggaaaagtaaggatgcttacgcgtgaagaatgggatgagatccaagaagtcaggccaaggaccccttttgaatcgaagttagctcgtccgcatgcccgtataagaactggggaaccagtacggctggttagtagctgacataacttctacatcgatgcatttccccaatattaattttgatattcagaattaattgaagttggcattctgatattcagaattgcttcatctacactgtcgcttccatgctgaaaaaaataagtgttgatgatatatgctagatagtgatatcgttacatgtttaaacaaccgagagctgcaagacttccttgcagcttggtttgactggcatcctaagctaattaagttacttcttacctgtatacagtttacagttttatgcttttaaccacctttctttacatagcttatgttaatgcttctctttataacccttctttgtaggaggatgtcaaggattgggctaccgatatgatcatggatgcttttactagagcagaagaaagtgctaagaaaaaatgattcagaagaaatggacaacactaaatacgtatgctttgaggttcacctgaatgcatagttagttaacttttcttttaatttcggttcctgtaaatggccacttttgtgagtcatgatatccgtgtagaataatatttatgtacttcctccttttcatattataagactttctagcattgtccatatattcatgtctagattcattaacgtatatatgaatgtgggcaatgctagaaagtcttataatatgaaacggagggagtagtaccaatatatgcttttggaactgcacaaagctgcccccaagcagcccatgtctgtcttggcctgagcaccagagattgaagttaattgtaccattttcattttcatagataaatggctgatggtccagcccaaacccaataaattgtgagttcgagtggctcaatggcccaaactgtcaccggttgagcaaaagtggtgaagttttcaaaggtttcttctgaggtggtgtttggatcacagggactaattttagtccctgtcacattggatgttgggatactgattagaattattaaacgtagactattgacagaacctatttcataaccctggactaattcgcgagatgaattaattgagcctaattaatccatgattagcatatgtgatgctacagtaaacatgtgctaattatggattaattaggttttaaaaaaatttcacgcgaattagctctcatttatgtaattaattttgtaagtggtctatgtttaatactctaaattagtatccaaacatctaatgtgacaggaacaaagtccctggtccaaacaccccgtctgttacaatactggcaagtggtgaaccacaccaaggatccgtgaatcttcatcgtcagtctggccaggttcatctggaaaggtaataatgtacttactgtataatctctttaaccagagtttcggcactcctcgctctcgtgattgggcgacaatcgcgtgagtcatctgagtttggatagagaggccaataattcccatctgagtttgtgacttggtcctgattgctcagatgtgcttggttttctcacttcgccatcttttactccttggccgatactgccacatttactgtgattccctcgatgcacgcgagtgcacgtcgttgacgcagacgccagacatggaccgatagaacagggacagtttttggaatctgattcgctgagtgaagagtgaagtggcataatagatttgtttgtcatttgtgaatattttcggatgaagactgatggatgatagatttgtttgtaaatgtggctgttaccagttattccctccttccttttatatactatctccgtccttaaatacgaagg

SEQ ID NO: 25186 - DNA, 2336 bp, Oryza sativa
ggggcgtgcgtgcccttcgctattcgccggctggctcccgccgacgtcgaccgtacgttggcgtctggtatcgaggtaccacagtacgagatcggtacgaaataaaacgggatcgcctttactgtttcaccaggtgaccgaaaattgagaggtcacctagcccaggtcgttgtatctcacaagtccaaaatggctaagataagtaatagtgtgttcagcctctgaacgggggaaggcaccaactaagtcggcgacctccgaactctagcaggtttcacggattaggttttcatggttagaactttgtaggagggatagggtgactattatagggatggtgggcggcgagatgtcaaagcagtggacaagatcggtggcgagggcaagagaagcctcgtgggcggaaaacggcatctacgtaggcaaatctatcggcgtgttcgaccgaatacgggggaggagatgcgacatggaggagtcactggacttggagacaacagatctaggaaggaggagttgggaggtgtcgagaagggcgtgtgactagctagcgccacctctacattagtatcggcgagatggaggtctgaatcctagtgggttggggtgggatgagacagagtaaatgaagataatagatagtgctaggcttataaaagactgcactaatttaaaagcaatcgtgaaattcttgaccgttaaaaggttaataagaaaaataaaaccagttgaaaaaaaacagccacctaagatcgtatggaatgcattcaatcggagaaacttgcttagtttattatacacttatatagctgaactgtacttgcgtgacattcttggttagtgctttcaaaactaagcgttgagagacttgaattagtctcgctttcaattatcgatattaatatatttttaattatttaaataaataatctactccaaatttctaattttgagaggtcaaaagtataattgttgtagttaaaacaataataaaaaaaccccgatcatagttataggacggaatgagattattgtatacagaagagagaattttatttattttgctttcaaaatattcatattaggggcctatggccaggtcatacacctccacaagttaataaccacacccattttctaccgacaaatttctttaatcactataaaatcattcaatggaatgttggatgttgacatgacccaaaacatttcctccccctatcacccactagccgatctcttcataaaatagaaacaaaacaaaataataaaatcagggcaaaatctccttttgatagtgtgatatgcgctccactacaaaacatcccttgggtccacggctcaggcagagtaagagtagtggccgtgcagtgcagtgaagcccgcgccgcgccgtttcacgggtccacgacgccgcctggtggaaccggtccaccgttcacggccaccgccaccgcgggcgcagacgccgaggcgcgcgcggcctcgccggagaagaggaggaggatggcggagaaggcggtggggcacgggcccaggacgaggatccgcggcggcggcctcgccgccgcccccaccgcgccctccgccgccgcgaggttttgtctcgcctcccactcctcgatctgcatttttctactagcggggtttcgatttgaatttgattttggaagctttgttttgagatgcaggaggctgtctgcggtgtcgtacacggcggcgccgaatctgaccaagaaggtgggtttttcgttatttttttttattttttttgaaaaatctttgattcttttttggggcttttggaatcgcttctttgtctggtcagtgaaatggtgggttcttgtgttcaaagcgtgaatctttactttactttgttaccgatgagcagtagtacaatatgtgtgaaaaatctgatgccactgcacaaaatggatagtgtctactgttctaactgaaagtatgtatgcttgttggtgttgtctcaagtgattgatctctcctaaccatcttcgtgttcaggttcctgacccgaaggttgtgaagccagccaggaaaacgacgccggtcaagaagcggccgcaggtagatcaggcgcagaagcagagagaagagcttgccgctttgcaggagcagctgagtggcctgcaaaagaagttgcttgagaaagatgaggccctgaggtcggctgagcacttgattagccgaatcagcgcggcgaatgcagcggtcgatgaactgagagggcagcttactgagaaggaatcgcagattgaatccaccggatcagattgcatggtgcaaaggtgaattaagatctgattttataccattgg

SEQ ID NO: 25187 - DNA, 13652 bp, Oryza sativa
acgtgatcactgaatggcataagcttttgtctgcattacatatgaccatattatgcgtaatatctagaagtaaaattttcaaacattttctcacaccatacagttttcataaaagaatgtgatgtagcccaagtgcccaactgtctagtatcatctttaaaacagtctaatctgaaaataggttgttacgtgtacatcatcttttctaagcccattccagtttagttagtctgtccttttgtcatccatagtggattcatttgttggactgcactgaacaaatgaatttttgatatgctgatttgaggttctaactacactactgcatggcattcaatgtggatgctcctttggattcaacaaatacaggtgcaagcatggaattggtctctatttgtgtatttttacttgattagaaagatatgttcccaccactgtgtattagtgctgttcagaagattcttgtgtgtttgtccttgtctttaacttcaattggcagactataaaaaagaagaaaaaagaacattgctctttgcattttaatttatctttgttgtagtgctatatgggaatatcaagcctgattattctgaagtgcatattattcctgttcttgccgtaatataaattgctaagtatgcagtgtaacatcatgtggaaccaacattgtgtgcgtgtgttctcacttgataacattttttattataacagtgtttaacacttgctgattgaatgttgtttgctgtagattcaattggcagagaaacaagctgcactggagaagttagagtgggaggcaaaggtttcaagtacaaaagtcgaagagctccaagtagatgtggcgtctatggatgttgaaatctctgcgttaatgaagctatttagaaaaataacagaaaacgaccgagccccttactcgagggagagagccgatgattcatctttggaatgtgaaccggttcaacttgacgtaagctcattttttccttgttatagtttcctttcgctcttcaacccaaagtacgtcatgtagttttaccacctctttgatgagcgattgtttttcctcaatacaattggctaaacgtcctacttgatatgggcaggatatggttggtgacatcgacatggagaagatggagcaggaaatgtctgcatacgctacagctctcgctgccgcgaaagacaatcctactgacgagttcttgaaggcagtaacagaggcaagactaagactccaagccttcgtactctaatttggattgaagcactgacatgccctgtactacctgaaggagtagctctattttgatgggccatcatgtgttatgcgggtgtcataatgcatctaaactgacagctcttgcttcctggatctcacatttcaaaaagatccatgtttgcgttctgtcggtctgggtctgtctgatgatgccactgagcttgttattgttgtaactttgtaagctaagaaccgtatgacactatgaccgaacatctgaacatcttagtagatgtcacaccgtgtaccattttagtgaagggtgaacagaaggtgagttcagtttacctgaacgacctaaagattgacgttctctgtggtttgagctttggagccaactgaatttgatgcagcattttacccagaaaacgaagtcacgagctaacgtatgatatgtacacatttgcccaatcatgaaatgttaacgcgcacgcggatagctacagtatttcagaaccattcaaaccacaacaaatatatctatttggatctaagtatttcagaactagtcctttatcacatttaagcattgaaccttccggattccgattgaaggattttccatagggttttaaattggagtgcaggctttaaatcaaatgaacactggatttcaaggggggaaaaaatgcagtggaccgtaataagaaaactagaataaattatgaaatgagtaacgaccaacataaagagcgtatatacaggttggtgatctaagacatctaacagacctaacaagattttctgcttggttacatttctaagagttacaacatcaaaaacaacattctttcgttcagatacagaaaaggcactcatgattggcataatacaacaaaacatataaaaccaagcaaaatcagacactcccaagctaccttcagtgaaggactgagccacaggaatgttgactgtcgagtcctctgtccgccatcagcagaagggaaaagtgagtaaaagccaagtcacgagttacaacttacaactcacaacacagaccagaggatcgtcctaatacaaagtaatagtacagagttcttttatccccactagaaaagaaattaagcagaaagctacttaggggaatcacaatacatttgacagtttttctggcagtaagctacttgagcactatattatggttaatggtaggggtgggcaggcagcagctacatcttgaattagaggaaggcaggaagttgaagtcacagccgcagctacatcttgttattccaactgcttttattactgcaaacaagaaagcaaaagtcagtactcattagccgcagagaaacagaaggcaaagtaacaacaccagaaaaatagtaaatgagcgttgatagtatggaaaatctactggtatggcacaagtataacaataaggatctgggtaagcataacatacgaaacctggtgcattaaaacgaatgcaacacagtacagtatgataagcatctgaacagcatttcttttaggctgatagggaaaacttttgcaaagcgagtaccaattaaaatattaacaaaatcatgtgatacttcagcagcttggattaaatagcatacaacatatatgagatctagtccatgtgatgcaatgtacccaccacaggtttcatatttatgttatttaaccaacactaacttgtctccgataataatttcttgtgcttcatactaatttttcttaagcctttcagatatggagtttcaagtcaagttctacacacaagggattagtaccaaatagagagcatattgcaccctaaaaatgatgcattcctcgaaccagagtaaatttgtgctagctcatacatgtttgctatcaccaaataatatgaacaggaaaaaaactaaggagcattgatctctatgcaaatttgaaaattaaattttcatttgaacagtacaaaagagcgtaaatgataaaaaataaaacatgccaaccgtaacattgtacaaatctaaagtttatcccagtgcaaaatttacagctaatggagttaatcttgtttatagctaatggagtagcataaatacaaataaccaagaaagcaccaatgcactaatggagtagtagaaatacaaataaccaaaaaaagcaccaatgcacagtataattgtgcaagcattgagtagtcatatactaagaaacatatttaaatatgataactattaacatattcaaagcgcagcaatccagcttggatcagtacagctataacattgaaatttagttagtgaaattgattttggtactgatcagtgctaagtacaactgccaaaatgtagcatgctctgttaagttgaattgtggatgatttttttacatatatttgaagaaagaaacttcttttttcttataaaaagcacagttaagtccagtcatgtgtagatgaaggaactcttttatgcattcccatattatactttgcaatgatttgtctacaccttgcatactaaacttcaagcattggcattccctttcaacatacaaatgatatttgtttaggatttttaccccaagactgctgctcttttatacatgatttaatgtgctattcttttctggctttgttttcatgtgatactatctagtccatgttgtaaacttccacaggtacatgcttaatatttcattgtgcaaatactactgatagcaggggcttgtgggctaattggtatagcatcctctctataaccgaaaggatgatacaacaattccaggttccataaagatagataattttgcaaacttacattaagttcaaaggatacccgctgcaatattaatccagtttctgagaaatatagcccacttgttacaaagtcagttgcagagtagaggacaggaacctttacatttttgtttgagaatacatataatcagcaaatggattacaaaaaggtttgcttcctacagcgctatagttacatgttaagcatacaaaactaattacattctcggcttgagcaattcctttatgctacaaaagaataaatggaaaaaagaataactatacacaacaaaaactggtatacatgatgaggttacatgaatatgatgctatacactagtatccaacaagaaattatatacaggtatacaacgacaaaaaaaaagaatatttacataaaaaaggagaacagattaagaacttacatctcaattaatgctacaacagatccttggagacaagcaggtaaaatccaccgatgttataagcagtaaacagttgacagttgcaagctgattcgctaaccaaaaggcatgtgcaaaaaagatgccgccgcgaattgccgatacccctacactaaacatagcccatccagatacattactcaggcgacatccgccgccgctttgagtggtcaacctcccttgatctgctacgcctcccagatgatcttcccctatcccagtcttcattacgatccgactcacgcttcccgtgcctatgataatcgccatggcgatctctatcatcccggtaccgttccctctccctgtctcgatctctttccctttcccgttccctgtctcggtctctttccctttccctgtccctgtctctctccctctccctctcccgacctgcgtcccgttcatcacggtgcctcctctctggccagtctggtggaggaggcaaatctttctccctctcccgcctcctatcagatgcccctgaccattccctctctggtggcctcttcttaccatggctcccaccttcaccatattggtgatctgatgctgcatcgtcgccatagcttgattgctcttccccaccccaaccacccatgctcgggtctggccacatcccgaccccaccagcacccataccaccttcttttccaaagaacgctgggtttacatgaggtgcaacaacaggtgggaatggctgcattaagcctgggaatggagcagccccaggtcctccagggaagccaccaaacccaccacccatcctccccattgctgcaccatagccagttggatcaaaaccctgccctaacatgcctccaggatgaagcataggtggtggtggagctaccatccctccgttccccattaatccacgtccaccaaccggacccatccgattcctcatattcccagcttggcctctaccccccatacccccgccaccccttccccaatttccaccgccgcctccacctccgccaccacccggtccacctcctccgcctccacgaccaccaccataattcccacccacctgagctccacccggacctccagctgcaccaccacctctaccacccttctgcacacccgagttttgctgagccatcgattgttggttcttcacctgagcttcacccatgcggcgcacggtgtgaggcgaggcgaaggccacgacacaggggcgtccattgaacaagtggccgttcatgccctctttgcaagaggcagcagcgccagggtcatagaaatcaacctggcagtatcccttggacttgccgctcgccttctcgtcgaagaatctcacctccttgacctgcccgtacttgcttagctctgcctctagatcggcgtccgtggtccaccagtggagctcccctacgaagagggtcgtaccaccggggccatcaccacccccgccgttgccgaccacaatcgggcccccaccgtagtttcccccaccctggcggtggaagccgtcgcctcctcccggctggatctggttatgcggaggcggcggaggcgcggcggccaccggtggctgcggctgcggcgggaggtggaccgggttgggccggtcgggaacgggggcgggggggacagccgcgacgcccgggatgtgcaccttctccggctgccgctgcggaggcggcggcgggagcgaagggggcgcctgcagctgctgctgctgctgttgctgctgcggcggcggcggtggcgcctgcaacggaggcggctgctgcgaaatcggcggcggctgctgctgctgctgcggcgggggcgggggctggggcggcgggtgagacgactggaggaagccgtccccgacgttgacgtcgttgtagaggtcgtcgtagtcgtcgtcgtcgccatagtactggtcgacgtcctggacggcggagatggcctcgttgcggtggaacgagccgtcgccgtcgggatccatggcggcgggcggcggagccaaaccctaggaggggagggctggatctagaagagaggggagagagcgcgagggagaggaggaggtgggaaagggggcaaaacgcaaaacgagctcaactaatccggtgtgattgggttcggatttctggaggcgtctcgggttcagagctaacgagcgggtggtgcggtgcgtatgacgggtgggccccacgcgcgagatggttcgtcgtcgaggggggaaggacgtggcggggctcgagtgcacgggtgggatttgacctgacgtcatatcgtgtggatcccgttccgaccggcgcaacgccccccgcctgttgttgtagacttgtagggccttgtttggtggggcttcgattacagcccatcgaaagcccaaacagaatgtgccagaattgaggccctttgacatgtttagattgtgcccaacacagtttgactaatggtagtttagatcgaaagtccaaaaaacttttttttcgaaaatagtaaaagtacacaattggtcttaaatcatgtcacctatattagggcacccacaatgattatctataagctatctacaagagatccatgtcagcatattttcctacttggaagatattaaatgaagagagagagcaaagctatctactagattagagatagtctatagagaaaaacgaggcaatgcatgagagaactatagatacctatgtagacatactattgaggtggtttactattaatctagtctattgctgagatgtatatgttttatagagagcaccctactttaccattgcgggtgctcttagaattaaacgggccagacctaaattaatcatcttaaaatttaagagcacacattaacattagagattaatactatatgaaaaaccaacggaaaaaatttcaacttaaatatgctacaaattgaatgcaccgtttgaccggttaaactggtggatggaatgccacatgcgcatgcgccgagccgacccgggtggaggcgaggaatggcgtacgagcgagcgacggagacttctccgtcgggtgatcttcggactgttattgtttttgtagaacgaaactgacggccatgctcatatgtggtgctttagatattcctgatccttgtgatctgcccgtacggatctcctggatgagtaggcatccaaaactctatccaccttagtaactatacgggtaagcgggcgattaattttttttatagcgtgttcttcgcatgattgctctcttcttcgtcttcctgtacatcagcattgccttttttttgggtggagtttgtgatcacgtcgaccgtcaacactaggaacgtgaacattggcattgggaacggcaacatcggtatcaggaacaccaacttcgctactggatcttggagtgttctctaactatgtcttttatttcaatgttaatcatgttactgaatgattttattatctttgttagcatgttcatgtttagcactggttttgaatcactcacatttacaaatgttatgcttgttatactttttttactagattaagttatgttgaatgatgactaagagcatcccagcagttcatccaaatctcatcctctatatacccatatggatggccatccaaaaaaagattcctcattcatatcccttcctactccaacagatcatctataccacatcatccatattacattctctatttttttagtaatatctttcaactaaacttacatttctatcttttattaagggatatattttcaacaactaaatttcaacggtattatatatcgcggtgttatttatcgcgataaaaatttcgaaatgagtaaattttaacagagataattttacctggtaattttttaattgatatatttgaattgagtgaatagtagcaagaaaaatcataggaacaaaaataaaatgatacgggacactgtaaaatcgttatttgttcaaacgttccaaaatcaatatgtcaacgatagcagccgcctgtccagtactacccttctttgctctccttttctcttctctcctcttctcttctctactgctcagcggacaaccggagacggcagcgggcgggcgagggttttgggcggcgaggtgcgggcggcagccgcacggccgcgggcgcgggcagcggggtcgcgggcggaggagcggcgggcggcagccacattgctgcggggcgcgggtggcggtgtcgcgacgaaggaacggcagccggcagtgggcgggcctccgcctctactccgagcctccgccaccaaatccagtaagtatctcctctctacttccattcctctagccgacgatgaaggggaggtcgtgatggagcaaggttgatccggaactccggatgggggcgggagcgctagcgttgaggtatggcgtgaggagagagaatcgtcatatttgacatatttcttctcgatttggcgcatcctctattttttgaggcattgataccgtatctgctggagcgccgttttctcctcttatgcactatatttcggatggagtaccggatgaaagatctgctggggatgctctaaggctgtgttcttttgagagagttcccaactcaccaccctcatttttcgcgcgcacacttttcaaactactaaacaatatatttttttgcaaaaagtttatatacgaaagttgctttaaaaaatcatattaatttatttttttaaaaaaatagcaaatacttaattaatcatgcgctaatgagtcgctccgttttacgtgcacaggaggtaagttcccaacctcagcataggaacacacccaaaatttataacaatctaggtgcacaactagcccttatttagggacctaaataacacaatcgcacaggttctaagaccgttgtgcagtttttctttttcatatatacacagagtacaaactataatttgcactatgtccgtattaatgaaaatctattatctaaaaataataatttgcactatattacaaaattttacggccaaaattcaatattagaatgcatatcaaagttccctcaaaaaaaaaatcgttccctcaaaaaaaaagagaatgcatatcaaataaaaccatgcgtttatcgatggagcataccaagacatacgttgtactcgtgccaattaacgtgtgcatcttgtatcacacatttctcaatacacaaccacggtctggaagtcatacacaatgaggtctaagtcaaatcgagtcaacgaggcacaacggtctggagtacctttcaaaaaaagaagggggcacgtggccaaacgacgccatccaagccgcccgttctcgaccgaggccaagatcgaacggccagggcgctgcctcccgagctaagcatgcgcgccaccccttcttcttccccgccgcgaccccgcatgccgcgcgccaccacccgcgacgccccccgaccatgccgacgaacacgcgccgcgcgccaaagatagccatcgcctccgccgcctcccgtataactgcgccttcgtctccggccggccatctcccctcgacccaacccccatcacggccgcgcgacgagaacaacaaccaccgctcgtcggagtccgtccatcgatcggcacggctagcgcgcccggccggccacgcctcatcggaagcttctccctcttcttccagttgcaggatcgaacacaccgatcaagtgcggcgagtacgtagcctctccgcgtgatggcacgcgctcccgcgctcgccggcgtcgtcctcctcctcgccgtcctcctcgcgatggcgtgcgccgtgcacgcggcgtcgtcccagcccccttccccggccgcctctcccgagtcgtccgaggccgagtcaccggagtctgaagagtccgagtgggctgcggagggcccggggatgctgtctgaagcctccgaggagcttggcttgggggccgggccgctcaagacgatgggcatggacatggacatgctcgacgacgacgacgacggtgctgctccgtccaagagcccggctgccacggcacctgcaggcgcagccgccgcgccggcggaggagggagacgaagaggaagacgcgagcaccgcgtcgccggcgtctgcgcccggcgcgagcgaggaggcggagggggaggaggaggccccggcgggcgcccccgacgccgaggcggaggaggcggcgagcggcccatccgaagcgtcctccgaggagccatctgccgccgccgccgccgccccggaagaatccggcggcggcgaggaagccgagccggcctcgggggaggccccaaccgccgaggccgccaccgccgccgacgtctccccggccgcggtcaccgtctccgagggccccgcggaaggtcccggcccctcggccgccgacgaggaggaggacgagagcggcgcgagcgccacgacgcagcgtggcagcctcgccgccaccgccgtgctcctcgtcggcgccgccgtctttgccctgtaagatcgacgtggccggctggcgaatcgacggtggagcttggagtgtatccatgtcgcaacgaaaaacgctgcactactacgacgcactcgttgttccattggtcaagtgtacaaaactacaaattgtacgatgagttggcccgatgcatctgttaggccttctgtgtctccatgacatgcatagctgtgtttaggtttacctttttaacttggagtaatttttatcaaactacatatattttaattaaacaatcgagaaatatagacttaagacggtgtatcatagcttccagagcctgcgtccctgtcatcctcgcgcgggcgaccggggcgaaccctagcctccggtcgccaccactcttccctcctctcccccgcctcgccaccgccgaagcgcgtcggcggaaaccgcgcggcccgccgggatggcgtcggcgaggctcctaccctcggcggcgcggctgtctctgcgcgaaggggcggcgcggaacgccaggaaggccgcgcggtggcgaggcgttgtggcaacgaatctagcgccgccaccgccggatctagcaccctcgcggctggatccgccgacgccgccgccggatctgggccgtggagacacgggcgcggcgtcggaggcgagacgtaggtgacggcgacggcggcgaggcgcggcgtggcagccgcggaggcacgacatcggcagcgaaggcatgggcgccggcgacagcggacggccgtggaagccgtggaggcacggcgtcggtagcaaaggcgcggggtgccggcgacagcgggcggccgtggcagccgtggaggcacagcgtcggcagcgaaggcgcgggcgctggcgtcagcggcggagacacgggcgaccgtggccgacggcgtggtggctgtggctagctggcagggccagcgccggtggtaactatggccgtggcctgaggtggcagcggcggtggctggcggtgcggaggcagaggctgttgcaacggtggcgtcagcggctggtcggcgacagtaggtggctggacgacggcagcagcggctactatggcgaccgtggctatggagagaggaggcacggtggcgactgtggttgagatgggagaaggcatggcggcctcggacgtctagccgagggcatggcagacggttgcatctggccggcgaggcagcgtttggaggaggggtcagagaccggcttggcgcagagaggcgcagccgatggagggaggccagattggcacgagaggcgcgtacagtgaaggaggccgacttggcgcgagaggcgcggccagcgatagaggaggtgaccccggtgcgaggaggagctgccgatggatgtgcgcggtcttcggcgcacgaaggctagccggcggggggcgccggtgcagtggtcccacatgtcggcaaatgttgagcggtggtggagcatcggtacgtcagtcgcggattcgcaggtggtgagcagcgggtgaaaacctagcccggccttggccggaccgacatcgatggttaattccccctcctgaggacgttgtcgtgctgtctcattcttcaagggtggttgttgggtgaaagccctgtcttggctcctttaagctccgacggacggcggcggcggttttccgtcgcttctcttcttgaagatgttgttttggcatcacctagccgaagcctctcgaacgattggtgcaagcacgctctaggagttggctttgtgttggttgtgagggcgttcttttgggcgatctcgtctgtattcctttattggtttagcggcggtcggtcacgcttagcggcgactagtccggtgttagctttctcctggaatttgtgtgttggtgatgtcggtgtgtgggtgtggtatattttttcctttttcctggttacgaccatccagagttgtaatcttgtaattttttcctgctctatcaatagaacctcgcaccgtctcgtgcgagtcgttcaaaaaaaagacggtgtatcataggctactgtttagcaacaaattcataaaaccataattttaataaaaaggtattatcacaaaactacatatttcatagtttaaatccattaattgcagtgtagctatggtggagttttcaacgttgtagttttctatttaaattatcaccaaatgtgcagctttataatagttttattgttggatatatagttatgtgatacttcataccaaatttgtagttttgttatatatcattgtaaatgtgtcgttttttctaaggagtaaatgtgtagttttgatatatctttagtcaagttatttatgctttcatgaaatttacttttatcgcgaggaatttggacttgcgtacgtaaggaaggggggtttgggcctcagcggtggtggaggtagtgggccgacttgtaggcatccaaaactgtttggaataagttcaccggagatccctcaacttaacaacgagattttttttgacgtcccttaaccacaaaaccagaaatctccacctctaaactatacaaaaccgttcactcaaggtccctacacactatatatgggtggtttcactgacgtggcatcctagtcagaaaaaaaagtatgtggggaccacatgtcagctgcacattcattcccttctcttctctcttctcttcttagtcagtgagggaggtcgacggtcagtgggcggagtggcaatgggagggtggcacgcgagcatggctatgggtggcagcgggcccatgtggcatc

SEQ ID NO: 25188 - DNA, 9078 bp, Oryza sativa
ggctgggcccaaggtggagcacccggcgcgttcgaacatatccgccgccgagcttgccattagggtagactgccaccactcctctcccaccgccgtcgtcgcgtcgatcgcctctctttccctctcccgccgccgccgtccccggtccgtcgctggccacctctcgccccctctgtcgccgcgcctgcttgagagaacccggagagaagagaagaggaaaagaaagaaaagagagaaatatgggacctataccattgtctcacttacatgtgggccccacatattaattttaattatttttgctgactatgatgccatgtcaacgaaaccacccatatatactgtctagggactttgagtgaactgttttgtatagtttaggggtggagatttctggtttcgtggttaagggatcttagaatatctcgcggttaagggatctccggtgaacttattccaaactgtttcgggctttgggccccgaaacagagcacaaggcccaaggcccagatgtttgctccttgtacaacctgctacacgttccattgtcgcgtccattttggcttcgtccaaaatccaagcagacaccatcatgtgaactgtctgttccaagtcagctacagtactactccaagtactaaccgcggtaaacaaacatcgttcgctgcaaacctgcggttttgtacttttgtttactgccaaattgctcaaactccctcggtgagtgtctcagatctcgagtgatttttccctgcccgcgcagtggcctatgctttgcatttcggtttcttccaccagttcaccgaacatgttctacagacacctgaacagcaaaatcggcaggtgctgagccctgatctgcccgtccttcacgtcaacatgccaccgtcgggcgtcagagatgcagatgccacgccggctacacacgctccggcgtgtgagggcaatagcattgtgacagaatttacctagcctcatatatacttcctctttttcacaatggaaatcattctagcatttcccacatgcatattgatatcaataaatctgtctagaatcattaacatcaatatgaatgggaaaaatactagaatgacttacattacgaaacggagagagtatcacctaaaccaaaaacattactagctatatactccacagtggcttatagtgggtcacatctcccactatatctcctctctttgtttcgcctcggcaaaggaaacaaagtggcgatactcgagcagcgccacgacggcgtcgagtggcgcgacccaagcaacgtcaagcagagtgattgaggtcgtagtcacgagtggcgcggcccaagtggtgccgaatgaaacggttgaggtcatggtcgtgagcggcagcagcttggtccaagcaatggcaacaagcggagcggcagcgcacggcccaagcagcgccgagcgaagcagcgacggatcaacctcgagctctcttcccgaaggggcgtgggacacaagattgtgggcccaaatctacaattttgataaagaacgtgcagcttattttggctccttattcttgttgaggcaacgaaaaatattaacatggagagaaatctctgggttaaccggttagggttatatgatatgtatgtgagtacactgctaacatacttcctccgtcccacaaaaagccaatttagaaagggattggatacatgttttttatacaacaaattagacaagaaaacatctaatcccatcctaggttagtttttctgtgggatggagggagggtggtatacgtcgcactcaccatcgtccgtcggtggcctttgtcgcgtcggccgcgtgttacagacttacaggctcgtttttaaccggagcgcgacactggtaggctaccggtgcagcacagcagcggcagctgcactctggcgccgtgcacgtggaatcccggcctcccgactcgcggcaacccaccgcgcgcggcggcgtgttggcgggggggcatctcgaagcttcgggcccatgcatctccccaatctgccgctcaccacgtggttaaaaagcttccggccggtgggtgcacagccgtcggatgcgggatcgggcggtgggggagacgcgcgaggttgcgtacaaacctccggattacaccgaggttagcagcagcatcagattcggggggacaatttttttttttttgctttaaagtctcgtcgcttcgtcagcctcgccgcgcgatggacggcgccgtcggcgagcccccgtccatggctgacgctacgtactactactactaacctacggagtagatttttgcggagccatcgtttcgcttatctacgaaataaacgaaacgatatatttacaaacgaaaaataatttgtgaataaaatttttatatacgtattcttagcaattactcccgctgtcaggtggatgtgaaatatcttattactacgaatctaaacgaagagtatgaacaaattcgtatagtagtaggatgtgacacatccaatcaaaatcacttatattataggatagatggagtaaaagaaaaggctgaaaaataaactttgataaaaaaatctcaaaatctgcttcaaatttaaagttaaaaatttaaattttgacagataaatataaatataagtgaaaagatgatgcccttgaattttcgatggactggctttttggacagcattttggtgcacgacatcggctgcaatttcatgggctccaaccgaaattcggcggcagttgagacctgtgtcctcggcggttgatgacagttgagaaagttctcaccatcgcactgactcagatatggactagatctagggccagatatgaccttttctctggagtatcaagcttttgaccctcgaaatacgatgcctcggtattcgtcatatcagcttctctcttcttcgcacaacgctagtactccacgttgcccacataaaagtactctactctattactagttgcttggatgcttagctacactctgtaaaaacttctctttagagagcaaatcattagagcagattcaatagtagactataagccaactataaatatattttaaaaaaaataaagaaagtttgagaagagcaatgggctacagatatgtagccagctgcagcgcggacttcaagacataatgtgtgtatgacagatgggactaggtattaatagaatagtaagtaactattatatgaattggctagagatgatttggagctagtagttagctatactattaaacttgctcttagcgaagacggagtactcctactagacatgcttttttttttacaactgcaaactagacatgctctgcaatccgtataagagcaagcttaatagtatcgctaactaccagcttcaaaccatttatagtcaattttatagccaattcatactatagatacctataaacatatactacacaattatacttagtcccacatatcatatacacatgtatctaggagtccgtactgcagctggctataaatctatagcccgctgtttttcactcttctcttttatctcctctctgtacctgctctaaccacttcatgatgcatccggaattccggatggaattcagttgccgtgctaattttgtctcgcttactgctgggcccgccgcccgctgttcttgcccctgcacactccaccggtcatgattcttctcgattgcaactcgcatgctcgaaaaggacatcgactagttcttttttaaaattttctttcttcgttttcaattccaggcagctcgagttagagtgaagacatgagcaagctctgcatgaagacatttcactgcgcgcgacaacttgctgaagtgctgatgaaaacagcctttcctacgtacgctagaaaccactgatagtaaatgaggacatcatcacatcaaacacaagatccaaataaagaggatgaaaagagatgaggaagatgagggcataaaaaggttattcggtggagtgcaagagcaagcggtgagcttggaggaacaagcattgccattggtgatattatattggagccgtggacatatgaatatattcgtctgagtttaaatcatgatgcttataaatattatgtaaaaatacgttttcagtagtataaatatatttagttaacctatgaatttatttttatctttaagtttcttttaaagtatacataaagtatacataagtatataaatatatgtacacgtgatgtccatgtgtaatgatatatgtgcacatatgcgtacgaaaactatgatcatattcggagccccatcggttggtcaaataaactaaagcaaaagctaaaatttaaatttcaaatttaattttaaggtattttcaaagtaatttatttttagcattggcttttaaatcactataaacaaatatataaaaattttacctattaataactttttattttttaataaactgttttggcttattaggaagtctcaggaactgaaaagaaaatatcaaaatggcaaagggttgcaattacctgtgaacccccggggcatcacgctgtgcgcacccaaccaagttaagtgagcgccaatctctatactgcgcccactccccctcactcccacgcggcacgcaccccgctgcaccctgcaccacgctccactccacccccacccccaccccaccccacgccgcgccgcgccatgcgccgcctccgcctcgccgccgccgccgccgcgccacacggcgtcctcctcctcctcctcatcctcctgccgctcgtggccgcggccgggccggcggcggccaaggcgcccgcggccccgccggctccgcccaacgtgacgacggcgatggcgaagggcgggtgcaaggccttcgccgacctgatcgcggcgtcgcccgacgcgtcctccacgtaccagtccgccgccggcggcggcatcaccgtgttctgccccaccgacgacgccgtcagggcgttcctgcccaggtacaagaacctcaccgccgacggcaaggccgagctgctcctgttccacgccgtgcccgtgtactactcccgcggcagcctcaagtccaacaatggcgtcatgaacaccctcgccaccgacggcgccgccaagaactacaacttcacggtgcagaacgagggcgacgccgtcaccatcaagaccgccgcctccggggacgccgcgcgggtcaagtccacggtggtggacgccgaccccgtcgccatcttcaccgtcgacgcggtgatcgagccggtggagctgttcaagccggcgccgtcgccgacgcccgcgccgtcgcccgctccggcggcggacgctcccaaggccagtaagcccgcgcaccacccggcgcccgtcgtggcggacgctcccggccccgccgccaccgactcgcctccggcggaccagaagaaggaggccaagaagagcgcggcggccggcgcgccgccgtgcgtccggtggttcgccgcggcgttggccgccgtcgccatggcctccacattggcctagggcaattgttcttttttttttgtgttcttggttgatgatccattggcgtgatcgtggtgtgatggcgtgttgatgtgcttgcgagatttgtgcttactttcgtggaagaactagtggagtgcttaaatattttgttagtgctttcctagattttcgtttttttgtttgtgcctgctgttgctacttgttaattgttaattagcattagtagatcatgagatgttgatatcttatcagcattttggttttgacttgatgagtgcagttaagttgctgagattttgctacatgaaccgtgcattttaaaatttaaacccattttgcagcttttccattatttttttgacagagagatttgtcacttaaattgttggaatgtttttctgtacatctcctcgagcaaatctcagatatgaaacttatcatggtgcccgttttactgacaaattggcaaggatcttttcgttgcatcaagtgcaacttctgcagctcatttcttgttatttcagttgtcggtggagccataaggccatttgcttcagaggtcaaaacaacccaacccacacatcaaaagcaacagtaaaaaattccttaaaaagcacacagtaaaaataaagaaaggtggaagtaactgttactagaaggagaggaggagatcgagacagagatatttgacgtgatcgagccggagagatttaaggtgagcttgaaagaggggttgagattgtgccttgacacagaaaacaaacgagacattagcacataattatttatatgcattagctatcgcaaaattaaaattttgatttacataagacttatatatataaaaggtttttaaatgtaaaaaaacgtaatgttgagcagttttgaaagcgtgttaaacgttctttttttttctttagaactcagccataattttagttgcattgtgtcttttttaccgagaaaacaggacacgagaccgattccgattcgggccaatttccccctaggaggggatgaaaacgagcctttattggtagcaccgacagggctgtggatccattcggacactgccgccactcgcagctgagcgacctcgcagtgttgccatcctagcccagcatcttttggcacgagaaagcgcttcggaactgtgcccgtttccgacaagacagtgggcagcaaatcttgtttcagtcattcctcttctttggtggtcagtgatgccgcttctctgatcacttggttgttggttgtttcagtcacggcctctctaaagcttcacaatccggtcacgaacggtatcatctaatttcgtggaatccgttgataaaccgataaagactgataaaatttgaataatttttgctgaaaaaataaattttagtttggttgttttttaactttacgtgaaaaatcgagtggtttttatttttggcctagtccggaaaatccgcattttgctaaattcgaatcgaattctactagaagttgtgtactctgtcactctcttctttcactccttgcacttctttttaaaaagaaaaaagtacgaattaaccccttttatcgcggtcgtccgaaatacccccctgaaccacaaaaacggatatttttcacccacaactatgcaaaccggacaaattacccccctcgactcagtccacaatggttttggtttacgtgtcgtacgcgtggtagtccagtcagcattctatttatataaaaaaatgggacccacctgtcatatcctcttccacttcctctctctcctctctctctctctcactcttcccccctctctctctcatgcgcatgcacgctcggcggctcgtcgatcccacggaggaactcgaggagcggcggtcaccgtcgccgtcgctggtaccgcgcgccgacgccatctcccctcgggccccgcccgcatcgcgtgccctcgtccgtcgcccgtcgtcgttgtcgccttgagccccacctgcgcgccgtcatccgtcgccatcatcctgcgcccgtgtgctgccgctgtcgcgtctcggagaaggcgagcgcggcggcggaggaggcgaggggacgacagaagagcgtggcggcggaggaggagagagggcgacggaagagtgcggcggcagaggagagtcctccacccagccagccgccgccgtagccgcctctgcccgtccagccgcgcccgccgtcgcagccgcttggctagccagtcgcctccgcccgcccagccgcgcccgccgtcgccgctgctcgcccagccagccaccgtcgtagccgcgcccaccaccgccgctgcgtgctttagcgaggggaggggatgaatatgtgaggagagagagaggaggggtgcacaggtgggccccaccgaatttttttaaaggagtgctgacttgcctgccacgtgtatgccacgtagatcaaaaaccactccagagattgagtagagggggttatttgtccggttttagtagttgagggtgcaaaatatttgtttttcgagttcagagggtaatttatacgaccgcgatagttcagggggcaattcgtacatttccattttaaaaatatattttagagtattttttttcataataaacttcttttccaacccaatccgctaataacacatataaaaaattgattcatcaattattttctattgcttcttttatatttctacggtttatcagtcatagctcaatcaatcaaagctgagctgaaaaaaaaactgggaggtttcaaactgattttgaagaaataagttcagaagtttttaacttgcaaaaaaagaaggaaaatgcttgcggtcggacgtccgacgcaccaaacaaaatcggacgtgatctgctcacgacctacatactactctctccatcctaaaatgtttgaagatgttgacttttttaaaaatatttgaccgttcgtcttattcaaaaaatttaaataattattaattcttttcctatcatttgatttattgttaaatatacttttatgtatacatatagttttgcacatttcacaaaagtttttgaataatacgaacggttaaacatgtttaaaaaaagtcaacggcgtcaaacatttagagaaggagggagtatatgtctagctgttgtcttattttttttctctcagcctactgcatggttgcacatttctctctctctctcttacttttctccttagtacttcactctaatatataagtgtgtatgtatgtagaaaaaaaaaagctatgcatgcattagtagattcaaactagttttctcctaaaaatatttattaaatctacaatccgattacactattatatctgttgcaattaaatctttacaataagatcttagttgattatatttttgataaaaaaataaataaaaagaataaaacactattaaatcctaattgaaacatttttattctatatatgaaacatcgagttataagtgttgcaacactgcacctatttattgaaacactagaaaaaacactggtgcaatatttacattgaactagtgaaacattagaaaatacttattgaaacatctaaataatatcacgtgcaatatttataaagatcta

SEQ ID NO: 25189 - DNA, 1641 bp, Oryza sativa
ccttattagctaaaagatgactgatactattctgacttcggtggacccttaaccaacttatctccctactaacatgtatgaggtccttgatttccttaactagaaaagcttgatccgacatcgctttctcagtagactttagaagctgtattgcttctaggcagtcagactcaacaatgatcggcctgagggaccaatgcagggccaatagtaatccttctctgtaggcaagaagctctgattctaaggcactgatgcagctcgccaggggtttacaggctgaagcaattacctctcctgtactgtccctgaggaccatgctgattcctcccttatcttgactagcatcaaaggacccatcaatattcagtttcacccagcccaaaggaggtctcacccacctgtgcttgacattgttctacatctgggaactcctgatggcgcccgtcgctacataatccacaacatgttttcctttcattaaatttgcttggggtttgttgtttgatctcaagcagagaacacatatagctttccaagaatcttctggaagactcagttgtcggtgcaggtttcccatgcgtaatatcattgcgaacaaaccagttgcgccacaataccatgagaaacatagcccgctcgggttcgagaagatgctccaatctatcaaagatccaacctgatacaaacgggccatcatccataatacaggatatattctgggactccttcatgaccatccaaagagacttggcatgtggacatcgatacaatgcatgggcaatgtcttcttcctcagtaccgcaaattgcacaaacatctgtggcctccaatttccttctcttcttgttcaccatggtagcaaggcaatctaatgccaccttccaagcgaaaatttttaccttctgaggcacattacatttccaaagcatgttccatgctttactacggtcgactgcagatgaggctgaacaagcattctcagaagcaagcgaaactgccaggctataagcacttcggactgaaaacctccctaatctgtctgggtgccaagccacaaagtcgcttacatcctgagagggaacacgaattttcagtataacttcagcatcaatgggccagaatatctgtcgaacccgatcgacatcccattcgcctgcatctgttaggaggtcagctacccatttggttctgcagttactcttcttggtgatcggtcgtcttgagtgatcacgcggaatccatggatcacgccatatacggactgagcgaccgttcccaattctccatattatccccttcttcagcaattccaaaccaaactcaattgctctctagcccggcgaagcattcccgccaaaacttgtgtcaatgagatttccatttaggaaatatttcgctttcagaactattgcacaaagactgtcaggagaatcaattagcctccaggcctgcctggctaacagagcttggttgaacaatctaaaatccctgaaacccaagccaccacaattcttgggtttagtcagcgtatcccaagccttccagtgtgttttccgcacccccttttcaccaccccaccaaaaacctcttgtgattcttgtaagttcatcacacacagattctgggagtttaaaaatt

SEQ ID NO: 25190 - DNA, 17509 bp, Oryza sativa
ggcatatgtgaataggagaaagcaccccctgctggaccttttcatctaagagcaaagatagtccgtcggccaggaacaggaataggaagggagataagggatctccttgacaaagtccccgagatggagcaaatgaatgaagaagggttccattgaatttaaccgagtatctcaccgtggttatacactccataatccatctaacccaccggtgagcgaaacccaacttatacattgcctgctccaagaagccccaatccaccctgtcatacgctttcgatagatcaagtttgtatgcacttgctgctttgtttggattcttgttcttctggatatagtggaagcactcaaaggctagaagagcattatctgtgatcattctaccaggtacaaatgcactttggttaacagatattaattcatccaagaggggtctcaatctgttcactaggcacttcgaaaccactttatagatcacattgcacaggctgatcggtcttaagtcttttagttcagtgggttgatcaatctttggaatgagcacgattgcagtgtcattaacccccgctggcataattcctgacctaaaaaattccttcactgccctcacaatgtcactcttcaagccaccccagttcctctgatagaaacgagccgggaagccgtcggggcccggcgccttaattgggccaatctgaaacatagcaatggccacttcctcctctgtaaaatcctcgcacagtttatcattcatcttagctgaaaccttagtttggaagagcctagtaatcttggactggtccaagcttggggtcagcagtgtacaacttctgaaagtaatcagttgccattctcttcatttctgttgtcgaactgtgaacagttccctctgagtcccgcagcttcaaaattttgttctttttggctctccacaccgctcgggagtgaaagaacttggtgttgcgatccccttctttcagccagctaactcgtgaacgctgcagccagagcatctcctccctatacaacaaatcattcatgttgtcagtcacttgtcgaactgttgccccatcagcgtttgcctcaaggaggttggacaaccttttccgcgctctctccagttcacggccaacgattttgcatttggttctgctctaggagtgaagtgctatcattactttactgagagccttgttaatctcccccagatcctcctttgtcccatattcactccaggcctcacctatcacttcagatattgctgcttccctctcccaaaagatctcatactgcaagcacttcttcctcccttgggtccgagaatcacccgacaattgcaacacaattggacaatgatcagagcaaggggacactaagtgagatagttgggcattactaaacacatctctccaattgttccacccctctcttttgttatcataagtatgaggcagtcctctaaaacccaggtcatgcaattcacagctatgtaaagcatctcggaaagctctcatctgagactcatttctaggtctcttggagaaatgctcgtattgccacagcacctcattgaaatctcccataaccaaccatggaagatcagaggattgccttatatcttccaaaagggaccacatacgatgtctattctcaacacaaggctccccatacacaaaagtaacatgccacaaaggaccatccacagtcattctcacatacgcatcaatatgtctttcattcatatttaaaacttccacataaacagtctcgtgccagaaaagagcaagaccaccgcacattccttcattactgaccccagcaaaacctttcaaacccaatctattacgcaaatgcctaattctttccactttttgtctagtctcacataaaaacactaaatgggaaccaacctccttaaccaaggtacaaagatcacgaactgtcgtggcgttcccaataccccgacagttccatacaagcaactcatttctcctgacgggatccaatcacagatcccgtcagtttaccagcagcccccgagctggttgcttccctgtcttccacctttatgctctcccctttctcctttttaaacctcttcaacgctcgtggagtgctgctaggagctagctgaagctgtttactctcctccgctgccttgccatactccaagagtgcttgcttgactctgccagaatgcttgccatctccctgctctgttgttcttcttttgtgttgactattagtttcatccattgagccctctccaaaggaagcttgctggtgcaggttcttcatcgccggaatcatctcctccgaaggtagctgatcaacaactatatcagtgataacctcccgagacaactcaccgtactgttctggacctgtctgtgccgaaacctacaaattacgggccttctctgcaagcagttgatctatcttcccatctcctgctttctccttggactcaaatccatcatgtgcatccaccctcggtgggatcgcctcatcccattgctcacccttcttctgtctggacgatgtagagcttgcactaccagcactcctgaaggacagcttgtgtgccacacctgaagactgcactggttgtattttactgatcttcctctcaaacggtttcaaaggggagcaacgcaggtctgcagagaattggaagggttgtccacctgtgagtagtttcttttcgcagtccttgtctgagtgaccgataaacccacagatgaagcagaagtggggcaccctctcataccgtaagtcaaaatgtctgacaacctcactaccttgctccttgatcttaatggcaagctttttccggagggggcgcttaacagggagatccacacggatgcggaaaaaatcatgtttattacggccgtcattctccacatccacctcccgaacgtgaccaagcttactaccatagagatttcctctttccctcgtcatcaacaccaagggcagatcatagattctaacccagatgggtaccacctcaaaaggtacctgcgacgggcttataatcccatcaaattgggccaccaataaggcgtcccccctatgcagccatggacccccttgaactacaaactgatagtcaccctcagatgtaaaggtaacgatgaacagattatctctgagcgacttataactcataccagatttcagcctccatgctctgcgcatatcatcaaaaagagctgtggggattggtgtgcgcattgagtaataccttgataggattgtccattgacccgcaagcttgacttgttcatcttcaagattcacctcaattgcatcttcttcttcctcatagacttctccctccgtgaaggttcctggaccttcagtgtagaaaccttcagcatcaccctccagggtaccatgggaatccctatcccgactgccttctccaacctcctgagatgcaagtaccaacgccgaggccattggtttccccttcgccgatggatcccccggcggctgttgagaactttcgatcacaacttatgttgttggcttcggacgggtaatcatcttatcgaggatccttttatcacccccaccgccaacagacgccatgattgtacttttacagcctttccaagcaaaccctaggaaccgaatatggggagatatcttcttggaagacaggaggattgaccgccccccggacgaccctcctcctgttttatatgatagaacctccgagtccggatctttgacgaacttccaccatgggtaccaaccaaaaccatatcttctttgtattccatatccaattactgcaggtttgttgcagatatcccataatcgaacccaccctatagatgtatccttatctgttctggacaggaatttcagcgtttggagattgaatgctgatccgatcaccaggaacaaagttgatttctccgtagaaaagcagaaacaagaacaatccgaaagcacgagcgaaagcccggccaaacttaccatcagatcggagtagaactccatccaaatccatcgctctccacgaacaatggccgccgccgtccgatcactcgggcgtcgccaaaaccctaacatccgggaaatcaggatatatcaactaatgaatagttttttgttcgtgatatcttgttatatagatttaattacaacgaatgcaacagtgcaatcagattgtaaattggataaatggttttcgagaaaaaatagtttgaagcttgtcactatccatgtacctctctcatttggtacataaacttttcttgttgtcgctcttctctacatgcgtatgtaatagtttttttaatcagatggacataaaggggtggatgtggatccaccagtagaacagacgtccgacgaaaacaatcgcatcgtacgtccgatccgtagtcgtctaaaaaaaaaagaggaaatctcacctggacgttgtgtacttgtgtcggagaaatgcttcagcgcctcaccgttgacagcgccggggcggaagaccaattctagccgcacgatcagccacgtggcggagatctaacggccacacctcatcagcaccagaaaaaatagctttagcttagcgacgagcgcgcgccaccgcccgagcacgagaggccggccgtttcccgccctaaaaaaagcccgcgaacccccacaatatataccgctcccgccaccgccaccctctccctcgtcgcatcgcaccatcaatcaatcgatcgatcgatcgcgtcgccatcggcaacgccaccgcacgcaagcagcaagcagctgatctctcgctcgatcgatcgatctcgggaaacttggatttatacccatggcgcctcgcgcagcgctcttcctcgccgcgctcctcttcgtcgccatggtggtagtgccggtggcgagggcggcggaggagtcatccgccgagtccccctcctccgagtcctcctccgagtcgtcgtcgtcgtcctccgccgacgcgccggcggaggggcccgacgggccggcggcggcgcccggccccggcgaggggatcgacggcctctccgacgacaacgacgacgactcctccaactgagcccggccggccggccggcctcgtcgacctcgcgtcgtgaacaatccgttaatttgattgatgatctggagcgattaataaggatatatatatatggtcgtcgtcctgcgatttgattacaacttgttctctcctcgttttttttttcggatgaaattttctcattctctagattaattagtttgtaatcgcagcctatcgtatttgtgttctttggacttcatttctcctgtaacagtttttaattgttgtctactaatttgagatatggacagttttatatttgttctagcatatttcaaagcacaagtatcaaatagcttgccgctgtattgggccgatataatgctccagcagaagctcgcataattcggcctgctcgtctggtctctgcttgaaagcccaatatggcacaagagcccataggtcggattacaggatttaaatttaaaattcgtttggaaaataacacgcgtgcctgcagcctgctgctaggatggtcgcgcaaaaaacaaaaactatctgtctttcgatttgtatgagctacctatattgttacattggatcgtgtagttgaaatacgattatgcgcaatccaaatccactcgaaattgatttttaggcgatccaaattcatacgagtacattcggtctgttattcggatccgcgccatcaacttcaacttacaatgaacggatttaggttaccattaggaggcctttctcggaaaaaaaacacacctaagtgtcaggcggtggcatgacctatgcaagatttcgtagatttgcgatgagtttttttttccttcaaaatagccatcacgcataagcctctccaaggagccaaaaacaactgtgaaaatggagaaaaacgcaatcgaagaaggtgttactggctctggtatatcatgtttcaatcaactgtttacaaccctggtcatctacaattcttctcgcaaacgaactccgtgatggattggacattttctactatagtgcgcgtcatcgcacacatcatattggctaactcttccgtttcaacatacaaatagttctatagattttaaaaatacattaagatttagtataaagagtatgtgactgtcaatattgtattcgtttatggcatcccgtctccctagttacgcccctattgtcatgggagtcagatctggtgtcgtagtatagagtttgtgccgtgaacaggaggtagaggaagaggccacgagactatttttgtccaccaccctcgtcgataacacgtgctcaggttggatccagtggcaagaaggatatcaattgctaccgacaattattagttgataatattaaagtatcggatctgatacctaacaggtattatatcatttggaacatagacgttgtgcaatagcaaccctctaaggtgtttaacatgtgaagtggagagaatagtttcttgtgcattatgacaacaaaagatgataccataccggagcttgctaaatccttctctacgctgcgcagtggctctcactcgcgacgaatgtttccaaaaggccagcttcaattcttactatttactccgatctatttcacaatgtaatactttctagcattatctacatcatatatatattaataaatctaaacacatacatatgtttagattcattaacatctaaataaatataggcaacactagaaagtcttacattgtgaaacggaggaagtatcatgcagagagttaagtcgtcgttgatggaccgatctttagttggcatagtgattaattatgtttgtcacgtgtcgaatgtcgcaactcattttactagctcggtcttgtgagttgtgcgcattctagtaatggtatctatcgtaatgttatcccagagtgtgttcggagacactgtgtaatgatttatcataatcaataaagcacaacttcctctaaaaaaaattaaaagttttatgattaatgatcgtgtcctcgttcgtagcccttgacattctgcacgtgcacagccacatcaaaaatcatgatacatcatacctgccatccacgcatctaatgctggcatatgcctgccatccacagttaattaagttagggttccaaattttttcttcaaaattttaacttttccatcacatcaaaacttttctatacataaacttcagacttttccatcatatcgtttcaatttcaatcaaacttctaattttagcgtgaactaaacacaccctatatgctcatgaatgaaacttttggtttccctattattttttttaactttttgttcagccatactccattaaaaaaaatcaacgtaggtaatgatttaacaccacctaatttattttgaacaagctcatatatccaattcattagacggttgtatcatatcttcacctaaattagtactccctccatatattttaatattttaatgtatgacgtcgttgactttttaaccaacgtttgaccatcgttttattaaaaaaaaattgtgtaaatatgaaaatttttatgtcatacttaaaaaacatttcatgatgaatcaagtcataataaaatatattataattatataaattttttaaataagacgaatagttaaacgttggaaaaaaaatcaatggcgttatacattaaaatatgaaatatagaggtactacctcagtcccaaaataagtgcaccataaatatccgtgtttagcgctttgaccatccatcttatttgaaaaatttatgaaaaatatttaaaaaattagtcacacataaagtattattcatgttttatcatctaataataataaaaatactaatcataatcttttttcaaataagacgaacggtcaaacgttgaacatgaacagtgctaaaactgcacttattttgggacggagggagtagtatttttttagagaggagtaagcattaccacggatccaccgggtgaccactcattcagacaaaccaagttaatccgtccttcccgcttcgcacgcgcgctcgaccacccgcgcgcaccggcgaaacatacggcgcggctgctgcacgcgcttcgcctccgccctcctcctcctcccattccggcgatctcctcgccgcccagatatacaccaccaccaccctccggcccgatcgaaactggcattgcgatttgcgaatctatcgacgccaccgatcgacctacgcctgcaaattaaattccgcagctagctagcaacaacaactcccgaccggccgcggccacgacgcgcgcacggacggacggacgacgacatgcctcgcgcactgatcgccctcgcgtcggctgtcctgctgctggtggccgcggtggcgccgccgctcgccgccgcggacgacggcggcgccggagtcccgggggaagggaagctggagagcgcggggtccgcgattaagtcggcggccgccaacgcgttcggggtcggctccgacatcggcggcgtcccggtcaacccgtcgccgggtggcgccaacgcttaatatatttacagtattacagtggctgtttccttgtgactttaatttgtcagagtttttggaggccatttcattccatatatacctaattaattactacctaaatactagtatatgtaattaatcacgcttgcttgtgtgtgtctgatcaatgttgccacttcttgtctggttcagttgtctatcatatatacttccaccgttttttaatatatgacgttgttgactttttctcacatgtttgatcattcgttttattcaaaaattttatgcaaatgtataagatataaatcacacttaaagtactatgagtgataaaacatctcataacaaaataaataataattacgtaaattttttgaataagacgaatagtcaaacatgtgagaaaaaatcaacagcgtcatctattaaaaaacggaggtagtatcaaataaactggatttgtatatgaaaacacgttcattttatatgggtcctctataagtaaacatgatagtaatatgatagcatatcagaaacatatattttttttaagttacggggatgtcccctcatcacttttcaaatacaatctaaatggctatgtaaagtatctcaaaacatttaataacgttgctacaacatacatataccactccacaattttaaatctaaactcaaactcaaatcatgaagagaaaaagaaaaagacatatccacgaatgaacatttatactattcacgcctagatttttccttttctctctcaacatgtagattgatctcaaacttagatttggtggaggaagatatcactatagacttatacttttttaattttcttttttaaaaatactccctctatcctaaaatattactcctgactgtttcattgaatttgagagcaaaaaaataagtccctctctttcaaaatactcccctttgtttgaaaataattattgtttcagagaaggacacaatctctaaaaatataactttggtcactaatttccgttataaatatcaacaagaatatgtttttattgaagtacttttaaaaattaacctttacctatggcctccatatttatatggcaaatattttggaaattgttttagtaaaagttttaaagttggctgttagctagtcttgtccaaaacgtggattattatcaacttgagtgagtataagcatttctgtctatgtatacaaggtcccaaactataagaactactgaagatgtatatggacacatagaattggtgtaatatatcaaaatacatagccataaatgtatattttcagacaatgaagaattcataaccactttcattgaagttgagaggaaaaaaatacatctattctataatataagtatttctagacatgtatttggacaaggcctaaaatataatataaggaatgcttatatatattataacaagagaaatacacgacatccggttggagggattcgaatccatttcccgctcgagacggagatggattctaattgctcggatgaatgtctaccaatttattgtatatcaactaaatgattatgaattttttttagaaaaaaataacaaggtagattgatatataacatatcccttcatagacatacgatttgaaattcaaattatataaattgtagctaaaatattaactttaaccatgaatatacatatactatttactggttatagtttgatttctttttttttctataactcacagaaaccgaatttgaacttgcattttttttcatttgtgaaacaagatattacatacgaatttatcttatcagtttttcttaaaattcttttataactgtttagttgtcatgtaaaatttcttttcgcaaatgcgttgaaataaaataaatgggtggatgttaatgtaagtgatcaaagatgtttacagcccgagaccactcatgcaatctggctccggcacatgcatgcaattgccacgccatgctccgtgaccatcgggtcaccactcaccacttcaccagacacctcgcctcgtcctcgccctcgtcatccgcacatcgctctaccattctcgctggcttatatatacacagactccatccacgacgacgacacacatactccaccaacgcacacacatcgaccgcgcccgccgcctgcagccgcgcgcgccgtcgccgccacacgaccggagagcacacatgtctcgccagcaggcggcgccgccgctcgccctcgcctccgcgctcctgctgctgctggccgccgccgccgcggtggcgccgctcggcgccgcggcggacggcggcctcgtccagggcggcggcgaggtcgcgaggtcggccgcgaacaccctggccgtcggcgccgaccccgaccctgcctccgccgacggcatcccggccgaccgggcgccggacgcccacggttaattaattaattaatcatcgctgattcgatcgtctttaatttgttggttttacttttatttcttttttttctgtgtgtgtgattgccagtgtggtgaagctactacaggctatatgatccaagagatgtagtacttaagcttgtgattgatcactacttcctccgttttaggtttcacggtgtaagattttctaacattgcttatattcatatagatgttaatgaatctaatcatacatgtgtatagattcattaacatctatataaatatgtataatgctataaagtcttacatagtgaatcggatgaagtattaattattatgtatgttatagtgggcatgtgccatgaaataaactgatggaagtgctctgtaattcttagttcgatggattttgttcgtgtttatgatgttttggtccttttggatggtgaatgtatatatagtggatacaatcgaaacaagcatgcgtgtatgagtgcctctgtttagcaaagtgtgttcagacaatatttttgttgaaccatacccatatgtaattaattttaaccattggattaatattcatcagaaaatatttttaaggtaaaccacgagaaataatctcgagaacaaagaggtcctacttaatattaggaagaaaaaaatgacttaattttcttaaaaaagacccgaaaagcatataactgcaattaattaaaagaatccagcaaaacctatacggagagcgaaaaatagaacaaattaatgttgccaagctagtcgcaaaacagacaagcaatacatactcctctaggaaagcataaaaatataaatatatgcaagtgaacacatttgaaaatacatggaaaaaaggtcaacaaaaattagtgattgatttttcatactggcgtcgagtgataggtcttttcgaaaatgcttaatctcgagcgttcgacgtgggatgaaatatcagacgcatcattgagtgggtcccagcaccgaaccaatctcccaccttttcctcccaatcctcgaacttatccccattcccttctctcgcatctcactctcttcgtctctacctctcgctctcttcgtcttcgatgccttcccgactcccgagatacgatagtaggaggccggcttcccaacctctaccaccaccaccggcctcgtcaaccggttcggtctctacatcctcgacgtgtggttggccttgcagctggtgcccacgaagaagcaaggcgtcatcccgaagacgcagtggcgacgacgctagacatggccgccggggatacctgatgttgatgcggttagtcctagacgaggtcgcccacttcatgccgctagtcgtccgaggagcagcaaccggagttgacaaagaagacggaggtaggtttaactttgtgttgcactttgtgtattaaggtgtttcattttgttttgattcgatgttgcatatattgattcttgatgttgcaatcgatatgttctaattgcatttggttgaaaccacctctgttgaagcgatgaaacatttttccctgattgatgaaacatctgaaacatttttcatcgagaagtgcaacatgtaaagcattttgcaacaatacggtgcaacaccgtttgatgttttgcaaaatatctaaaacatttttctctgccagtgaaacatttggaacatttttattgaaatattttttatcaagagatgaaacatgtgaaacatccctcaacaactcggtgcaacaccgtctgacgatttccacaagatcggacatccgatccgtagcagcctccatgtctttttcgaggagagagtaacgtattgcttcagagagaaatgtgcacgccatgtgaggacctaatgccagcttccatccacccaagcctccatgaatcccatacacagaaggagcgaattctataacagcggcattatccacgagctttactacttaaatggccttccactgatacaacactggccttttctccttttaatatgtgaacaaaatcttttaagtatcatatcatattctctcattgatcccttgctagatgctttacgtatgacacatcctgaaaatatatatgctttgcacatacgacgacattcttatgtgtaaagtgatggtgtacaggaatataatacactgataattaagcatggtgctggtgcagagcagactgtctagttagctctactgttaatttctcagcgatctgtatatatagttggattgctgctctcaccttgtgtttggctgattggctcatctctgagtcattttgtgatttactattagattgctatactttacaatacccaagatgagatctgaagtaaattacacgtttgagctcgccaaggttgcaagtgcatgggctggcataggattatgaatggatggtgcagatttcttctaatgcaatttactgtagcatctctgcattttgtactccaatgcagaggatcccaatgcgggctgcatgcgcatggaagaatgaagtatgaactatgaagaataattcttgtaggctaagaccagtgatccttgaggttgatgatggcggtttatgacaggaagcaactgtgcattgagccatcgatcgatcagacgatcacaatgacaggaagcaacctgcaagacttgatctgtacacgaaaacggcagcgggcaagaacacaggaaataggatttaccgcatgcatttgtctttaatcgacgagttcttgtatatcagagatgaaatggcaatatatcgaagtcttgaaccctctttaccccctacatttcaatcatgcagcgttgcagatcttcatgtttgtgtcctccactcgaccactcgtcctacgtagtgttctgaagaatttctgcagaccaccccttcatttccgcttctctgcaacttcaggtgccatttcttctgaaaatgttggcccatttgaattttaggaataaaaaaaaaccataggaataggaaaaacagaggaatctgacaggaatgaaatgcaaaacagagtattgcataacacaggaataaccgtttgattggatcataggagaaacatagaaatcaggtgagagagatagactcgaaggaaattttccaagatgttaaagctcttgctaaatttcctccaaaatctctataggattgtccattccataggattttcaaattttttttgaacgactcgcacgagacggtgcgaagttctattgatagagcatggaaaaattacaagattacaaccctggagggtcgtaaccaggaaaaaggaaaaaaaaaccaccacccactcaccgacatcgccaacacacaaacctaggagaaggctagcaccggaccggccgccgctaagcgtgaccgaccgccacttagaccaacaaaaggacatagacgagatcgccccctaggggatgccaaaacgacgtcttcaagaagagaagcgacggaaaaccgccaccgccgtccgtcggggctcaaaagagctaagactgggctttcgcccggcaatcacccttgaggggtgagacagcacgacaacgccctcaggagggggaatgaaccatcgttgtcggtccgaccaaggcctgactgggttttcaccgctgctcaccacctgcgaatccacggctaacgcactgatgctccacctccacacaagctctgccgacatgtgggacccctgcaccggcgacccttgccggccagcctttgtgcgccaaagaccgcgccacacccaccggcagctcctccacacacctaggtcacctcctccactgccggccgcgcctctcgcgccaagccggcctcctccaccggacgcgcctctcgcgccaatccggcctccctccatcggccgcacctctcgcgccaagccggcctccatctccgccgcccacgcctctcgcgccgagccggcctccgctgccatcggctgcgcctctctgcgccaagccggtctccgacccctccaccaaacgatgccgcgccggccagatgcagtcgtctcccacgccctcggctagccgtttgaggccgtcatgcctccggtgacggtcaccaccaccgcagccgctgctgccgaacgcccagccacctcgcagtcgccatcctcacctcgcacctgactccttccccgctgccgacgtcaccactgcctccatagtcatggtcgccgtcgccgctgccaccgacggcagccaccgcctccacagaccgccactgtgccgtcgccatccgccaccaagcagccagcaaccgccccgacgacgccgccgccggcctccacgccgtcgcaccatcgccaccagccgctgcctccgttgcccgctcgccccgacgctggccgcgcatctaaggatgcacccaccgccgtctgtcatcgtccagccggatccggccgtcacggagtcggacctcgtccacctctgctccaccgggcaccaccgtcgccgccgccaccagcaggccccgccgccggtcacctccccgccagatccaggcgtggatctggcggcacttccaccgccaccatctctaccaaccgccgctgctccctctcccatgcgccactccctctgccccgccggcgacgcctcctccgcccaacgccgcgagccgccatggcctccgcccgctgcaggaaacggcgccgccgacctccgccctcgggtccgcccgcgtcggaaaccggaggagcgagagctgcgagccccgctgccgccgtcctggcgagacgctggctttgccggcacctcgctcgagcggcggcgaggcaagaggcgagggtggtgggttgcggcggcggcttgggctgtcgccgcccgtgccgccctcacggggaggcgacgcggggaaaaaaagttagttataggattttcaaatgatagaatagtatctgaaactcacatgtttgttttactaattgtatgatataacctgactacaaatttccaagaagtcccagtttctcaaccataaatagttttatcaggttatgctagtgaaccctgatatctaacaatgcaatgttgtaccgcgtggtatgcacacatagttcaccttatgttattgaaattgattgttcttggctagaggtaaacttcaacctggatagataaatcttatgcatttgtgtctcagtaatggattcttgatagattacattagccttgaaaccctgctcggtaagtcttttcaaatgatagaatagtatttgatactttatttcaaagacatttgtaggattaaaatcctccaaaatttatatgttttttctccaaatcaaaggggttaactctacccggcatgcagtgaccctgtgtgtgattcctgaattcttctacagtgacatctgaaatttattaccagtgttgtcccagataacaagaagcaggtactattccaggtctcaccggagagacgacacgatgaagaacaactccagtgttgtgccttcttgcccgagatacgtcggtgcacacgactgctagctccatccatctccatcgagatgtgttgaatttgctagtaggaaaaagtccacttgaggttactcatagtgtggttgggtttcaaaacttgtctttaaaccgaaataccatataaaacatctctggtcttgggtcatattaggttgtaagcattattgctcctggttttttttatattgggtacgacccaatatgattcgattttgcaagattagggatgcattatatatgggtattccgggttaacgaacgaattttgaaactcgacgaaacgatgaggacctcaaaagtaaaccttttccttcctgaaaccagtggtagacattcaaatatgggccggacaattgtctcgcgtagaaaaaccggagccgttcgcggggcaccgagatgggccgcctatcacggagaggagacggtccatctcgggcgagtcgagcttatctcactgacaggtgggtcccacgggacagccgaacctccagcctctgccgtccgatcacttccccgcatcggcctcgtccccccctcctccccacacatcctccgcaacgcagcggattcgccacagatctctcgccccacgtcgccgccctcctctttccaaattcaaaaattcccgatcccctcctttcctccgccatctctctcaaactcaaagcatcggcctcccccttggccgcctcctcgaatgcccaaaccctagcccgatccagccgccgaccgacccacctcgagggagcgccatggaggagctgttcatgcaggtgttcgaacggcgggactgggtggcggcgcagttgcggcagcaggtggagtcctacgaccagtccctggcttgcgcgctcttggcgccggccgcccccccccgccgtggctcctcccgtcgcgccccgttgcgccgcagggtgagttgcttgctgctgctgctgcccccttttcctctcgctcggttccattttccgtggggtttgggtttgcgattgaagctaggcttgggcaagttgatgggattttttggtagatttaaggtggcgcaggcttaattt

SEQ ID NO: 25191 - DNA, 21323 bp, Oryza sativa
catgagaaaattaatctgctccagtcagaaggaagaagtgctgcttgtggccagaagaggtcagatgcagatggagttcaagtaaacggtggcccatcatctaagagaagaagaataaagcgtcaatcaaatgctgctctctccagctctcctaacacaaattcattgtctgtggtccaccaagttgatattgacaatcatgtgttaccccttggaaatttctcagggaagtctcagccttcaggccgttacttcttaagggatttagggtcctctgggagcatgtctctcaagtcagaggagaggaatgctgtgagtcacggcaacatatcagtatctagtatccataataaaaccagcagttctcctgaaagatataataaggctagtttagataatgaaaatgggaattctccaggacagttacaaaatacattagatgttgtgaaaacaaccgctgctttgcctagctgctatggtaccttaattgataatgagaaatcatgcgcagaagaggtacgtgttcatcaagtgctctgtttcctttctgttctgaaatcttacaaattttagttcacctgaagagctcaatcatactcttctattgagataatatgcagctaagtactgaactagtgatgctcagactggccgtaggatctgttatacttttactttctaataaatcttgaatatacagccatgtagcctgtccattttgttgttttggagtaagtgatatgggtacaattagatcataactaaattttgcatacagcagggcaatggtaatgtagttttgcatgtaatattgcactcattttcataaaaaataatttattagcatttttagccagtatgttaggcgatgctcacttttttggttgtgaatcagaatttaatgcactgaaaaatcgtctttgttggcaggaaaatccttgcttagaaggtaaacacgcaaatgatacttgttcgagtgtggtacaccagcaaatgactcttcagattgataacattgcatctcagagtgtaatattaaattcagaaaattattctagagagaactcaattactatatctgcaagttatgtttcggatcaaaatggtgatcaagcacatgcaccaagtgcattggttcgtgagaatttaagttatggctccagtgtagaacttgacaggagatgtaaaagtaatggttcaaagggaagtttgttgtctggtgctgctattactatgcaagatggggatgaatctgttgactgtgatgccacaatgccggaattcgagcgatttgatgttcctatccaatttgacagcccatgtgctgagacaaagacatctgaagccctttgtgagtccagaaaattagtcaccctcagttcaaagttctcaaattatgacactaacacagaaagtggtgtgagccacctattgtcagccatgtctgggaagcctataaacttccctgatgatttgcaacaatacagagcaaataatgatagaagcataactgacatttttggagcatgtggattgggacttgatgattccttttctatttatgatgtcacagcttcatgttcttcaaatggtagcagtgcaaaagagaacaatgacaatccattgaccccatcagttgaaaaatatggcctggggaaactgtcagctagatctggatctagttcagaacatatgggctctattcctgaactagaatgcttccgaattgatgaacatagcagcatcgcagaagaaaatgaataccaagggatgttacatggatctgctggtttgagttactcgcatcagttgccatctggcagaaaagcacttcaggatatcactggattatgtcaaaacactgtaaattctgcctctctttcctcaatattcttggatacaggtaatgagctcaatcatcagacagatctcataaatggtcatgccaacgataagccaaaaaacagtcttgctgcttcaaccaagagagagagaaaaatatctgattcccttcatcctagattaaggaggacagaactacataacagaaatggaagacaccagagtgaagccaatattgacaaacaatctaagcctagcaatattgttgccaatgtgacatcatttatacctcttgtaaaaccaaagttgcaacctacaacagcatgtggtaagtgctagtacttttaatatcattgtttatttaaaaaaatgttagtccatttggctagtgatgctttgagcttaaaaagaatttgaatggtgctcatatatagctttcataaattggacttctgtcttgtagtgaaaaaagatgtcagagtgaaggcacttgaggcagctgaagctgcaaaacgccttgaagaaaagaaacaaaatgaacgtgaaatgcgcaaagcagctgcaaaactagagcgtgaaagactgaagcaagagaaagaattaaagcaaaaacaggaggaacaaaagaagaagagagatgccgatgtggctgctaaaaaacggcaaagaggagaggaggaaaggaaggaaaagcagagaaaaagaaaatgcactgaggaggctcggaaacaacagaagcagcctacagaaaaaagtcttgctgtgaatgatgagaaagatgtttgtcgaaaaacatctgtgagtagaagcaaaatattttatttctatcagtgtttcctagaacatgtttttgttactgaatacattaattattgcaggataatatagagctgacaaaacctgatgggagaactaccgaacctgctatgaccaatattccaaacagtcttgaagaggtacgctttgtttatttaacttcgttgtgaaagaggggcatagatagaaatctgtatttattggtactggtcaattattgtgtatattactgtgtaactgatgtcgtaattcataagccttagaatgtgggcaaaatgtttagatacacacaccaatagttttatttgcagatggagcaaaacaactaaatgttgccaagttgacccgtttgctcttcatagcttttgttctagagtcaacaatagttctaacagtgtattacttcctgtgttgtttctgaaaacttctttcagtcataccaaatgtctccctataaggattctgatgaagaggatgatgatgattttgaacatgagcaagaatccagacgtaggaggaaatttattccttcgtgggctcggtatgtatccatctaatcaaatcccctgttcaaaattgcagcctttatttgagaaaaagttgtgtgtttgatgtgatgcactgatgcctaatgtgaaagctcatcacttgtgggaaacaaatgtagcttccgtattatgtcaaagattacatgatagtcttttgagcacgatgtgaagtgactatggaagcttctttacataaatgttaaacatattttctattttaacactgattagcatattgttgctatggaagcttctttacataaatgttgaacatattttctattttaacaacttgcatacttctttttgctgcttgttgcttctgtgttcataatgaagtactggtcctctagcttttctatttacaaagttgtctgatttgcaggaaagaaaacttggataaactcttgttgtccaatcagagtttagaccctagagaactttttgcacaaaagtgctccttcaacttatctgatggtaacctccagctcatctctgtcataaatttatttcggttattactgctgctgaatttgtcttctcttgcctgttctctccagttctttcagttcacataccacaacgtggcttcagataagtttccatttgacggactatcggcaatacgtcattgccaaattacatcatcaacagttgtgcatatgcttggacggcattttcttgtatgctagaaattaatcaacgtagcagaaaatttgtttcttgtggaatattagaatttagcaggacatgtgttgccacatttgtatacatatttgggcataaccaatttgtaccagccgagttatgtttatgaaaacctttctgggcagtacagtaattaccgagattatggatataaaccagacggcaaagtgaccacgacaatacatttggaaacgaaaactacgtgattttggcacacaatctcttcaaagtgacgaaatcaactcgtgttggaagtgaaatgattgaatgagagtatgggactgtgtaaccaacagttttctgttctttcgagagatacaaccagaaaatcaaaaggtaaacgaaaagttttcaggaagaacttctgtatgtctcccagttttcaggaagaacttctgtatgtctcccagttttcaggaagaagaatagccgttaactatggtcgtcgtagcttgccgcttgctccggcgctatacctgttcgccaccgcctcatccggccgggaccgtgtccgaccctcgccggcgatcgccgtgcttgtcccggtgtccggcggtgtacactcgagttcgtagcgcacaaaaagtatcacaacaaatatgaaacattaattatatgagatttgttccggtccaacaaaatatacctcgagataccgatacttcgaggtactttttgctgaactgtagcaaatctccgtactgagatgcacgatacttcgtcgatggccatggcggagagacgacggccggggtggcgagatggacggcaatgacagatagatcagagagcacacggccctggcagaagcgaccgccgtcgtcgctgctgccgggttgtgctctctctcttctgtcatcactctcaagtctcaactgcccccctcccccatgacatcctcctccatggctcaatcgtttgaatcctccctaaacaaaaacacgaaaagaaaaaagaaacaaaagaaagaaagagcatgatcagtcagactgaacagactagactcacgatgcattcctacaattctacccatgcatcatgcattgttcacaagtgaaaaaaaaggagatgcagctcaattaactttttcccactggatcacagctcctgctcgtcggatggcacggcgagacgaatagacgatagttgttgccagccaccagtgtgcgatcgagtttgtcatgtgtgtgccgcaacagtgtaagctctcgctctcgtgatggggggtgttgctactttaactccaggtttccccggaacgcggcgtgaacgtggccgcggccaggggcgcgccgcgcgcggcagtggctatatctatatgcgtgggcgcgacggcgacgccatggcgatcgagcgcgcgcgcgcggggcatggcgctggcacgcgacggggaccaggcatgccccgcgcgcgcgcgcggcgattaatttcggcgtgggcgcgcgcgtggttggcccttggccggcctggcccctgcgctgcgcaggcacagcgcaaactgtagcggctcgtgcgcggcgcaggcaggctgctcgcggcctcgcgtcgagagcggctttgggtcacggccatggcgctgcgcgaggcgctgagatgggcgatccggcagacagcgttgcgtgtcccagctgtgcgcgtgggtctccgcagagcccgtcgtggtaactggtaagtggcgttagggatgaaaacggagctgtttgttttttgtctgctccggtgaaaaatgaatacggataccgtatgtttgtgtgtcggtcatatttaatccttttttatattttgacataattcgtactcctctctgtttcaggttataagagtcaaaatcaaactgctttaagttttagaaaaaaacagtaatattttcaacccaagaaaaatttattatgaaatagattcaattattgatttgatgaaactagtttagtattataaatattattatatttgtctataaatttagtcaaacttaaaacaatttgactttaatcaaaatcaaaacgtcttataacctaaaatggagggagtatttattttttatctgagctattcgtgttcgtttctatgtctagcaaaatttacgaaaataaatatggtatgaatatcaactgttagtatccgctccattttcatccctaagcggcatagcgctagtgtagcgtgccacttgcagcggcatatgtgagtgtgtcatgtaattctcacttgtgggtgataggaccatctgtgcgagaaaaactgtgaattgcgatcgaagcaaattttaatggaattgtaacaacaaaaaatgtaacgtagatgaagttgacctctgtagtaagagtccagcaattcgtatcgatgtaaaaatttgttgttgtggtattagtcactgacgtgaccgtccgatgagctgacgtcattcggacggcggccgccaccggccacggtggcggtcacctcccggagcatcagccggaggcatctcctgtacccgccgacggccatctcgacgagctcgacggacctcgccttctccacctccgactcccgcagcgtctgctccatccgcgccacctcgccggctctcctccaggcctcgccgtcgcgcacgccggtgaagcccacgccgccgtcgcgtggcctgaccatgtctccggcggcggcgtcggcggcggcggatttcttgatcaccatcacgtcggtcaccgcgccgctgatccggaacgaggcatcgaggagcaacccgcttggtatgtcccagacgctgacctcgccgtcctccgtgcacgtgacgaggttcttgctcccgttcgccatgccgacgccgacgagggcggcgttggtgttgccgcttgcgtgccatgacgagctcgtgatggcggcggggcttagggacgcgacgtggacgcggccgtcggagccgccggcgaagaggcgggcggcgaggtggtccagggtcagcgagaacgcggtgcatgggagcgtgagggtgcgcaggtggctaccgtccttgagcgtccagaccttgcacgtgccgtccatggaggccgtggccacgacggcgtcgcacccgccgcgcccgcacgcgacgcaggtcaccggcgcggcgtgcgccggcacgcggtagagcgagaggtcggcggagacgctggcgtcgtcggcgtcggcgtcgacgtcgaggacggagaggagcacgaacacggctacctcgccgtcgtagccgccggagacgaggagcgagccgtcgtcgctgagctcgaggcacgacacgggggcgctgccgccgtgggcgcggaaggagcgcgcgacgtcgcccgacgggagcgcgatggcgtggacgcgccctgacaggccgccggcgaggaggtgggagtgggagccgccgcgcggcgccgcgacgagcggcgcgaccggctcggggaccggcagcgaccgcgcgggcgcccgcgaccaccagtggaggaggagcacggagccggcgcccgtgacggggcagacgtgggacgcggcgacgaagggcgccgcggcgcccggggcagcgacgacggcgaggccgtgccgcgacgtgttcaccggcgccgggaactcggccacgacgtggcccgacaccgcgtcgtaggccgtgaccggccggccatggcaggccgcgaggatgagctcgccgtcgccggccagctgctgggaggaggaggaggaggaagaggacgccgccattagcacgcggcgaccccgccgtgctgcgtgtcgcgggttcgccggtgcaaactgaagaagggaaaaaaaaaggagtgtgaagtgacctgtttggctctgattatttgcgcttttataagtataaaaatagttttaacttgtagcctaaactagtagccgtttcattcagagcttttccaaaacggtaagctagcttaaaagcaagcgatataaaagtacaaaatcaaaaaaattgggcttaaaagcctaagcggataaagttatgccaaaaataagaactgtaatattagagcaagtttaatagtatagctaactactaactccaatttatctatagccaatttaatagcttattcatataatagttacatactacactatcaataactggtcccacctatcatacacacactgcatcttggagtccatactatagctggctacaaatctgtagcccactgctcttctctccccttatttatctttttaaaatatatttgcagctgacttatagcctgtatctgctcttaaaagtaggtctcagtaactgtaacatacctctatgttttttactccttgaatgataacaaggatcatgagaaaaagaaacttgcaatttgataatgttatacacttatagagtatgtgcttaacggtgtcttgttatactttgccgtttacaccgatgattatttgcgttcttaacattttagggcttgttcaattaatcccatataaaaatgattaagaggattgaacgtgattaattccacgcattgctctgattcctacaatttgcggcccatcccgtgaaaagctggatcagcttttcaaaatccggcccataaatttgatgggccctaaataaattcgtgtcctccacgaggagagtatatgggcctccacgaagataagcccggcccaattttatcgctacgatacttctctatcaccactcctcgtcttcctcctcgcctcatctccgctccgctccccactcgcgctcgagacgccatccccagccaaaaccccgagcgaacgatggagggaggagccctcgcactcccgcacttccgctcgcgcgtcggcatcggctcgcccatcctgctctccgccgaccccggcgccgcccgcaggagctccggcgcctccggtagtaccccgcatttccacgggattgctcattgtttggttaatcggggctgtcatttgtagcttgcctctcatgggggatttggttggttgttgtttttttttatgtggaagggaggagtagggtttcgagggttaatccaggagcgtatccgagaagtgcaggtaaattgaggggagttggaggttgctgcaggctgcagcttcgtcgtgctgtttgattggttaattatggctttgccgctgatttacctgatggataaactgtaaatttggtctattccatttgttctgcgaagggagaggtaggacttggaagcgtgacagcccggaggctccacctcgccgatcaggtaaaaatgctgcttggtactgagaatcactcgtgtagcaaagcatgtttggttgactgattaggcactaggacagtgttttcctatatgaaattgaaccgtgtcactggctgcatgacattcaactgccttatgtcacatgtggcaaactggcaattaatggaatgaagatatactcacctaaattcaaaactagttgcacagcggtaaacttcacatgtttgattatgtgtacagaagggctgatggcctgatgcattttgtaaagtcggcaattcttgcacctggaagtcacttttacaaacttttggaatagtatttgcatgtgttatacaaaagtcacacatatgcttattggagtaactaaggtggacttgctgcctctagactcattttctggtaaaagaacaaaaatagtaaaggaaacccatgcttggggaaagttaggtgaactagcaatcccttctgtcatgtattctcgactgacgccacctcagatacttcagttgtagatttgagtactgagcaaaaggttacacttacacagtgagatagttgccactttcatgaccttaaactttagaacattgtcatgtgtgtctggaagtgatgaattgtatctttctaatctcaatccaggaaccaggattgctacatcttacatactgaacgtactgtgctaaacttgtgtattgtttgtttgcttgtctacctgcaagcacttgtattcgtcgcatcctgaaagcattgttgtttgttgttggtgtctgctgacttatcgtgcaagtgatgtgagtctttactaatccaaacattctatctttttcaggaattactagagttccaaatcgtagtcctgagatgcctactgaaagagcaggtatctcatcactacttgaataacgagagctattcacttctttaacccaattcgttttttctcttagggaggactaaggtttcaaatgtaaatttggaggtatctcatcacagagcaggtaaaacattaatgatatggtactatgttagcaagaaaatttaatggttctttgttgtatctattattcattagtttactatctaattctttggccatgctttaatttttcatggttttatttgtctttatcatttgcattgtttgtgtcgttggagcagttgcagcagtgaggttgctaaggattgagaaggggaaggcatttgtggaccttttgaatgagaaaggaaacagttccggagagaatgagatgagctatgtcgaaaggacactagggttcagcatacggtgtttggataacagggatataagattggtaaaattacatattccgcatgttactttgttattctattcaccaacttcgatttgttcaagaaggtttgcaccatgatggttatagctatcaaacggcaattgttgagttctgagtaaaagataaagtaggaggcggcctgcagaatgaccatatgtgatattgtcctttctttatttgataacatgtacctaactaattgtcagtgttgttttcttcacttatgtctactcgtacgtcatatgatataatgtgtgaatgatgctgaaataatgtgttcatgggttgacaacattccttagaagacttgtgtatgactctgttatacttggattgtaggttactgtcatagtcgctggaactgtgcgttggaaacggtaccttgattatctgatcatgtcactctgtagtgaggagaaggtgttcagggagatggaaccactacttctgcaggtttcttctatatctcttacagtatactatattctttattgacaacctatattgagaaaattaggtaagtaccatcacaaagctgtggaaattggaaaatactattgcatgttagatgacatgtggaaaataccaaacaatttggcctgcaactacagtagttaactccacactgtagaatctctgaagtttagcatttttggtttcagatattacgaattggtttctttgaaattctcaagctcaatgtgccagcttatgctgctgttgatgaggtatgttgattttttatatgtccttgggagctcccaagggccttaaaaagctcatgtctatgccaaccatatcaaattttgtatcaaaaagcaaaataatgtggaaacgtatatctctttctctgtatgctttgttccataacggagtttgtatgaatgctgttgttttatggtaatgataatacatttaaccatgatttctccacagtttttgtacttttccttttcatttcctgtagtactattatgagttttatggatggtggcgataaaagggcttttgaggatgattatgttcctggacatgctacatttttgttaaattatgatatttgccagtatactatatctaacctaataaagtgaattttattgatactgctgttataatattctgaagctgattcacctgtttcactgatcttttgcattttgtcctttctttgagataggcatgtcatactgttaccatttgtatttctaacgtacctgacaaatgtaaagaatctagtaatgcttctttcaaatcacaattttagaatgtaaggcttgctaaagtagctctaaggcctggtgctgggaacctggtgaatgcaattctgcgtaaacttctactgctaaaggtatgaattagaactaatctagccagcctgatcagtaggattgcactgtagtatcgttattttgttttttcaattcaggaggcaaactctcttcctcttccaaagatagaaggtgatgatcgtgcccaagctcgcgcactttccattatttattctcatcctgtcgtaagtttcgtttaccctctaaactttagtttgcttctgtttcttagttttctgtgtgctagattattcattaatcaacataccaattccacttgaccaattatcaatcaatgcccttgataactaggattgtggactcacgtggaattcaatctactagttctatctggcaaatatttgttaagaacacaacagaatatctgtagaaatttcattttttaatctataatttgttttcttctctgcagtggatggtgagaagatggattcgttttctgggcaaagaagaagctctaaaattaatgaaatggaataacagtgatcctcatttcagtataaggttttaagccaaatgatgtactgtaatatacagtcacctgctctgtttatgcatgtccatatggttgattcgtcttttttatgccttatatcatagggtcaacacagcaaatgggtatacaagggctgatcttatagatcgattggaaagtttgcaggtgcttccattaagctttagtaccttctgcttgatcaatataaggcttaataaagttcataaggaagcaagaatgaatataacatgtaccttgtgctatattatgcaatggcatttaattatgtcattcggctcgctgcggggtatataaattcattatatagagctattcaggactctaataccttatccatattgatgtcacattctgccttgattatttgctagataatttgatttccttttatgtaggttcattatgagaagtcaactatggatgaatttgtccgtattcaggagggtatgcaggtaaataaactgatagttggttttcaatcaacgactagtcactagtgctgtgttaaacttaaatcaatatgatgtattgacatccttgtatttttttctacaacgcaatatgttcagtatacttacaaaatagcactgtttcaaaacctaaatttgttcgtgcacataagatatcgacattgattgcagttctaagaaagtgaggctgagaggcagatgatctaaaaagaacttataagaaataatcctgaaataatgtttgtgcagtagcaagaaaggggagataattttatacttgtgatgccttagatgtttaatgattattatttcttttactgttcagagtataagtattgatcaccacatgtattggatcagtcaagttgtgtatctcagtagctgtacaagttcgtttattttgaaagaaacaacttttttgaagcctttgtggtttgcaactttggagatggagcaccaccattgtgccctttatacataacaaaatatctgcattcttttatatttgcatacttttatatgaacattacttttactgttcttattttcttgataatacctcttgggatattatttcagaattatcttaatttgttccatgtacagactgtcctgcaagctggactactgaaagaaggcatgtgtgctgtgcaggatgagagtgcaggcaagttatgatagttatttcttgaccgctaagcatatgccttaattagtacaataagattactatattgaagtgatgttgactgcaaataactgtacatggcttatgactatggaaatcgtttcagttttactgtccgtcacttccattaacctgagtttttcctttatccttgaggtttccatgtctaagtgatagtggtacttctcatttgagtaagcacttgatacttatgctaagacatgaagaatctattgtaggtcttgtggtgtctgtggtcgatccacaacctggggaaacaatcattgattgttgtgctgcacctggtggcaaaactttgttcatggcagcccgtttatcgggacaaggtaagaagatggaattgagagagggttcaatcatctgttgatatcacactcataacaaggtagttgtaggaaacttatttttttatgaacatggcacatataaatagacaatgtatttagcatgttatgtccataaaaaatgacgcacaccttcttaatgaaatgaagcacagttctcatgcgtttccgagaaaaagaatgacacactgaaatgaattacttttcacatcttactgcttttattaacttattataatattgagcacctgcagacattggttgttgagatctagttaatttgtcagatataaaattagtgagtgcagtatgtccatggagttaaaatgaagaatgtggtggctttcttaatgtttaattgctataagtaactgttcacgagttcatccttttgcatcagcaacgcgaaccagcatttgtaatttttagagcaaattccaggaaaccttgcattttattacaagcaaatataactcacatgtccaaaatagttttatgagaactcattttgacgttccatccagaggtagttccaagtcatcatggatgatagtagcttagagatttgatattgtggacttaccatgtagtctgattcagggaagatatgggcacttgacataaacaaaggtcggttgagaattctcatggaggcagcaaagttacacaatcttgatgctatgatcagtgacatccatgctgatcttcgactatatgctgtaagtttaagaggaaatcccttgtttctaaaccagaaaatggggaacaagaatatagaaagtccccataaatctaaggatactgcactccaatggaagtatttattaggaatatgactagtggctgttatgagcttattactaatcgttatccaaatgtatgatgtggaggcttatacatatgaaaaaattgcagaaggaaaccactgcaacatttgacaaggtactgttggatgctccatgctctgggttaggagttctttccaaggtatctttgttaagcaagttcattattttgctttcactgaactaatctaaatcttgaataacaaatgattgatgaactgataatccttaatcctttttccgttcccaagagggcagacttgcggtggaatagacaattcgaagatttggaggagctaatgtgtttgcaagatgagcttcttgattctgcatcaatgtgggattccttctcctgcaaatctgtgaaagaaaatttatatggctaacatctgatattactttctggttttgcctgtaggttagtaaagcctggtggtatattagtctacagtacatgttccattgaccctgaagaaaacgagcacagaattgctgcttttgttcagaggcatccggtactagttcgtcttaacatcaaacgtggatcatttactggaagttaataaactcaatattaagtttgatttgagaaaataagtcccttatggtttacagtgttgttggtaatattgagcatgctagtaaaacacgtgctaaaagcacatgatctctggtgcaacttagactgacttatctcaactaacgaggtaataatcacaaattcagttgctgttggcacatgttaatccagcttttggaagatcccatcattcacactacattttaatattgttaaccctgatagttcagatgtgagtttaacagtaatatagctttcaagcatattaagtctccacgaaatgtaaacatttaagcatgttttaccacttttttagtgaaccatctctataaccttgacatcatttatatactaaaatggagttgccacataatgttgtattttttcgcactaataatttcgcttttgacaatattttatgctatgcatggatatgttgtaaatcaattttatgctgtaggactttgtcctacagagcgtgcatggatatgttcctgctgaatttgtcacagatgagggtttctattcctcaagtccaactaagcactctattgatggggcatttgctgctcgtcttgttcggtccgtcctctaggagttcaacaaataggtgagatttattataacaaagaaccactctatttttctaacactgtgcatcgagttgctcctctaagaagcaaatctgcagtatctgcacatgcatgtaatctctcctttcacgttactcattaaacagcatggttctttggcttcataaaagagagagaagaaaattggtctttatattcctcgtttcataattttatattgcttctcattctgtatgcagataagctgtcacaatgaagaatgctgaggtcatcctgattcctggcaggcaaactgcattttgatgatgatgtaccacaagatatatatgttgagagctagaggtacccaaaaccatacctgctgacttggccttcacctgagcacatgttttatttcttaggaccacacggagtcacaatttgtattcagttctccaataatttaaatggtcgtacttggtgcctcggtgattaaaacttaaaagataatctctaaagttactgccttaatggtgaaatctgattggatgtttacatccaaatgtaaattggcatttattgattcagtttagtcagcaaatatattttttgaggacacaaaagagttacattataagcatttgttgaaatgcttgtaatactaaacatgtacttttacaggagaaaggtacttaaggaatttctataatgcaagtacacttcctgtgtatcatactattatgtgctttttttagtgaatttctctgctagtatctgtaggtagatgatcactaaacatgcatgaaatatatcaggagaaaatttattctaagaaatatctagtattttatcaggaaggccaacattacaaagccaagggaagctagtgtgactgatgatggtattctccctttgtccttccttaggaacattgcctcataaattgggatactagtgatcactatcattccacagaggatgacctgggttagaaatacattccatggcatatttcatacacctgtcattatttgacttagcacttccactaggcagacgaggttgagtagtgcaacaattacaatgatcacatattcaggatatgatgacccaagttcaatgatttcttgtttatacctctttgcttcatctctattacttacctttgctgtaaccgcaaatgtcatcttcgacagtcctagcaacttacggatggtatcaatgaggtcgtaaagatatgaggtaattcttctaaccatccacatcctttgtccattccaacatcctttcaatgtatcccctgataataatgcctcatatagactgtatatattcttcacagttcacacataatacatatacgaagggtgtagcccatggactcataatctaaatggcatataaacataggattagttttaataagagcaatatgaaaccaaagtgaggtttatcatgtaatattacctctgggaatagaggggtgcccttcacaagcctagtgatggaaacataacataataaagcgtaggcagtgagttggatgcccataacccaaataagcaatagcccatctgtagttgtaacttaatttttccatgtccaatcaagaaggggcagttctttgaaaaaaaaagtgttaaattatcctcaccccatctcttgcgctgcagtattgtctgggcaagtgttgctggacccacacccaaaagtgctgctctttgaggattgatgtaaactgactcccatcctctgcaatttatcgccaattcagtgaagattatcttctaccgtgcaaccatattttatttcaatctcatttccccactgtgtcctatgttcacaagtgcaggttgctaaagattttgccttctcttcaatctcatatatgtctgcctgtgttttttcctttattcctctcccagtcttccttgtagtctttgctgaacctcctacacaaaggatctctcttatatggaaacgtccagtaccaatgttatggattggctagggtaagggtcctaagaccgggggataggcgctcgccctctaatagcagaggcagggcttctctctgctgagctaaaagaggctctgaggcttagggctaactttagagattgattgattgattatagagtccatggggtccctttatatatatagggaggacagactagatacataaggaactagtctctagtattatataaaccaatccaatctctgtctctagctttctaataaacctcatctctttcctaactaggtaatctcctatatttatgtgacttatttctaatttatcatgcctaaactgttgcatggccttggcccatgcccataacaaccaatgtagggtgagccaacagcactgtccataccacacatatccaccttaacattgaattgttttgttagccgaataatgtatattgatagtatagattattaaaaacaagagaatgtattaaaagtacaatttgatacaacttacctcattgagaacaaggagggaatttccatatatattgttcttggtcatgttgtatagttctgagggtactgtacaaatccgattttgtggcccatttcttcatcaaggaagaagcacaacgtacctctgattgagtcactgttattggaatacatgtcgcagtccacattcaagataatagggttgttacatatctatatttcaggattgaaatttaacatattttaaaatactttcaggaataaggcatttcctgaatgttagaatactttgtgaaaatgctgcgataaattgttcattgaacaatgcacaactgaccatatggttctaactccatgcattttttttctgactgaagcaaacagtagcaatacataaccttttggttggttgttgcacttgtagaacctactagatacttcttttttttttttaactgaaacctacttgatacttcatttttcaaaatgaaagtgtggaacaacttgttgcattgttgtatttattacaaaatgggtaaggtaacctctaatggaaagtagggattttataataaatttgttaaccttgtttcaaggtaaaactaaacaaggttagggaacacaccaaagcgttcatagcccaagatttgaagttatggtggtactgaggcctcttctcacgtgccatgtataccaggcttggtagcacatttccgtcatcatctactacattttggcttttcccatctataagtatctatcaaagaagcaacattttttttagaacctgaaattcccaaaatggaagtagtatggatttctttactttgtaatcatgaaatttttaggacagtaaagcctacctgaacaattggcggatgatttttgaggcaatttctgagttccttccatcaaatcctttatgattcagtttaatttcttcaggaatttttcctaacatgacagctgtatcaatcctctgtcatttctttgtacaggtcctgccgataaaagaagatcagttgccataccaaatgttgagaattataagccgtaattatctgtgagtgcatattcatcccatacttgttgattatcgatgtcttaaagaagaatgttaagaaatgcacataccttgataaatgaccattcttttggggtgcacagattgtgatgcccttctgactccacgaagaaagcagctggtggccttggctcaatgttataactttttgcagaatggtagccagtgctttgcaaacacggaggcctcccatagagcatagaaagtaagaattgaacctccatcatcagaaaggtacactcttaatttttttgacgggtaattgtatgccatgactgatacgacggtagatatgacaagacttggtggttctgagtgtgggtctgccgtgcatacaaagatatccagcttttttttcatgcatgctccaaatgacatgttaaatgtgtttaggcttattgtggtaaatagctgtttgaatgttggctcgtgtgtaaaacaatagaacacattttaaagagatcttcccttcaatgatttaagctagctaaactggtctacctttaccttcctttagtttaccatcttcaattttttgagatcaatatactagaaacaaaccggacatgttctgaagtccttttgctaaattcaaagcataaatcatcaattttttgttgtgtactgttagagtataccgataggattctagaggattcaattgttacggtaggataggattggtttccatttcatctctgagattccttgatataccgacctgggaggctaaatacaacgaacccatattacacaatacatctctttctgtacacactttcatgtacaaaagatagttctgttccttttgcagccatttttagtaaagctgagataagaaatgttgatcttttagattattgtatatattttgctaacagaatctatatactcctattatactacctccggttttaaatatatggtacctttgattttttttaatttgtttgacttttttgtcctttctagaaatgtttgtgcaaatagacaaatatacaaggcacacttaagtacttggatagatctagggggtactcttttcactttacttataactaagtaattgaataaatattgctgttcaaagtttgaggagaaagtaatggtgtcgtatattaaaagaacagagggaataccattatatgcacgaaatattttgagccctgaaactctaagctgcaatagtttttttattattttcttggtgcattaatatgcgagttcctacccgttgtagttataacttaggcccttaaaaaaagttatgacttatgatatgagaagttgagagaaaaaatgatgttgtaagaaaaaaaaactgctgtcctggttgtccagtcatgagatttctttgttgcaatgtttttttttaagaattaacataagatttgcgcatgtgtataaacatatggagaatacggtataagatttgcatatctttgtattaagacatgaaggatacatataagatttgtgcatcttgatctttgttgaaaggctcgttacatcagttttttgaaatccaaatttggtcggtcaactgacatttcaaacactgtaagcgagacaccgttaggttgccttcgtaggaaggagatgagaaccaatctcttgtgcacggaaaacggagcgatccattagcgcgtgattaattaagtactccctccgtcaaaaagactcaattcttgggtttccgtgtccaacgtttgaacgtccgtcttatataaaatttttatgattagtatttttattactgttagatgataaaacatgaataatactttatatatgacttatctttttaaattttttcatattttttttaaataagacggacaatcaaacgttagacatggaaacctaggaattaagttttttttgggatggagagagtattagctaatttttttcaaagagtaaagtgtattggtggtcctc

SEQ ID NO: 25192 - DNA, 4759 bp, Oryza sativa
aagaaagggagaaaaagagaataaaaaagaaaatggaaaaactttaaatgggtcccatttgtcagtcaaaatgatgccacattatgtccgtgtggcatgccacatcaacgccacgtaggatcccaaaggggttatggcgatttggtacctagatgacacactatgacaagttctgggacttggatatgtattttgagagtttagggacctagatgacatacccctacaagtttaaggaccgcccgtatactttactctttttcaaaaataaattaatatgatttttaaactgcttttgtatagaaactttttgtaaaaaatacactgtttagcagtttgaaaagcgtgtgcatgtaatacgagggagaggagttgggaatatgtggtgccgaacatacccttagtgtggagttgtagacgagcagtaatatacatgtctttttttattttacaaaatttaatatactatctccatttatttttatattttaagtcattttacaattgtactaagtcaaacatgttcaagtttgaccaaatttataaaaaaacagagcaacaatttcaacacaaaataaagatactacaaaatcccaatgcaactctgtttcataaaaaaaaaagccaatttctatggatgaaaacatgcacggttcagattcatctccctacagtgtctttctttagacggaaggagtatatatatagggcctgtttagatcccctcgcaagttttttcacctgttacatcgaatgtttggacgcatgcatgaagtattagatatcgataaaaaaactaattacacagattacgtgtaaattgcaagacgaatcttttaagcctaattgctttatgatttgacaatgttgtgctacatgaaacatttgctaatgatggattaattaggcttaataaattcatctcgcagtttagaggtggaatttggaatttgttttgttattagactacgtttaatacttccaatatgtgtctgtatatctgatgtgacacggcaacatttttcaccattgaatctaaacacaggcatagtcttgtaatatgaaagagagagaccaagttcttgaccgttcgatttatgtgttaggattgatggtcattcatgtcaaaatttatgcgtgtacgaggatccaatttgaagagagagacagttgtaacgcacaaaagtgaccaacctctcggcgagcctgtccttgaacgtgcggcggcggacggggcacaccaccggacggcctacctgcgtgacgacccagtaaacggtgtaccgtgtacatgacctccgccgcctccatccctacccacgccgccctcccctcgccgccggccggcatgtgcgtcgccctgtagtacagcaccagcagtttcccggcggccaccgtcgccgcctggaatggaatctgtacaccgccctgccgcccatattctccttcgccaacagccgccgtcgtcgtctacatcgccggccgatcagctgtcctctctctctctctctctctctctctctagcaaattaagctgcttatatgcgttttctctacagtgagcacttggctaacatatatatagctctcgatcactagctcatacgaatcatttgactatgcatatctgatgcaggaactatagtaaacgtgtaatgtcatgctacctcttatctgcatgtaggaacataatacccgaagttatatgtcacaggtcataatacctgatcacatgttcccaaaaaagaagttcctctgaattatatttttgaggaagagggagatgcctctcccttcctgtgaattatatgttctttttttcctgaacttctgttctaggcatctatatgctgatgatcattaacatgtgtgaaatattcaagagaatttcatgaaatggcaatgcaatttattttcatgatcatcatcagaaacacccaatgttttataaggcatcaaatcccattttagggacctcaaactattggtactaggaatgccaacattacaaagccaattgaagctagtgtgactgctgttggtattctcccattgtcctttcttaggaacattgcctcataaattggcatattaatgattactatcattccacagaggatggcctggggtaaaaacacattccatggcatattccagacacctgccattatttgacttaaccctccaactaggcagacgaagttcagtaatgcgacggttgcgatgatcacatattcaggagacgatgacccaaattctaggatttcttgctcatacctctttgcttcatcgtgaccgcttacctttgctgtaacttcaaatgacatctttgacattcctacacattttcggatggtgtcaatgaagccatatagatatgaggtaatgcttttcaccatccacatcctttgtccattccaccatcctttcaatgtatccccagataataatgcctcataaagaccgtagagggtcttcacacaaaatacatatatgaagggtgtagcccatggactcataatctaaatgacatataagtgtagtgttagtttcaataataaacaataagttctaatgatagaaatgaatcaaagtactcccttcgtactcgtaaaggaagttgttttggacagcgacatggtctcccaaacataactttgacttctgatatatgtatatttttatgaaagcatttttcaagacaaatctattcatataatttttacattttcaaactcaacaacttaagagttattcatgatttatattcccaaagtttgacttaaacattgtcctaaacgacttcctttacgagtacggagggagtatggtttagcaattagcattagtttaatagtacctgtgggaataggggggtgcccttaacaagacctagtgatggaatcacaacataatagagtgtaggcagtgagttggctgcccataatccacatatgcagtagcccatctgtagttgtaacttgatttttccatgtccaaacaagaaggagcagtacttcgaaagaaaaattgtgagattaccctcactccatctcttatgttgcagtatattctgggcaagtgttgatggggctaaacccaaaaatgctgctcttttaggatttatgaaggctgactcccatcctctgcaatgtattgccaatccagtaatgatatcctctgccgggaaaccgtatttcactccaatgtcattaccccactgtgtcctatgctcataagtgcaagttactaaagatgttgccttctcctcaatctcatttatgttctcttttcctctttcctttattcctctgttccagttttccttgtagtctttgctgaatatcctaccacaaaggatctctcttctgtggaagcatcctgtgccaatgtagagacaaccaccaacactgtctaaaccacacatctccacctttacattaaattgttttgttagcgcagaaagatattaatttaatgatagaacaaattgttgcaaacatgaaaatgtattgaagttacagtttcatagaacatacatgatagctaacattgaaagagtttccatatatatcattttgggtcatattgttgaagatctgagggtactgcacaaatccaattttctggcccatttcttcatcgaggaagaagcataacgcatctctgattgaatcactattgttggaatacatatcacagtccacgttcaagataacagggctgtcacttatcactgatgatacccttatctgcattttaggataaaatttaacatatttaaaaatattttcaggaacaaggcatgtcttgaacatcaaaatattacttgagaaaaatttatgatcaattgttgactgaatgatgcacactccatcgtatgttgtagtttaatatgcagaattgataattgagaaaattatgtgatcaattgttgattgaattcatccattgttcaactatatgcattttttcttactaaagaaaatataatttaatgaccttttggttagtggttacctgtagaacctactagatacttcattttttaaaattcaaaatgaaaatgtggaacaacttgtcgcactatttttgcatttataagaaaattggtaatgataacgtctaatgagattagggagttcacaataaattagttaaccttgttttaatattcaaatgttaaaccaagttagtgaactcaccaaagcgttcaatgccccagctttgaagttatggtggtactgaggcctcttctcgcgcgccacgtataccattgttggtagcacatttctatcatcatcaattgcatttcggtttttcccatctatcagaatctaccaaagaagcaatatttagaacctcaaattatcaaaactgaagtgttatgaacttctttactttaatttgtatagtgaaaaactttgtgctgttttctgggacagtgaagcctacctgaacaattggctggtgatttttcaaagtaaaatctgagttccattcatcaaatcctttatgctttagcttcatttcttcaggaatttttcctgacatggtagctgtatcaattctctctttcattttttcatacaggttttgccaaaaaaaaaatcggttgccatgccaaatattgagcactatgaagttatgaataggacatatatagtttctagttatatgtgagaagcttgactttaatgtggggccctacctgttgattataaaaatctcgaagaattatgcttataaaaatgcacat

SEQ ID NO: 25193 - DNA, 15206 bp, Oryza sativa
actaggacatatatagttctagtcatatgtgagagctgatttaattgtggcctacctgttgattataaaaatctcgaagaattatgcttataaaaatgcacataccttgatcagtgcccattcttttgggatgcacagattgtgatgcacttttgactctgagaagtaagcagctggtgaccttggctcaatgttatatcttttgcagaatggtagccatttctttgcaaatatggaggcctcccataaagcatagaaagtaagaattgaacctccatcatcggaaaggtacacacttattttttctgatgggtaattgtatgccataactgataggatggtagagatgacaaggcttggtggctctgattgtggatccgcagtgcatacaaagatatccacaccaggtagattttgttcatatctgcttcaaaggatatggtaaatgtgttaaattgtgggaaatatatgttttctcaatgatggatataaaaccaacctctacgtcaaaaatgttttggccataatatttttacaataaagaaacatttttaagttgtgaaaagaaaaaaacaaactagtgaacatagctaagtaaaaataagtttaatgcaaatagataattgatgaaatagccctactataatagatggcagagggtttgtagtacacgaagcactgggtgatctagtacacgggaagggcctagaagtgcatacaccacaccacacggcacttggctctaccttcacttccttgggcaaagcggtgctttgtttcgtgaccaaattaagtatttgtgattgattgtgaaagatatatggataaagatatatccatccatgtatcccgatattgaaaaggattaattgattccataacaccttagattcaaagaaatgcgtttagccccattcctgcgccaggctaaggctacttttttgttgaagttcggaactttttctttttgaccttctaactcatacttgatcatactggcatggctccactattttgttttcgatcggagcatcaagcagtacaactcatttctacttaactaagcatgtgctaaaggaggagagagtttgctttaccgaagtccccttttttataagggtcctttgattcataggatcggcaaaggattttcgcagcattcaaattcctatgaattttttcctctctgtcactttgatttgtagggaaagaaaggaaactttacatagaattgcattactatgtttcgcatttcataggaaaaaacagtaagagagtatgagctctttgtaaactttcatttgtttttcctatggcactatcaaatagttcctatcttctttcctgtgttttttatattcttgtggaattggagaatcataccatttcaattcatatatttttcctatcctgcgaatcaatggagttctaataagagaaaacccccaatccgacattctattggtttatgtatgcagttcgatatttaacagaaataatcataatgatggcttgatgatctgattgagctagctgtgagaacacagagggtctgtttggttgctaccctgagcaccaagcctgagaaatttgtatgcctgagaggcattcgagatgctcatgaagcttgcctggccaggccgcctgatgctttccttgtttggtttgccactcctgcctgagaggaaaaactgatgttgggcttgagattattactgctaatactgatgttagagccaatacggttggtcttgagaaattgagatgattagtgtagatgctaattgcagacacaaatcatagaagacaactgaaatccatggggaaaaaatggggaaaaaggggaaagagaaataagaaagaaatcctcaaatccaagcatgcaccaaattaaatattccatgatttctcccagccatgtaaagcgattcaatcaatgatatttctctcagacacacgcagagcacttactatcaacgaatcaaatgctagcagccatggtggcatcttctcgaggctgcagatctagcaaggcggccggactgcttcgtgcgtgaaatcctttgagacgacagcatcgagggcttagcccagcggcagggggcgagatgctttacgtagcggtgggtttagcatgttggtgatgactcacacgccggcgtcggaggcaaaaatggtggcggtgggggtcttcgcgcgacgccgccgcccgttttttcttagcgatactgcgcctggagctcaggcgaccgattttggtcgcctggttcaggctaatgacattacgtgtttgctcaggccaggcaagaggaaaacagactcagggtggcaaccaaataggaggtaatcgaactcaggctagatccaggccagactagttttgctcagggtagcaaccaaacagccccagagtccctggatgagatcgtttcacacatcgagtataggttttatgtccgtgtcaaagtaaaatttgaatttgaaatacggaggatgtatttaaagtatcctggccagttttccatgtaccgactaccttacctgcttggtaagggtcgtttataatagggccatgtccaatacaactaaaaataaaaactaaccattttatcccatcacgtaagataaaaggatgggtgtttataatatctgtgcttgattaagcatcgatccatacttagcaggtgcttatgtgttctaaatcttgtcaatatgactcgccagtttgtcatcaattttcagaaccttaccagcaataatatattaatatattaagtattacttcctccgtcccacaatacttatctttttagattgtttaatacaaattaagatttgagaagtaaaaactatattgcccgttctttaaatggaagtaagagtgtggtgagggtagaatgtgtaaaaatttaaattgaaggtgactgatgtgataagtagtactcttaagtaatagtaagtattgtgggataaaatttaaatttataaaataactaaactatttggggacagagaaagtagtatgtagatataactttagatgataataataataataataataataataataataataataataataataataataatacatgcaaaattaaactaattttttgaattcaaacctctcggcgagcctgtccctgaaggtgcggcggcggaaggggcgccaccggacggactgcgcgatgacccagtagacggcgaaccagagctccgccgccgccatccccagccacgccgccctcccttcgccggcggccggcacgcgcgtcgccctgtagtagagcaccagcagtatcccggcggccaccgtcgccgcctgcaccctgtacaccgccctgccgcccaactcctccgtcgtgaacagcggccgccgccgctccgccgccgtcgccgccgccgtcgtctccatcgccggccgatcgatcagctctacgctctctctaattgctttgttgcttaagtgcaggagagagcagtaagcagtgagcagtgagcgcttgatttagttatatatatagctcttgatcatcgttaggctcctcatacaaatcaaaatttagctttagttatgtctgtttcataggcacttcgttgagctaagtggcggctaacatcgagatcacttgatatttttcgttattatattattataagtgagaggctgtgagagctcgcgccactctgctgccgaccaattctgagctccttccaaaagaatttattgctaacatgaattactgtatactccctccgtcagctggtatcgatgctatccaaataaatttgtagtactgtactaaattatactccctctgtcctataatgtgacatattctagtacgattaatctggacagatgaatgtttaaattcgtagtaatagaatgtgtcatatccggtactaggttggttttttataggacggaagaagtatgtaatgttgttactctctccgttttatattattagtcgttttatttttttctaatcaaaattgtttaagttggatcaaattaatagaaaaaaatatagcaatattttcaatattaaacaaatacattattaaaatatatttaattttatatttgatgaatctaatttggtgttataggtgttgctaaaattttatataaacttgattacaaattgaaataatttaactagacaaagttaaatcgaactatactataaaccaaaagtgagtatattttaagaatgaggaaatagttcaaaatgccaattcactcacataatcagattaattccgcaactgttactatcattcagctcatgcacgtctcttttctttgtcttgtgtgtaacgaccaggagtaagcgacgaatgaagtgcaactgttgaagaagatggagagtgagaagtggaaaacaagtactcgtgaactcgtccacgcaatcatcaggtagcaagtcaccatgggattcctacctcacacgtgagcgctaggaactgaagcggcacgcgtttcaccgtatttatagcgctttagcgcttagttttggataaaaaaaagctatatacatttcttctttaagataaaaaccgccatgcgtatatttcttttttttaaagttgattgcaactttcaactcagatttatcaaggatttgaaaatttttcaactaatatttgaaaactttcaaggtttgaaactctaattgaaaaattttcaagtcaatatttgaaccctttaaacttaaatttaaaaatttttgaactaagaagatgttgaaactttcaagtctgatttgaaaactttcaattcgaatttgaaaactttcaaaccaagatttgaaaactttcaagtcaggatttgaaaactttcaaatcgaatttaaaaactttcatctccaaattcaaaacattcaactcaaatttgaaaattttcatctcaaaattttaaaacttttaattcaaaatcttaaaaacttttaactcaaattctaaaaaaaaaatctaggaaaaaatcggcagaaaaaacgagaaaaaaacgcgtggagaggcgcagacgcgccagccacgcggcgtgcgcgccagcaaggtaactggtgcatcttcgccaattagcttttccgaagtcaccaagacacaattgggacctggaattattggcttctctagttctctttccaacttccaagtagtggcagatcagttttatacgagaaattcagagatgctttctcagcattcttgtagtacaaattcttgtgaaatttatgtttttctccttcttctgaatatctgtgctagccatctgtaggtagatgattatcagcgtgcaagaaatatgtcaggtagagtttatcccaacaaaaattgaaagaaaaggcagtgcaatttatttccataatcattttacaaggcatcgcttcccattttaggacctcaaactattggtaacaggaatgccaacattacaaagccaattgaagctagtgtgactggtaatggtattctccccttatcctttctcacaaacattgcctcataaattgggatattagtgatcactatcagtccacatagaatgacctggggtaaaaacacattccacacacctgccattattttgcttagccctgcaactaggcagacgaagttcagtaatgcgacagttgcgatgatcacaaattcaggagatgatgacccaaactcaaggatttcttgctcatacctctttgcttcatcgccatcacttacctttgctgtaatttcaaatgacatctttgacaatcctaacaattttcggatggtgtcaatgaagccatatagatatgaggtaattcttttcaccatccacatcctttgtccattccaccatcctttcaatgtatccccagataataatgcctcataaagactgtagagggtcttcacacaaaatacatatatgaagggtgtagcccatggactcataatctaaatgtcatgtaagtgtagtgttagtttcaataataaaaataagttttaatgacaaaaatgaaatcaaagtatggcttatcatttaatttaacggtaccttttgaaataagggaatggctttgacaaaacctagtgctggaatgataacatattagattgtaggcagtgaattggctgcccataatccatatatgcagtagcccatctgtaactgcaagctgatttttccatgtccaaacaggaaggtgttgtgctttgaaagaaaaattgtgaaattgccctcactccatctcttgtgttgcagtattgtctgggcaagtgttgctggagctacacccacaaatgctgccctttgaggttccatgtagactgactcccatcctcggcaatgtattgccaatccagtgatgacatcctctactgggcaaccatatttcactccaatctcattgccccattgtgtcctaagttcataagtgcaggttgctaaagattttgccttctcttcaatctcatctatgttctcatgtcctctttcctttattcctctgccccagtcttccttgtaatctttgctgaatttcttaccacaaaggatctctcttctatggaagcatcctgtgccaatatagagacatccaccagcactgtccaaaccacgcatctccacctttacagaaatttgttttgttagtgtagaaatatgatagcatatttcttttttttgcaagcatgggaatgtatttaagtacagtttgatttgatatatggaacttacatgattgataacattgagagagttcccatatatattatttttggtcatattgttgtagttctgaggatactggacaaatccaattttgtggctcatttcttcatcaaggaagaagcacaacgcatctctgattgaatcactattgttggaatacatgtcacagtccacattcaagataacagggctgtcacttatcagtgctgatacccttatctgcatttaacgaaaaaattaacatatttaaaatacttccaggaataaggaatatatatattgaacattaaaatactagagaaaattttgtgaccaatttgtgcaatgaatgatgcacaataaattgtatgtggtgatttaatggtgcgcaattgatacatgaaaaaattcttgaccaattattgactacatccacatagcatctgatacatgagaaaataacatttgatgaccttttggttagtggttacttgtagaacctactggatacttcatttttttaattcaaaaatgaaaacatggtgcatcttgttgcagtgtttttgcatttataagaagatatataagggcaacctaaaatgaaagtagggggagtattgttaggcttgttttaacataaaaataaataaataacgttagtgaacacaccaaagcgttcaatgccccggctttgaagttatggtgatactgagggctcttctcgcgcgccatgtataccagtgttggtagcacatttccgtcgtcatcaactgcattttggcttttcccatctatcagaacctaggaaagaagcaacatttagaacctctcaaatatatataaaaaagtactatttaaaatcataatcgtgaaaggcttacctgaacaattggctggtgattttttgaggtcatttccgagttccattcatcaaatcctttatgctttagtttaatttcttcaggaatttttcctgacatgacagccgaatcaattctctctctcatttcttcatacaggttctgaaaaaaaaaaagtcatgccagtcatatgagagttttgatttctcctattttaccgaaacctaggggaaccgtatatatatttcattatgtgagagctgattttaattatgtccaacttgttgaattacaaatgccttaaagaagaatgttaaaaatgcacacaccttgataaatgaccattcttttggggagcacagattgtgatgcccttctgattccgagaagtaagcagctggggaccttggctcaatgttatatcttctgcagaatggtagccatttctttgcaaacatggatgcctcccatagagcgtagaaagtaagaattgaaccaccatcatcagaaagatacacacttattttttctgatgggtaattgtatgccatgactgataggatggtagagatgacaaggcttggtggctctgcgtgtgggtctgcagtgcatacaaaaacatccacaccaggtagattttctttgtatctgctccaaaatacatggtaaatgtgttaaattgtgggaaatatatgttttctcgatgatggatataacttcatcctctacatcgatgtgtattcggccataatatttttacaataaaacaacattaagttgcaaaatgaaaaaaaaaactaatgaatgtcctcgtgatggtgtgatgatttaattgggttaactgttgagaacactcagagccataacctggatgagatttttttaacaaatcgagtatatatagttttgcatgtttctatcgaaataaaatttgaaattaaaatatggatttaaagtagtgacgcccctgaagaaacatgatgagttagacaagttgggcccaaaatgcgagttgtacccagggtttgcaattttgaaaccctgtttttttgccggtggaggccgaaaaaactgaaatcaccaaaatttcagaattttgggtattttttgaatttttaacatattttgactgaatttgaataaattttgaaaaaatttacaaatacttgacaaaaaattgaaaatttcagagagatttgtgcttgccggtgggggccgaaattaccgaaatttcgaaccaaaattccaagcactggttgtccctgttctgatcacctactcagtatgtggatcgtttaggatcatgcccgatgcaactatgcaaatgcttaaaggagaggagtgcttataaaaaaaaactaaccattttattctaccagctgtaactaagataggaaatgttcctttcaaataaataaaaaaagatagaaggtgtcctaatctgaaaaagcatatgtgcttagcaggtgcatatgtttaaatgggccttaagcacttaagagaaggtgcttgggttggaggaacgactctttacgcggttgtgcttgattatgtggacattccaaatgctacatccgtttttaaataatgatcctcctcaccgccgctagaggtgagtgccggaaatccggttgtcctagaggaagacagcggctggagattgcaacggcgatggcagcaacagcttctctctacctaaggctgtgtttagttcacgccaaaattaaaactttaattgaaattgaaacgatgcgatggaaaagttagaagtttatgtgagtaggaaagtttggtgtgatggaaaaagttgtaagtttgaagaaaaaattaggatctaaacacggtgtaaaagcctataaggtatggcgtgttaggaggcggtgtcaggaggcacagcaagacaagaaggatggcaacgtggaggtgttgggtggaagggaggacatccttgagaaggtgaaatagtgtatccaaaaatgttataaaaacggagttgtcatcttcctcttccaacagtgtatttccccaccacttaaaacccaccctgcctaaaaactaccacatctaaacaccagatagataaaactaatccctgtataatcatttgtcgtatttcttcccatcacgttccaaagcaccacatagtactatgatatttaaaaataaaagaaatatgtccatattttattaacacctccaatttgaagattcttttataaatccgattggagatgttctaagaataaattgtaataaaatatatctgacatggcgtgtttttattaaaatattataatgaagtatgtctggcatggcgtgtgtgttttttttaaagaagaatcaatcacttgcttaatgcttggccagtcgctaccagctttcaaaaccatacaaaagacacgtaagttatgttgatacaacctccgttttaatattaagggcgtccgtaaatctttttacccattacgtttttattcaaaaaattttacaaatataaaaaagatcaaagtcatactaaaaaacatttacgataaatcaagtcagaataaaataaaaacgaatgatcaacatatctaagaaaacaatgttgttatatattaaaaaaacaaagagagtatatttgatgccacttcagataataaataaacatgcaaaaaataaaaaataacagtaagttaaattcaaaccaacctctcggcgagcctgttcttgaaggtgcggcggcggacggggcaccaccggacggactgcgtgatgacccagtagacggcgaaccagagctccgccgcccgcatccccagccacgccgcccgcccttcgccggcggccggcacgcgcgtcgccctgtagtaaagcaccagcagtatcccggcggccaccgtcgccgcctgcagcctgtacaccgccctgccgcccaccttatccgtcgcgaacagccgccgcctctccgtcgtcgtcgtctccatcgccggcggctaactagctactctctctgtgtagtgagctcgatcttcgctagcataggatccgtagtaatatatgcatatatagctcgatcgatcactagctgacaaaatggactaaccaattctgatgcacagatatgtgcatatataacgtcatactatataaattgttttttactagaatatattttatatagcatatatctttagaagccaggttgatgagatttggttgtggtgctgtgtcagccactggagcacgtggtcagggagtgttttatccaggaccaaatgtatgggagacgattattgagtgtctttggattgatggtcctttacactttgtttctatataatttttggatactagccaagagtttgtgcgttgcaacggaaaataaattgtatttctagcttattaagttaattaagtacatatttagtctaagtgaagaattaggtgaattgtatgttgtctttccttattgcgtagtactcctgcacatgggaatttaaggaaggaaaggaatgcggaggacagctgataaaaaaatagtagaaaaggaaaaaaaaagaccctcctctccactttcccttcccctcggtttcttcggcaggccagcccctctaccagctgccaccgtgctgcccctcctctcctccttccctagccggcacgcagcgagctcgggtcgaggtgaggaagaaaccgatcgacgcggcagcgaagaacctagggaatggcaaggaagaagccaaggcgacccccgttgctcggtggtgttttggcgacaacagtagtggacagcggttccctcaggcggcgccgaggatgccgagcctctccacaatgggcattcccctctcatgaagagcagaggacgctgatgaggaaggggagagggcaccttggagggagaagaagggcgagggattgaggttgacgggcaccccgccgccagattcagctagcatgtacctcccggcgacactagccctcgatcaggtggcgctggccctatatcgagcgacgacagctctcgatccactgcttgaagacggaggaggacgacgatgacacggctgccattggattcaacatggcatgggacgatgagtcggtgaccgtggcagttgcctctcccgtcttctccggacaacgaaggactcggtggcgtggattggatcccaacaaaatccaattgttcctggtacgtttggatggattgccctcgtgtagacctccttggagttggtggcttggaccttggtcccacatgtcagatggtggtggcgttgggaaggcagaatggatcgacaccaccaccgagaacatttaaagaagtatagatgcttgttttctgagccctatggatctgagggcctcatcgtttgttctatggcttataagccgctgccaaagtttaaattttgaaactttatttggagtcgactttgatgttttttttaatgtagtttgtttttcagtattggcttttaagtcactaaagacacatatgaaaagttttatccataattattttttatcactaataaaccattacagcttatataatcaagccatatacaaccgatgaggaccttatttatatagaggccgaaaatgatttgaagatggttgtatgaccctaatgtaattatcttgatttcattaaaaaattacttatcaattatatataactttatattaaaattataatgagagtgttgctacttataatcgtctgattatttcttactattatgaatgtttttttaacaagtctaatgcaacatgaggatgcacgagcggtgtggtgatagagtagtcatgggtatacaacttcacccactagtattaatttaatggtgcctactaatacagtatattacacgtatgtcagggcgtcttcataggattttaatgacgttaaggatgtctttagtattatctttttagcgtatgttaagacatgtattcgctgtttgtgtgcgtatgcatcttctgatcgagaaattaatcagtctaatatatgatgtaagtctcgtaaataaactctaataccccttcaaatgcgtactagtatagtcaagctctagacaacacgtttttataggaaactctaggcaacaagttgaagttgatgtgacaacattatatttaacgccttaacagcagtttttcatgacaagaactgttgctagggtgttaaatataactgggttagtaaggttcaacgtcttacgtctctcttcgattctatattaattgacgtttttgacaaggttgagatcaaatttttataactttgaccatcaataactttaaaaatatttagtttaaagaaactaaaacaacatatatagatttttcttttaaagcactataataaaaataaacatgcatttatttattgtatatattataatagaaaagtaaggtcaaaagatatattttgtagaccgtgtcattgtccaaaacgtcaattaaaatggaaccggagggagtacatctgaatatatatatatatatatatatatatatatatatatatatatatatataggacactcatatggggcaccatggtgcccgggcaccatggtatctaatgcacaaaatcactcaaatttttcaaaattttcaaattgtgagtatatacctagttataataatttgattcatacctatacttatcaacaaaacaactcaaatttaactttatttcacaatacatgattacatacctaactaattatatgtatggatgctatatacctacaatcaaaatctaacaaaaacaagttcaaattcagttcaaacttgctttaaactagttagtaaagtagttaatgttaatacctaggtaattgaaaaagtttcatactcatttgaattgggtatatactcaatttcaacaatggtgcccgggcaccatggagcaccaaacaaatatatatatatatatatatatatatatatatatatatatatatatatatatatatatatatgtttgggtagaatggttttaatatgcagtgttatttgctaattaatggtagtaggccagtcaccatcgtcggcatgcagagacgatacgaatatgccatatatatggctgcaaggacagttgtgtagcatgcagagacgatacgaatatgccatatatatgactccaatttaatttcaaattccgtagattaaaaaaaatatcgtatgcactagcacacatccgaatatattttttttggtggtacaaaaagaacaggaagatattctgttatatatcaccgtgtccacatctacatacgaatttcacgtacgtgtacacgcatcgatattgattccatgaccaagagactccatttctcaaacatacggattttatttttcccgttttgtttagcagttgttgtctcgctgtctcgcgtggatcatatatgtatattatatatttatatatatagatcgtgtggggtaagcgcacgaattaatcatagtgatgcatacgtgacatgacaatatcccttaatttgattgactacattttgccttcaacattccctcaactagataatactccgtgctttcttacgggatatatgttagatattagagaaatgatgaaataatttgaattaaaatattatgaaaatgatttgagaatgatgatttaacatgtgtatgtttagttttagaatgaaataaatcgtagacataattactatatgcttgcatgtgtgtttaatgggttgatgtggtatgcttgcatacaggtttttaggagtggtaataaatactatgcttgcatgttgagttttagatgtttagtggatattagctttataaaaagaaaagatttgttcgatgttgccttcagttcccttgtgattctatagtgttaactcctccttttttttatttttttttactgcatcctctttttttaaaaaattactccccatttcacaataaactattatagtatatatgatgtgacactatctaatactataaatcagattaaatatatagtgctaggtagtgtcacatcatgtattagattgatttattttgggataaagagaatagacacataggtgtcaatttaatttttactatgttgtatgcaattgtgtgcataaacctatatattaaactcgttatgggatatatatcttgcgacttcacgaacatagtttttttttaaatataagtacgataaatctttagctatgtgccaactactactacttctacttcttccgtcccaaaatctatattgtcaaaacaaaacgagattggatggaatatatcctaaaacaacaaatctagactgagatatatccagattcgttgtattaggatatgtcatattcagtttatatatatatatatatatatatattaggacggaaaaaacaaattcagagaatgaatttagatatagattttgggaatcctccattgattttttattggacaaaataaagtctaaggattcaggagtggacaagactgcataatctggttggtaaggaatatccggtcgccaagcgcagccaaaaatagtaattcagatggacatataagtagagtactagtaattcagatggacagatcctactgctcgcgtacagaccttgccagctgcttgattggctact

SEQ ID NO: 25194 - DNA, 6873 bp, Oryza sativa
tcatatccctgtatgaagtataccaagcttagagcgaaacgttgactgcacatccagtgggcgtagctatccttaatcctttacataactgtgcaattaatcttgagttaagagctaagatatatatcatgttttgactccatatttacaatgctacagcagaaaacttgtgtggagcgccatacattttatctagagacaatcatcaaactcaataagaattagagatgctagagacgctttgtgacaccaccttgcctcaagaattaattttctatgtatacataatgagaaaagatacattttactatagtgtagactttgaggttttagctactcgatagggaaaaactcctgttttggaacaaagcacccttagtagcccacagcagccggatatggcacttccttggcctatagccgtaagatctagtgctccctcaaggcccggccggtggcatagttgcctaccgagccggctgcgaaaacgcacaaacgcacactctacctctataagcaccttcaaaagattggccggcatattctgaaattgacggagtcatcacgagcgtaacacgtcatctatcaccgaaagaataattagccgtaaatgtgaacacctgtgtcaaatctagaatttcaacctaggtgagttattccacgggaaggaacatttcagtcatgcatatgaaaatttttgtacttccttgcgtagttgtgcatacccatgggtgccaacactactacaaaacccttaataggtgttagcaaaaccgacacctataaaccatttaccaccctcacgggaaaaggctcataggaaaccttcggcaactataggtgcaagttctatagtaaaaatcaataccaatatcataggtgtcagttttttaattaaccggcactaaaaaaccgagccaataatttttcattgtaaaataggaattagatagggagatcctttgtctctagtgctcatgtccttggagcagaattgctacaggccataatcaacaaggcaaatcttcttggacttctgtctaaacctatccctattgaaagtgacccaaattttcagttgtttaacatgccgatgacatccttctgtatgtcaaagcttgtggaagataattgtggaagagaattgttcaccttggaggctctactttagacttttgcacaagggacacgtctcacggtaaattatcataaatgtctgacactaataaatgttgatgaagagaaagcacaaatgttggcaggtgtctttggttgttagattggtacactacctttcacataccttagcttaccccttggaactactaagactagagtggttgatgttgctcccattgttgatagaatcgagagaagactatatgctaattcagctctttcatcctatggtgatagactcgctttggttaattgagatcatttcttccttgccaacctattacatgtgcacttttgtcacgcccggaaattcactagtaattttcgaactaatttgtgcataaaatcctcgtccaggaatcagccgaggtacacaaactgacaatttaatatacaaatccatcttaataataacgttacatacttacaaagaaaagaaaacagcagcggaattaacggtctagcgatggcttcagctccactctcacaggcagctcaactggggtataagccaaacgtcttctccttctggatcctttatcttcaactgaggtttgattgattattgcaagaatgagcatataacatactcaacaagccacacagcaaatatgcaagtgcacaaggataccaaaggatggcataatataggctcatttgcgaaagcagcatttagcaaagaattaagagtagtaaaacagtagagtaattaattaaaaattttaatcaacactgaacagcacacccatgctgcacaggcccaaccatcctgaacaaccatacccggctgtacagatctaactccaaaccaggagctaagcaaattattatcaggtattaacatccataattattgtgagaggtgtgagactaatcacgaaaaacattgctcaacccgcccataaccgcgggcacggctattcgaatagttttactctggccagaggtgtaccactgtacccacaagacacaaccccacatcatgtcaccatgtgcctcaataccaccacggtacctcggaaaggagttgtgacaataccccttgcacaacataacccattacagcgcacatttcctggatcataatcacccccttataaacaaggcatggactccccagcgacccccgtggacttctcgccacttctcagtctggcgcactataatgaatcatgctacacaaaagataaagccgttgcccacgctggcttgtggttggcacgataaatgtttcacagcagtagctcgcgaaccggtccttaattgtcatgagcacgactctcaaaaccatgtgctcacaacccaccattatcaagttttagttggcaagtaattaattaaccaatcacgattaaccatcgtgaactatcattaagccatccttaaataatagtgagtcataagtgatcccaatagtgtgctaatgtttctaagcatggctaagcaatcataactaatatctagctgaaccaatatataaagcccaactagtcaagttataataacccaaggtatcaaggaataaagtaatcaatgcaaattggccataacaaaggaataagttcacaccacccggtgacattcgaaaataaatgcacagttgaaataaatagagaatttaaatataggatcaacatgctcaaaggattgtgtttaggatctgtgtgacttgccttgcaataatcggtcttcaattaatcttcttgatcacttccgacgcactcacgaaccttcgcaacgacggaaacgacaagctaacacgtaaaacgaagaaaaagactaataaaaaccaaataaacaatacatataaaataaacaaacatgtagatcatgattttagatgaatttagcaacttgaaccactcaaaaccgagttacgatgatttagttatgaatttccgaagatttaatctattagaaaaacaggaaaaagaaaaacgatgatgacgtcatgatgacctcatcaatggccggaccaagatggcgacctcgccggagattggatggtcggctgcgactttggaggacatgaacacgtagaggacgacgagacgaacccaacggtactcaccctcgaaccaaacgacgaacgacgacggccggcgacgaggtctattggcggcgcggcttcggtcggcggtggcgacgggactccggtgaccggcgacagcggggagagagcggccgggcttctccacacctcggcgcaccttacggcggtgacggcgaccggcggcgacgacggaggcggcggcgcgacgcggatggagctcggccggcgacgacggcggggtggagcacgtggcggcagcgctacgaggcacgggagaccacgggagagggggcaaacgaaagaggtggactagggggtcctatttatagccttggattgaagagatcggactcctcccgcaagaaatcgatccggaaaatcaaaaactcggttttggagataaactcgaaaacgagttcgattcggataagatactcaacgattagctccgattttttgggggtaaagatagaggaggataagaggaatatttcccctcaactaaattggaaaaaggagcaacggggaggcgagatttaacggaggaagcggcggctgcacagggcacagcacgggcggctcggctctgtccagagctggaagatgaacagtgccagggaggtaaattagacttttccggctaggctgagaggagaggaggcggctcaggttgggccggcggaagagagaggaaggaaaggaaggaatgggctgaaaatggctcaagctgaggaggaggattttattactttcccaattaaaataatcacttaaatgatctttgagttattaaaaatacttccaatgctcaaataatttcaagaaaaatcgtgaaaatacttggacactcaaagtacttaacaaaattataattagaccatttaatgattaatttaatatgtgggtaattactgaaatgctctttgtatgattaaaattaggaattgagctccgaaaaatccgagaaaattccagagagtataattaaccatggagagtttaataaaaattaaatccatccatgctttatatttaggaaattttatttcccacatttaacttcacttgtaaattaatgaacatttaatataaattctaataataatttattaaataatttataaatcctgaaacaaaaatcagggtgtgacaactttgcagctgcctaaaacattcattgacaacattgatagggaaaagaggcattgcttatggaggggttctgatgtgaactcaaagaaaaaaatatttgtctgcatgggataataattgcagacctaagaataagggaggtttgggagtcatagatctttccattcagaatcaagccctccttttgaagtatcttgataagttttataacagaagaaatttacaatgggttaacctattctgggactcttaatatggaaatggggtacatcacttaagcactctcaaatgttctttttggtggacatatgtttgcaagttaacagacttctttaggggaattgcaagatgcttagtgggagatggaatttcttggtcattcagggatgatgtttggaatgataaacctcctctgtcctctcacatgctatgattatattcttttgctggaaatactaagattttggttcataactttatctctgtagacttgaaagataattttcagctgcctctatctcttcaagcctttcaagaactgcgagccttatctgcaatgttggaggaggttaacctatctcaggagaatgatatttgggcttacatttggggaaatcttaaatactcttctcagaagtattatgccttaaactttagggccatgcaaccacctcctcatttcctttggttatggaagataaggccacctcaaaggttaacacaaaattatgaggacatcactagcttggataagaccacggctatattatatattcataaaccaaaggtgcatgctttctatgtaagatttacatgttatatatttaaacaaatgttgctacacaacgagtttggtgtgttttcgtttgcagtgatacttgcttgggtgaaagaaaagagacttgagtgtaatgaatgcatagatgatcaaagaagttgactagggatcgacctaagatcatcttcaagtccactcctatctcaccatgtcaattttggtccatacaagacaagagatgaatttctatatgttttggattcagatttgggtctcttaacagcatcaatttcaaatgaacctagcccctgatctaaatggaatattggggcccatgagtactagttggaaagcttatggagtctttgttcaaatggttttggtcccacgtcaaaattcttactgagttgtcaggaattttcaaaacaagtcacataccttatctagtccaaatctgatttaggctttgggccttgtaattgtgttgtgggctaagcccaaaggggtgtgtgtctagggaaaccctaggatgtcccaaatcatattcatttagtagccttcatagtttagactcgggttttgcttagatttatttctgccaatgtagttccgccacttgttcagtttgtggaaccccaatttctaatcttaataattcatatgcaatttagttgcaatctagcttgttcttacttgtgttcttcaattctcatgcagggattagccttctcgacgagatcaaccgggcaacgcacgtttgataaccataggagagatggtgctacgattgcagggttcagattgtgttgatcggaagacagatcgtctgtgtcaagtttccatcaaatcaagagttatcaatacctatcagatgatcatgacctaattcaccaccttgagattgcatctctttttacagtgtccctttgcaacgtcatgctggtatgttcttggtatctcttgggacacatctttgagcctggacaatatgttggtgcactcgagaaactgttacgaaggccattgtttcatgaaaaaaatttctttatggggcttggaatatttggaggcaaaggaatggtttcatctttgatcataaagccccctccttagattcatggggcagctccttaaggcggatctcctcatgttgttgtttcggctgaatgagatatacaaagatgtactccctccgtttcaaaatgtttgacaccgttgactttttagtacgtgtttgaccattcgtcttattcaaaaaatttaagtaattatttattcttttcatattatttgattcattgtccaatatactttcatgtacacatatagttttacatattttacaaattttttgaataagatgaacggtaaaacatgtgctaaaaagtcaacggtttcaaacattttgaaacggagggagcatttcttaattggatctctttgttgtaatttcccttttttatgtacttattctttttttaataaagtcctagtatgtgaagtttgtatattagatatacgaaagttgatccgcgttgggataattttctatcttgtaagactgctccttcgcttatataaggagggcaggatgcctctttgggggtagattcacaatcatattattagatcaatacatagctcggcagattcaaatccccaaataggagtggggtattacctctcattgagggcttaaacctatctaaat

SEQ ID NO: 25195 - DNA, 3028 bp, Oryza sativa
ggacaatttataatgacaattcaaattatcgatcattcttaatgatcacctgactcgactgaaattggtgtaacaagagcgcagagagggatggcctttacaagtgtcaagccgaacttctctgacatatctatcccattcctttcaatgtcaacaggtagattccatttgaactggtttaacaatgatcccagaactaaatgcaccatcctatttgccaatggcattctagggcatatccggcgacctgcaccaaatggaatgagctcaaaatgcactcccctaaaatcaatatttctttcgaaaaatctctcaggcataaatttttccggttgagaccatgtatccttgtgtctgcctatagcccacacatttacgaaaactcgtgcgccttttggtattgtgtaacctgctatgtttgttgtcgtttcagcttggcgtggcaacaataatggtactggaggatgcagccgaaacgtttctttcaccacagcttgaaggtaaggcaattggccaatatctgattcttcaatatttgtacctgaaccaataacttgtgaaagctcatcacaacactggtggagaaaccctttgtagtcccggttcgtaacccccctttagtcccggtttccaaaccgggagtaccaatccgggactaaagatcgctatctttagtcccgggtgaaataaccgggagtaaagatcgatctttagtcccggttggtaacaccaaccgggactaaagatagagctgaccttttttttttttgcatgcccctgttgctgcatggtttatatatatatatatatataaaccatgcatatatatgtttcaatacatatatatgcatacatatatatatatgtatttatacatatatatgttatgcaaatgcatatgtatatagatatatatatgaacaaaatatatttacattatagaaaatgtgtacacatgcatatagaaacatatgtagtcatgtattaattacaatccattatatgtcctagctagctacgatttcaacgtagtagtactcgctgctagctcagaagctaaggaccggtgaattgtgtttccgtcgtagtagaattcacccttgggatcaaggatttcttcgttgatgaatcccatgagttgttcttgaaccgccgcgataaattccttgtgtgtggtcaggttatccctcatgcgaataaactatatgaatgtatgaaattgattagtaattaaacaagaaatcgctacgtaatgaaattttgaatttatttgtacgtacatcgagctctcttgtggtgatgatttggtctgcaaggcagtggcaatactcgcacacgtaatagccgcacaagttagttccctgcttttgctttgcgcactacaaataaatgacaaacaacgagagatctaattaatatacacttgtatgtatttgaatcggagagatataaatgtagagcatgtgtactcacaggaaatttgaacttccgcctaagtctttctctccatttgccgcggaccaaatgacggaaccgataccaagccctacatggagtttaaagctatgattcgtagtagcaattaacataacaagattttcttaattaacaaaggaacttatgacggtacctgtctataagttcgaaaaccttgtcaaacgtagactcttttttatccattgagtcatatacgttgacggtgcaggcctccaggtcgatgagtaaaagcacccagtggaatctgcaatgtgcgtgggatgcattacatatgaaacacttagcaagttcgtacgggaatgaaatttgctatgtaggaagacagtaaaattaaactaactctgtgttgtatggcaacagtatgaacgtcttgtaatgctgccccttcaagagatggaccagattgtcctctgtttcttgcggatattggtcgagcattgccacttttactttccgagggtcgatgaatccattatcgaaaaccctccgccgtcgggccctttaaatctccattctacaacgataaaaaggagtatattattttctatggtctacttatatacaaagacctaattaattaaaagagacgtatagtaagaaatctaactgaacgatatacttacaaaatccagcaactcataatagagacgtcgagggcgtccagctggtatagttcgtagattcccctgaaattgatccagagaatgtcatctccttgcaagaagtccgtgtccctgatcctcgctccgatcatctctctacctgtggcgctcatctccatgtacagctgatggaacttgtacatttgtgtgggtagggactgcagcagctcaggcttgacaagcgttttaccgagttcgtacatgtatttcacttccgccttttcgattggtgcgactcctagcaattgatccgtagttagaccggtgtcagtaataaattgttctatcgtcatttctttaccggtcaccaacggctcgatctcctggtttggttgctctccaagctgagggactggtttggactttccagaagatgctttcttcagcgttcgctcatagtccgatagcttgatggcctccttgacagatgcagacatacccctgaagaagttcctgacactaaggtctataggaatcttcttttctggacttcgaggcttgaattgtctcttgacttctgatgcaacgtaagcgtcaagctcctcttgcgtgcaatcgtaccccgggtccttgttcttggcggcgtcaactttcgccttctttgttgcccttatgtgggcaagcggtggagctgggggggccttgactttgaaggtgccggaagaggagcttgcgggggagtaggtgtgggagcacgaggaggagtcggtgcaggatcctgaggagtcgatgctggagcctgaggtggagacggtgctggcggagcatgaggaggagacggtgcaggatcctgaggaggagatggcggagccggaggagatggtgcacaagacgccgcttgtcgcccagggaggatgatgtaccgcctg

SEQ ID NO: 25196 - DNA, 1717 bp, Oryza sativa
gtgcggccatgcgttcataaaccttccttgccaccttctcttgcatgttgagttcgtagctcgatacccggaactctaggtctgcaatcttcgcctcggtatctctcttgctcctcatccgactcctgtacgtgtggatgtcctccttgaaaccaatcttccaaggaatcacccctttccctcgagttcgtcctggatgctctggagtctgcagggcgagtgtcagctcgtccctatctctgtctggtcggaacgtgccctgagaggaggcttccactgcatctgttagtcgtcgcgcagcctcttgtatctgatagccgaagaccagtgagccatcagctgggttgagcgttccaccgtgagcatagtaccagaacttcgatcgttccggccaattggctgttgccggttcgatacccctctcaatcaagctagcctccatctgctcccacttcggcatcgcgacgctatagcctcctgaccccaagtggtgatggtacttcttcttggcggcattttctttgtttctttccatcatcgccttcccttgttcacctgtcttatatgcaacgaactcgtcccagtgatcccttagctttgggaatgtgtcgaagttcggtgtctgccccttcagtatatacttctggtacagatctcccttgaagctctgaaactgttctgccattttcttcagagtccaccttttcactttgtcctctgtacccgcaggaagggtgaatgtctcgagcattgtggtccacagcatctctttctccgaatctgggacaaagctctcatgatctccgcgtgcccttgttcttcgccagtacaccgtactgacaggcacgttatcccgcacaacccaaccactgtgacgtacatagttcttggcggcttcggccggggcataggacgtccatcttcttccacttccgttatgatgtgccgaccctcaagcttcttcgctgcacctcgttgcccgcgtgccctcttctgtccaacggagggttgattaccactagcctcctcctcctggttcccctccacatccctttccaagtgcccctgctggttcccctccgcatccctctccacgttcccttcctcgttcaagtactggtttggatcctcgttcccctcttcttcattccagtactggctgcttccctccgcgattgtatcgtacaatatctgttcctcatcgcggtcagccatctgttgatacaagaaacatctgctaagtcacgagacatttatgttttaacaatctaagtcatgtatgctaagtgtaaatgtcgtacattagaaccctacacaaccttacgtgctaagtctaattacaaatcgtgatataagctaagtctaggtgacgtatattatacaaccctagctagtaaataattatatactaagtctaattacaaataaaataatcttatattaaaactcaaataatattacatgctaatactaaaatagtcatgtatatgctaagtgtttcgtgcgtatatgctaagtctaattaagactacaatagtcaattgctacttgtcgcaccaattccgtagtcaataattacataccaagtctaattaccaaataaagtaatattatattaaaactcaaataatattacatgcctaagactaaaatagtaatgtatgctaagtgtttcgtgcgtatatgctaagtgtaattaagactacaatactcaatt

SEQ ID NO: 25197 - DNA, 5340 bp, Oryza sativa
taaagatcttttcccactatttccaaattctttttaaacccggttagggttaagaaccgggagtaaagataatagcactgaattttgaatttcattatatttgtgtttctaaaatagtaaataatgcattacgattatttaaagtcgaaaaattaatgacaaaaccttcaaaaaattattgttgtctgtagtaaactaagtggataatatataattagcacatgaatgatttaaaattgttaaaaattctaataatcctatataattagcatatgcatgatattaaattgttaaaaattctaattaacatatgtaaataccacatgcatgatttaaaattaataaaaattctaataatcgtatataattagcatatgatgatattaaattgttgaaaattctaaataacatatgtaaataccacatgcatgatttaaaattaacaaaaattctaataatcatatataattagcatatcatgataataaattgttgaaaattctaattaacatatgtaaataccacgtgcatgatttaaaacttttaaaaattctaataaccatatataactagcatatcatgataataaattattgaaaattctaattaacatatgtaaataccaggtgcatgatttaaaacttttaaaaattctaataatcatatataactagcatatggttgatttcaatttgataaaaattctaataatcatacataattaacatatgccatacaacaattgatttgtatggatattcaatacatccaaaatagtttacatcgtgtacacaacaattacagcaatacatcggcggtgacggttgaccgcacgtactttctcctcactattgttccttccttgtgatcgctacgcgagtaaagggtgtcttcatttgataggaggatgctagggtcaatcgtcaccgtgaaagggggttgcccatcaaactgatcgtaatcctcgtcagtcttgtactctactccaatgatttttctttttcctgggagaaccacgtggcgcttcggctcgtcaggccctttgccctttcttcctttgctagacatgtccttgacgtaaaaaacttgcgttacatcattggcaaggacaaaaggttcgtccgagtatccaaccttgttaaggtcaaccgttgtcatcccactgtcaatcgttacgcctccaccagtcaacctaacccattggcaccggaacagagggaccttgagaggtccatagtcaagttcccatatgtcctcgatggcaccgtaatacgtgccagttgtaccatcgtgtcccatggcatcgatacgaacagcactgttctggctcgtgctcttcatgtcttgggctctcgtgtagaatgtgtacccattgatttcatatccctggaatgtcgcgatcgagctagatggtcccctcgccaggaaggccggttgttggttaatcgtctcgttacccatgagatgttgtcgcagccacgcggagaaagtatcaatgtgatactgtgtaatccatgcgtcggacttaccgatgtttctggcacgaactagagccaagtgctcctcgatgtaaggagccaccaatgaagattgttgcagaaccgtgaaatgggctttacaaaataaattgttgtctaccgtcattattgctttccttccgagagtcccctttccccgtagtctcccttcatggcgtgatttaggtaccccgattgggcgaaggtcttcaataaattctacgcaaaattcaatgacctcctctgttccataccccttggcgatgcttgcctctggacgagcacggttacgaacatatttcttcagaacgcccatgtacctctcgaaaggaaacatattgtgtaggtacacagggtcgagaataccgatctctttgacaaggtgacaaagcagatgcgtcattatattgaaaaatgaaggtggaaatatcaactcacagctgacaagacattgcaccacatcattctgaagggcttctaatctatccggatcgatgaccttctacgaaattgcgttcatgaaagcacatagctttgtttttgttgcctggacattgtctgggaggataccccttattacaactggtagcagctgtgtcatcaacatgagacagtcatgagactttaggtttgtgaacttcttctccttcgtgcttattattcgctttatattcatggagtatcctgacggtaccttgatgctctccaagcattcaaacatattgtccttctctgccttgctaagagtgtagctggctggagtcaagtaatggcttcctttcttctttggttctgagtgaaggttgccacgttgttccatatacttcagatcattacgtacttccagtgtatctttcgactttccatatacacctaggaagccaagaaggtttatgcaaaggttcttagtgaggtgcatcacgtcgattgcgtggcgtacgtccaagaattcccaatatggtaactcccaaaatatagagttctttttccacatcgccgcgtgaccatcttcgctctctatatgctggcttccaggcccctttccgaacactactttaagatctttaaccatagcgaaagactgttttcccactgcgatgtttaggcttcgtacggtggtcggccttatgttcgaagtgcttgcctttctttcgtaccgggtggtttgctgcaaggaatcgacgatgacccatgtatacaaccttcctacagtgcttaagatacgtactttctgtttcatccatacagtgagtgcaagccttgtaccccttgttggactgtccggataggttgctaagtgcaggccaatcgttgatggttacgaacagcagcgctcgtaggttaaactcctcctgtttgtcctcgtcccacacggggacaccttccttcttccacaactgtttaagatcttcgaccagtggtcttaggtacacgtcgatgtccttaccaggttgcttggggccttgaataataatcggcatcattatgtacttcctcttcatgcatagccagggggggaggttgtagatacacatcgtaacgggccaagtgctatggccactgctcatctctccaaaaggattcataccatccgtactcaaaccaaaccgtatgttttgtgcgtcctttccaaattatttaaattttctgtcgatgtttcgccactgcgaaccatcggcagggtgtctcaacatcccgtcttgttgacgctcttcagcgtgccaacgcatcattctaacattccccttgttcctgaacaaacgccttagccgtggtattatagggaaataccacatcaccttagcaggaattctcttctttgttagctgcccgtcaacttctcctggatcatctcgtctaatcttgtatcgtagtgctttacaaacaaggcatgcttctaggttctcgtactcctcaccgcgatataggatacaatcattcggccatgcgtgaatcttctgaacttccagtcctagaggacagactatcttcttagcctcgtacgttgtcttgggcaattggtttccctccggaagaatgttcttgacgagtttcaataaatcgccaaatgccttgtcactaacaccatttttttgccttccattgcaagaactctagagtggtatccaactttttgtgcccctgctcgcaacctaggtacaacgacgttctgtggtcctctaacatcttgtccaatttatgggccaccttttcactttcgcagtcctccttggcatcctgcaacatctgaccaagatcatccgcaacgctgttaccatcagcatcactttcctccttgcccgtttgatttccttcaaatccagcgtattgagctaagtccggaatattgtcgtcttccacttcatcttcttccatttcaaccccttgctctccgtgggatgtccaacagttatagcttggcatgaaccccgacttaaacaagtggaaatgaatagtcctggatgcagaatactccttttgattcttacacttattgcacggacaacaaataaaacccttatgcctgttagcttcggccactctcaaaaaataatgcacgccgtcaataaactctttgaaccgccggtcagcgtacatccattgccgatccatctacatgaaatgaaaaaaaatcgtacacaaataattattcgtacaataataacagtcatacaataatgataaaatagttacaaactctttcaacactcgtacagtaatgacatatcattattcatacaaaaattataaaatattacaccaaataattcttatttactatttctaaagttttaaactaatattaatgtgttgtacttcttttagttttcattttagtttgttttctattatttaatattaactttcactatattttccttctcaactattttataaaaccttctttagcaaataaactaaatttctatatattctttcttccccacacaaattttctctctcatcaacttacaacaaaattttggagacaaaaaagtgtgcaaaacatagctccaaatgtaatatgacaaaaaaacattggaggatgaagttactaagcttttaggcaccgtgatttgtatataatcaccaaaataaattcactagaaattttggcatgacctcccctcttttttgaagaaattttgaagcttgctcggggtggaggaggaagaagacatatatacaggggtgggactttagtcccggttggtgttatgaaccggggctaaagatcccgaggggcttaacaagccctgacagcatttgaaccgggactaaagatgatcttttaccaaccgggactaaagatcaaatatgcccgttaccctttttaaccgggactaaagatcatctttagtgtatgtatcgaggtccctaaacttggtttattatgtctttccggtccaaagtctcatttgaccgtggtcttgcctatgtggcatgccatgtagacgacgacatcgcacattattattattattttctttttttctcccttctttctcttccatttctctcttctatggcctcttcctccgacagcagcgacgcttggtgatgacagtggtggtcggcacgagggagcttgaggtggctccagtagaggaagaagataaaagaagaggaggagaaaaagaaaagggggaaaaagaaaaaatgccatgtcattgttcacgtggcgtaccacataggcaagaccatggtcaaaggacgctttggaccgagatgatacaacaaatcaagtttagggacctcgatgtatgatttgcaagttcgtggaccaaagtgaaacctcatgacaagtttaaggaccgatagt

SEQ ID NO: 25198 - DNA, 3165 bp, Oryza sativa
aagaagaaatcggaggaatttcggagttgtcgataatctcctcttactttttgtacctttgtaattactctgatttcatagaaatattcttccgagtaattaagattttgctttgtgagaattatctcttagttagttccttttagcattctaatcattgttcgctatatttaatatgcagtgtttatgtttactttagtgagttatagacactagagtagaaattaatttcttaaacatggtgtttaggtagttattttcagagattgctgcgtatcccacatatcattagaggttggtatagagatagtgacagcccacaagagcaccacagtcctcccagtccgggtacggagtagagcgcgttctggtagcagtgagcaagttagcgcctgaagttttgctataggattaaaccaagctttctatagacattgtttatcgctaggaaatcctctctatcatttgcctatctttgcttcgtgcccttggatgaacctagagaatagctgagcacacacgttcctcatggaaattgataccttggaatactcccgagtgaagtgttatatcggcatatccgtgcgcttgcagattttatctgtgaccgtaagaaataccaataagcatttatagtgccgttgccggggaacaattgctattctcctccgtaccttgttcatcctcatatctttgatttttcttcttcctctacccctgctatccgttgaaattacctaaaatacaactctcgaccctggagcaacctatcttcaaattgttagctcctacaggaaaattctatgaaccacctccttcattgaagccaatttttataaccgactacgaaattcgccccgaattaataagtatggttagggagaaatccttttttaggtttcgaccaagaaaatccctaccatcacctatgcatgtgtttggtttagggacaaggtgggatgggttggatccatccctgtttttgggaatgggatgatcccattttctgtttggttgaagggatggaacgaatcctattttttgtttggtttgaaggatatgatgggttggaatgatcctatgccttgtttggatggagggatgaaggtgggatgcctggagtgtacacattgtaaaataacatttagacatgaaaattacactatttgaaaattaaataccgttaatatcgctacatttttagtcagtatacatcaattcttgtatcaatccattcatagaaaataacacatggccatcatctactgtcaagaaattcacctaaaaaaataacacatttttgaactaattatactgctgttggttcaattgctactaactaattgacttcatccatacttactcataatactatgatagcgatcaagcgcttcggagatgagaattgacaaatatcagtctctctgatcaataccaattattggatagagaaatttacagaaggatagcagagtagcgaccggcaagagaagaggcatcaccagctccctgctcatgcgctcccaccgccgccttgcccctgtttgcaccgcagctcgcccttgctcatgcgctcccgccaccgtttcatccctgctcgcgccgccggctcgcccctgctcccgtcgccgcctcgcgcgctggccgccgattcgcccctgctcccgccgctaaccctagaacgtagtcgtgaggaggagctgaaaagagcgaagggaaaaaaaaagggatgcggtgaaacccgggatgggccatgagggttaccgcgcctcacacgcatgtggaggtgggatgaatctgtccgccagtttttggcggatgagttggtcccgaatattgaaggaatattcttttttggaaccatcctatcccatctagtctctcaaccaaacacatgtaaaaatgggatgatcccatcccatcccgggatatcccttcaaccaaacacatgctataggaatttgagcagttgtgttcatactttaatattcgaggcattaaagaagaaactgtacggtggaaattgtttccgttctctcttcaagagagcgcaatacaacagtacacatctaccatcaagtgcgcaaatggtgactggcccaagttgcgagaaatcatcatcttccagcagatgaataaagaatccatcggtgcagcttagtccagatttaataatttagtatgatctggtccaaccttgttcatacctgaatatgtgctattacaacattttcatgcaggtttagacaaggagtatgcattataccttgacaccattgtcggaggatcattcctgcataaaactccttcggaaggacaaataattctagatcgaattatggaaaatacttccttcatagagcaatataatgaatccctccctaaggcatcgatgcgtaaaattaaggaaccttcgatagctgaatctgagactgaaccgcctacatcaatagattcggctaaggagtcctcctccaaaccatcaccagcaaagagcaaagaaattcaaactctggaatgtgctataatgttcaggaatgatcttgatgaagattttggaaacacccagaattatttcagtaaaaagaaacctcctatggccttgccacctcctgatctaatcgaagatgaatatcttaaagaaatagtctgggagctgaccacagtcatgagcaacgaatggttaaaagaggcagagctttcttccgaagtaattcggaataattccactcctcgaaccatcccttgcaacttagaagggaatactgttggtattctatatagtccaacagtcggagtcaaccttgtctcagaatcattcacatttgcttatttgagtgacaaggccattactccgatgaacaaattcttcaaacacccgaataggaagttaattgaaggatttgggattgttcaagatgtatctgtccaatacaacgataaagaggccatcttggattttcatgtctttgaaatccaagactttgacgtcctaattgggcatctgatcaagaaacttctcatcaactgccctcgattaggtagcctaaaattctctttagtagggaacaaattctctatttcattttcacaatcaagatttgccttgactgattccctgcctgaagacgaatatgcaaaggaagtaacaactattattccttt

SEQ ID NO: 25199 - DNA, 1980 bp, Oryza sativa
gtgtctatcttttcggacatgatcgaatacattatggaggttttcatggatgacttctctgtctatggaaaaactttcggtcattgtctccaaaatttagacaaagtcttgcaacgatgcgaatagaaagacctagtgcttaaccgggaaaattgccatttcatggtccatgaagagattgtccttagacatcgtgtgcctgagagaggtatagaggtggatcaagctaagatagaggtgatagatcaacttccacctccggtgagtatcaagggaatccgtagcttcctcggtcatgctggtttctatagaaggttcattaaggacttttctacaattggcagacctctgaccaacctgttagttaaggatgtgccctttgagtttaacgacgagtgccttaattcctttgaaatcctcaaaaaggcacccgtttctgccccaatcatccaacctcctgatgggacactcccattcgagattatgtgtgatgcccgtgattttcctgttggtgcggttttaggccaaaccaaagagaagaaacataatgcaatctgttatgctaacaaaatcttgacaggagcttatggctgttatttttgctatagatatgtttaggtcttgctaggtgttaaggtaattctctatactgatcatgctaccttaaaatatttgctcaccaagacagatgctaaaccccgtcttttaagatggatccttctgctccaggaatttgacttagaaataacgacaaaaagggagtagaaaattccgtagcagatcatttgtcgaggttgcaaatcactaatgtgcaggaaccactaataaatgatttcgtactagatgacaagctgatgattgtgaacaactccaacccgtgttacgcgaatattgtgaactacatggtatcaagatatgtaccactgagagagaacagaaggaaattaaagtatgaaagtcgtcaccacatatgggacgagccatatttatatagagtctgcttagatggactactaaggaggtatgtgccaaccgaggaaggacttaatatcgtagagagatgacgatcagcaccttatagtgggcactacggtgcattccacacacaagccaagatttggcagagcggattctttttgccaccaatgtatgaggcctctaaagagtttgttagatgcttccagagttgccaaaggcaaggaggcatcactttagatttgcaaaatcacttctcgccctctcctcctcctcctcccttttcctctcgttctcctccatagttctcaacagaagatcttgcttccattcatgcgccatggtttttatgggtgttttaagttgtgacgtaagagacaaaatcgaccactccctctccaaactcacttaaccagaagaagacaagttgcccttttcgtggaatattgatccaaaaaacagtttccaatccttctctggaattttacaacccaacccatgaaaatttttggggcggaaggctcttataccagattgtcagctactcgctagtcaaattggagaaaagaggaagaacaggacaattacacacacacaaacacacacacacacatgatttaggcaactatttagtacatatattgctccaatccattaggtttgagctgccgccgccatcgccaccgagttgccaagcccaagttcttcgagcagagtactctgttcttgtattacaaatctcaccaactctccttctctctcacgcaagttcaagctaatgcaagactgtattggatctattacaaggcccatttcggcccacaatacttgatgttcgtcgcggtagcgccagtgccatctctgagtcttcctgtacatcatccggcaggttatgctcttcagtctccagcccttcttcttcagtagttctttggcactccttgctcaccagccgccctgacaaaatgttgctgtcgatgttcaagtttattgccatatcacaac

SEQ ID NO: 25200 - DNA, 2721 bp, Oryza sativa
ggtctcggggaggggagggaagtggaggggagggaagtcggcgacgaggagaggagacgcgacgatgacggcgccgaggacgacgacgacgatggcgacgacgcgacgacgacgacgacgacgacgacggcgacgacgcgagtacgacgacgactgctgcgatgacggcgctgacgcgacgacgacgacggcgccacctatggaggccggcggatggacgacaacggcgttttttttaagtttacatgttgattgatgttgattgatgttagcttgcaagttgatgatgttgatttatgatttgaaacctaggatgggtggggtgggctggcgggaaatttttttgttgcgcggtgaatgtagcgcctgcaaagaatgaactgctgcatgcgagaattatttttgcaggcggtgctttggtccatctaaaaaaattaaggatttttacagtcgtttaggtacctgcggaaggtttgtccgcctacgaaaacgtgttttgaccgcctggaaaaacatttcttctagtagtgcggtgagttcttactcgtggtgaataagatcagagctgcgaatgcgaaggttgtccatggcagtacagaatgtaataactctctggaggtgaagatggcaactcggaccttaaacgtatgatttctctgacataaaagatgcaactaataatttctcatgtgaaagtttgcttgaaaaatgtggttttggatctgtctacaaagtaagttcagatttcaaaatcacactctattaccattagctagcaagcaagtgtttagtgttgtcaaggctaaattgtactcccacacgttctaatttctagagagagaaactagaaaaaggttgaggtggtcatccttttctacattcatcatatatctgttatacacttagtctgaaactttgtgcattataatgttcactggttttatttttatgggattgaatgtacaacaagaaatggattgttgcattagttcagttcaacatgttttcataagattatactacatgtcatctccaacatgtttaagaatgctgaaagttgacaagatattaatttttgcgatgtgaatataataatccctctgccaatttgtttttgtctaaagtgttattatgaatattaatcatgcatgatgaaaatgatcatttacaactagcttatatgctatttttagaagaaaaaaatcattttttgtttgtgtggcatggcaaaaggcaatgcttgcataagttcctcgaagtactgtagattaaagttaatggtatttgtgtataccaatgtcaccatatggatgcatgggggaataggagcatgttgcttaatttctggatcaatgttctgaacatggttaaacttcagaaaattgcaagtaaactatattagataatgcttaatttttagttgttataatatacctctctttggggttacccacaagtagttgtcaatttatggaattttaaattccatatacatatcctcaatcagctctactatggtcttacataattcttcgtaattctcctatgatgacagttggagaagatgctgatgatggtgtaaattatggaactggaaggctgtaaggatctttttgttgcaggggcggtgaaggatcaattatgcatttgcacttcacttctttcaataggcctaaaatatttattaagcatagactgtagaagctaggactgtttggactgaaaagaaaaagtgacatttgatgttcattggagattacagtaattactccgctgagtatattttgtttgtacgataagatattatcaaattccgttgctatgtttgatgcttcctccgtttgatgctctgaagttgatgcatataaactgccaagctaactcaatagcagcgttgaagtagcaaagcaccaatcctgctattgttgatcttgatcaaaccgaacacatggatttgagagggggattagtgggtagggagggattcatccccaacagagattgagtgacatgacagggcttcactcaatccctccctggattgattccccttggggattaaatccctagtaaccgaacaaggccttatggagcgttgtatcgatgtggattgttattttctatagttatatactatatatatatacacacacacacacacacatatatatatatacatatacatatatatatatatatatatatatatatatatatatatatatatatatatagaaaaactattctacacccagggtatagaataggcccccctccctccaacccaccttccctccctgcagggggcaaaacccactccacacctcagtcaaagctcccccacctcggtcaaacccgcccttcattttctccaccacctccactcttctcaactctcgtctcagaacaacgtagtaacgcgatgttcatcgtgcagtaacaccatgtcttacgtgcagtaacaatattgaaatatagtcataatatagtcatgacggatctacttttgataagcacttttttctaacatcatggtccaaacggtttttaaaagtagtacatgatgtgagagatactaccctttaaagattggttttttataaatttgactctccacgaggagtaattctatatcataagtatcactgctgatctgctatgcgttactgcaatcacataatatcgttactacaagatgtagtaacgactgtaagtttcata

SEQ ID NO: 25201 - DNA, 1861 bp, Oryza sativa
aaatggattcagacaatctgtaggcctattagaactgagagcagaaaaaccaagaaagataaaagagggaaattcacaactcccatatctgcgtggagacgatggccagaaacctgatcccggtgttaacacgatgtggggcagcaggccgccagcatgggtagcgtggggtcgacgcggacggcggtggaggcagcgacagcggcggcggcagcgcgtggacgaaggatcggcggcgtgcgcagcgtggggtcggtgcggacggaggttgtggcgtcgtcgcggatggaggtggtggtggcgacgtcttcccggccgcggagggggcggcgtcgcggacggaggggccaagagaggagagcgcgaggaatgggccggtctgcagcgggacgacggcgcccctcccctccgctcccatgctctgcttgcgactcgcgatatggggatcggagcggaggcggcgatgcgggtgacggcgccggtctacagcagcctggaaggggtggcggccttgcgggatttgagcggagatcgcgggcgcggcaattagggcagcgatgcggttaggggagggagggaggaaggtgagacggcgcgcgggttgcgggatgagggggagatcgatgtgcgtggggctgggggatgcagaggtgaggaggtggagatgatctgatgcgttggattctacacggatgatctgaacccttgagtgttgaatgaaagaatgaaagaatgagtgaaactatttgttaaactatagggtatatatacgagctgtctagggttgtgaaagtaatcgtacgccttagacctattaccacccatatataactgcatcaacgaaaacatgatgtagaggtgattttcgaattacctctaaaatcgtgagttctatactacagagacaattctagagccactttaaagattgattagacaacttcaaccctagatactttagagacaatttcaatatattttattgaattttatattgtagaatattcttttagtaaacaatcattagtacataaccttccatccatgacggcctctcacatgccgaaaaagcgggccgtcacaaagaagtcacctcaatcgggccgaaaaagcgtccgattgatatatggtcgcatagacacgttagataggcataaaactcaggcccgtcactaataacacctatccgtgacaggccgtagtttaggcccgattgagatatgaaatcatatctcaatcgggcctcaagttagcgcccgtcacggttaactcctatccgtgatgggtcttagtttaggcccgattgagataacattccatatctcaatcagacctcaagttgacgcccttcatggatgaccatcatccgtgatgagcaccaacttggggcccaattgagataacaactaggcccgtcacagatgactcatccgtgacctattgagataataactaatgcccgattgagatgacttagtatttttcaacttttcatatgaaatgtttatatttgtgagttgaccagtagcaaaagaattaactgcagtataataacattttattagtcaaaataattttttgggtagtaaatgatttcaaatggaaaaattttcaacaacaaagttgtataacttatcaagatttacaacttttattttggtcatttttctatataacttgaatttgaatttgaaaatatgacaacttcaaacaacattttcaaatactaaatgatttcaaatgaaaaaattgtcaacaacaaagttgtataacttatcaagatctataacttttattgttgtcatttcttcatccgacaaagtgttagtaacattgttcacacaatttacatatatctgtt

SEQ ID NO: 25202 - DNA, 6821 bp, Oryza sativa
aaattcttcatatggttgatattgtatattcattattctcagctgaacttgtgcttgtgaacaaccatccatgtttagggaaccttatgcatctaagtaattgctttatttgagatgattaaagatgaaaggaattcttgcaacttctgttatgactcttgggagtttgttttcaaaaataaaattgttttaagaagctcattcctccaattgacttcattttatacctaccaaggccatatgcaagtatatcattgataaaccttattatgcatatgattgcttgacattatattgagttttgtcaaatttatgtgactcgtgttagatatctttcatactctcatgatcaaggggtcatttccatttttgtttccacatatataatacaactaagcttctacactggaagttggcttcccacaaaaatttccatccaaataaactcctacattaaactatgctttcttctcctcgaaaagttcttggtaaaagaaaatgagaaaaggagggaaaggcatgactataagaaaaaaaagagaaaaggaaataaagcttgctctcaaaacattgagcatgatgaaaagaaaatatagccatgccccttccatattcatgccaagaaaacaaaaatggaggagaaagtatagggaaaagggagaatcatttctttattccaccattccacaaaatattttacttttctatgttctaccacaaataaagactcttgatctaggagtatgactgatgatcttcttgagtccgtatttttggctttgcaatatatatgatgcaggtatgtcacaatttgtccctaccgaactccacatatcagccttagaataggggtaaattctggcacattttgccttggtgaagatccaaaaagaaaatatatattcttgagagataagagagaaagtcaatatgaggaaaagagctggtttgcgaaaattcattaaaatcccataagtctgacagagaagcaagaaggactggaatcgaggtcattccatctatcaattgcttaagatggtaagatagccactaataaggttcacaggtgcaagtatggttgtgaatgatttatattcctgatttatatcttgaagaaattcattctacaataacctttactcaaggacgagcaaagagctaagtgtgggggcttttgttggcgactgttaaatgccgattctatactgccaacatctgcataaagttcagataataaaacatccaacatagtgataggtgcttaattaatctcacatattccacaagtgttagtgtatatttgtatgcaggtgataaaccctgaggttaggagaaaatttagagtaaagtgaggagaattatgtatccatacaaggatgggttgtgaacttcatcaaaacactagagaatcagccaaaaataccaaagaatggatagaggaggaccaggggaggacatgggccaaagccaaggccagatgggcccagcccaggtttggtcgaaccaccatcctcaccgtttgatgtggggtttggcgtggatgtcccagatgcatccttgatgacggttggagggcactttggaaatttccccttcaccaaccgtcacacctacctctatgtaaagacatcactccctcacttcactcacacacttccaagcttgagctgaattatatgaggctctattggactatattgtatactagaataggaagagagtagagtagaagaagtcagaagaatttcggagttgtcggtaatcttctctcatttcttttattctgtttttactctgaattcaatataatattcttcctcagtaatttagatttatctcgtgagaattatctcttggttagttcgtaaatagcatacgggatcattgttcactatagtccatttatttatagtgattgctttagtttttgatttgcactagagtagttattaattgcgtagacgcagtgtctaggtaattaatttccagtggttgctgcgtatcccgcagtacgtttgaggtaggtatagaggtggtgacagccctcaagagcacttaagtcctccctgtccgggtatgtagtagagcgacatatgggaacaacggattgccagtgcttgtagtattgcattaggattaaagttaagctttccctaggcactatttctcagtagtaaatcctctctgtcctggcctatcatatgcttggtgtccttggatgaaccggaggaagatctgaccacacacgttctcttggattcgatacccattggaatactccgtaggggaagtgctacatcggtatatccgtgcgcttgcggattctatctatgattgtaagaattacgaatagccatctgcctccatggcggacagcagatgcggcatcaggaagaggacgcgaaggacgagaggtcgttctcgcgtcagccgtgcccgccgcagcaccctcccgaccgcccgccacgctcgcctcccctcccagccacgccccctccatggcacctcctccacgccacccgccggtgtctggagcccacctaccagtccccttcctcgttgcgcccgcccccgcttgcttggcacgcctgacgacgtgccgccgcccaccgcccgcctcgcgggccgccgtgcgcaccaaccgctcgcacggccgcgcctgatgacgcgcgagagagagagagacggaatgaggggaagaggaaaaggaggaggtgggagagaataataggtgggccccaccatgtttttttaaaaaaaaatgctgactgggttgccttttaggacaaaacggccctggattggatcgaggggggtaattcgttcggtattgaaagttgagggtgagtaatgtttggcttttcgagtttaggggggaaattcgtacttttttcatagcaaaattgttttggtatagggtaccggttgctagtattggtgccggttgggaaccggctccggcacctatgatggtttttttacttgtgtgcatatatattgtatcaatgttgttaatatttttcctttttttacaagtatttcaatgtatttgagacaaatgagatataacatccttgaggttttaaaacagtttcgcgcgccattgaagaaaaatcaaggaattaatggaaccgacagtaacaagcatgcacgtgtacgtgttaccgtgaacagtgaccggagcgtgtcacggtccagcccggccgagtcattgtcccgcgccgcgacgtcgagaagcacgtcgaggaagtcacccttcctggcctcgccggcgtcgcgctcgctcagcctctcctccaccaccgcgtcgaacacccggtggagccgcgcaaacaggccggccatccgccgccgccatccctgcaggtccgccgcggcgatcgccgggaagaagtccgacacgttcgggcaaccgccggcctccatgatctccacgaccacctccttgaactccatggactcgccgtggtcgtccaggctggtgaggttgcgggagaagatcgtgctcgagaggaggttcaggctcgtcgcgaacgcgacacggccgacgtccaccgccgccgcgccgccctcgcgctccgccagccgggcgacgtggtccacgagctcctgcaccttctcgcgccggagacgccggagcgcgtcgagccggtgcggcgcgaacagctccgccgccatgatcctgcggagcgcgcgccaccgaggcgagttgggcagccaggcgacggagttcgtggcgtggtcaccggtggcgtcggggacggaccggctggcgaaggcggcgttgtgcctctgcaggaactcgcgggcaacgtccggcgaggagacgaccaccgtggtgaccgcgccgaggcggagcgacatgagcgggccgtacatcttggcgaggccggcgagcgagcggtgtggctggtcgccgagcaggtgcaggctgccgatgagcggcagcgggcggggtcccggcgggaggaggcggcgggagtgtgcaaggaggtcgaggaggtagacggagaggagagcggcgagaagccatggcagccatggaagaaaagaagccatttgttattatttttggttggtggggtgacacacaatgccggccgttttatgtatgtatgcggcctcgcgagggtgagagcttgttgtatttttccaaattatgtacatcattcactaccagtagctgtccaagtgattctccctgtgaaatagctgtcaaagtcgatgtcgacgtgtgctgaatggaacgttcgggaacgtatatattctagtggattttttttcctatttattactgatcacaaaaaagattaattatccattttttccggatataaagatataagtggtgaagttaatttggatctgtttttaatattcgaatttaatccaccaccacatttttttacatcactattgtacagtcaacatataatatactagacttgcgtacccacgaataagcccataacatacgctcataggaccgccacttttgtaacaattacatgacacatgcgtgttcatcattaatcatataacgttatacttacacacccacgaatatgccccattacactactacaaaacacctaataggtgctggtttaacaactatttaccatttcctatctccacgagacgacaaatctagatgaaaactgtgctaaactgggcctaactaaagcgtaaagaacctctagatttagccccgtcaataataatacatttattttcgcatggaaataatatgaaaacactattaaaattaatttcctagctgtgcgccctctccctcacttttcctccacttctctccctctctctctcacttttcctccctccctatccctctactggacacaacagcagcgccgaccacaaccagcgatgacgaaagggccagccacaaccggcactggcgacggaggaggcggggcgcgcgacccctcaccctccctctctctctccggcagagaggaggggcagcggcggtggcgtggccatagagggaggttgccgatggcgtgcggaggaggcaacatggcccccccttcctctcccatatttggctcccctcccctcccagatctggcagagaggaggggtggcggtggttgcctgagaggagggtggcagcggtgcggctcccctcctctccctctccctcttgcctcccagatccaactgaggggaggggcggcggtggcagctcggctagaggggggaggagggagggaggtgttgccgggggctccggcgatggcggtggcagcggcggcacccacccatggcgcagcttccctccctcccttttggatctctccctcctagatccgaccagtagggggagggggatggagggcggttgcggcggcagcggctcccaacggctctcctcacctcccctctctccctctccctgccaaaaccctaaccctagatccggacagaggtacgagggctacggcggcggcgcagccggagacggtagggcgagcacgggtggggttggtggtgatttttttttgttcgcccaaaatattttcgctggcgtctcgctatagcgcctccaaaaatgaaaatgccttctacgaaattgatttttacaagtctttgcatattggcgtgtctttccctccctggaaaaataattttttgtcgactgggacaacgattttcctagttgtgggagggtggccggctcgttgcaacctcgagctctcaacgctgggctggagcaggttgttggccgctgtggcggctgttgccgggactgtggggcggtggctgttgctggcattgtccaggcaaaagcagagaaacagccagcagatggagcaacagctgtaactacaaccgctgtgtttttttcacataatatctttcaaacggatgttaaaccattgaatgcttcactgagcttttttcaattttcgttttatataaggtaaattttgctacatgacatcgtgactttgcggttttagttgtaggacaccgtgcgaagtgacttttggggaaagacactggcaaaaattggatatttgctggtgaacaccgcacccattaaaataataattttcggtcgaagaggagaaagaaatcaggtaaaagttctaaaatacacttggacccgctctctcatctcttttctctccatccccgcaccccttcctcccctgcgttggccatgtcagcggcgcctcgcccttggtgcggattatggcggcgccttcgcggatgcggcggagcgcctcgccaaggtcgcggcagccgcagacgaagaggacgcggaagttgtgcctcgccgatggcctccaagatccgggcctccacaaagtgctcaatgcgggccttggccatgactgggatggtgacgacgcacttgatgtcgtggatgagcaccgggtcggacatgtgggcgacgctgcctgcgcgcggatgtcggcgaggatgcgcttccagcgccatgaccgcgcaggtgccatgccagcctcctcggcgaggcgtgcctgctcgggtgtgacggcgcttgccgccattggaggaagcccctcctgtggattttgcctgtggcgaaatgaatggaaccgccttggcggcgccattccccaccaagaatgtgcggccaggtggttgctgaccccaggacgacaatgggcgcggtcgtggtggcggactgcaatgggtgccggaatggtctcgggccggcgtggtcaggccggcaaaggacgacggcggacgcgattcgcgcaaggacggcgtgggtaggccgacgctggtagggcttggtcatcggtatgtccttggtgtgcagc

SEQ ID NO: 25203 - DNA, 629 bp, Oryza sativa
  unsure (1)..(629): unsure at all n locations
accaaaaattattattttaatagaatgcgatgtccaccagcaaatatttaatttttgccagtgtttttccccaaaagttgcttcatgcggtgtcntacagctanaacngcaaagtcacgatgtcctgtagcaaaatttgcttttatataaactatgaagagttgaagactattgttctactagagtcaattcttcagggcttcatgggtttgactccattgtagcaggacagtttagtttaatgcaaaaataaacattttagaaatttagcaatgccaaatttttggtaagtcaacagcgttaccaagttttgataggatgtgttaaatgtgatattgccaaaattttctaagctaaatatttggtaataaactaaatgtatatgcatgtttattaattttgtgaaacaatgattggtttaaaatgccaccaatcgaaacatgccaggctgcgttccatctacacttgtgcaggtagatttttttagtgtacataaaacgagaaagcttattagcacatgattaattaagtattaataattataattttttaaaacagatttgtttgaattttttaaacaacttctatatagactttttttttttaaaaaaaatacatcatgtaacagt

SEQ ID NO: 25204 - DNA, 6668 bp, Oryza sativa
  unsure (1)..(6668): unsure at all n locations
aagcaaacacaaggcataaacaacgattggagcattttttttcttttttcacattggttttatgtggttatttaaggattggcaatagtaagggaaaacattttttttctttcacataggttttatatggttgaggtaaactttaatgcctcaactcttttatagacatgaaaaagcctctattaaaatgccacaagacatattgatactttataaattatgtcgacatttgatgttgcgattcaagtatttgcatagtatggtgatcgttggtactaggatatatgcaagattgtaataaaagagatggggacgaggatttttatataggttcggggccctgaattgtcaggtaaaaaccctactcctattggccgaagccagtcattgctcttattcaccataatcacacctgtacaatatttggggtagcctatctaactgttgtcgacttggcggtctaaagtgctgactcgtagtcgacaacagggtagccttcctcctcgaatccgtatccggtgagatcaaagacagcgctatgtctctcctgacagtatccgtaaacactgtagggggctagccatgcttatctcttaagtcgatatccggcgtcttatcttggcgtatgttagcttgtatattgatcttgtgtcttgatctattgttccttgtcccctctcctcctagggggccttctatttatacccataggtgtccccttgtccaagtagaactagggaaaccaatatcgatacaatctgagtagtccttgtcatttccatgtagaaccctatttatctttccttatgcggaactcctcctatatccaaaggttgtttccgtataagacatggtatgtggtgggtcctgccgagatttagtcaactactattaggtatgtggtatccataaccctgacagtagcccccgacttcaatgcaaatgaacgagttcatattctcaatccgaagacctcggaatgactgttgtcgagctcacgtgaccgttcttggtgagttcagagataacattagactttctttagcagcctcatgtgggcaccgtatatggtttgtttgagtcaatctccgacgtcaaccaagaaggtacagagcatatgactaaatctcccgtcttgctgcaatcgagaatttggattgaagtcaaaaaattttatctcggcgggtacaccatcttttcattccgtattccttgtcgagatcctccaaccgttctcaaatggtcgagaaggtgcagagtctgcgacgaagccttgtcaacatttgtcgtactcgccttagtcgatcttggtgttgaaccatagagacatggagttttcgacaatgtcgaatagaattttcctgaaatcaatactcagaaaagaatattagatagaaataacccccgagcgaatgctcaaatggtgacatgttataatatccatggaaaactaaaaatgaattaaatttacagaccaatgtttcatgtacgagcatcctcttttttaccgacttcgatcagtcagtttgttaagtcatacactctcccaagcccccgtcttgtcatcggagataagttctcggaggagaaggctcttggacccttgacctgccttggttgaaaaaacgcttaccctagcccccagccgtgaagttggaaaacccaatttccgattacacggcttggttaatacgtacggtgagaactcttacatgaccagatcttacatggtcgtgaggaaacgaagtttagcagtgtgcctatggatagagaccggagatgtaattcatttgcattattaaaaaaagtagaggaaacggagaagaacataggtttgacgtggggaggaggaggacttgatttggggataaatgttttgagtttgtatattacattcattgcgttgcaatgctggcctttgccaatttatagacgcacaccaactccctcttacgccaccctatcaggcacaatgcagcgaacattgggccgcgactccctgatgggcctctttcctttagtcgttggttgctgccgatcctaaggcataaccggataacattctcccctccatcacagatggcttgtcccgcagtcgaaaaaccgagagcacagcagctatatggttgatttcttttcctaactttccaactagcattcctcttttttcctgcgcctgtttttccaactgctaaacagtgtatttttttttcaaaattttctataggaaagttccttaaaaaattcatattaatcaatttttcaaaacaaaaagctaatacttaactaatcttgccttaatacttaactaatcctgtgttaataagttactctctgttttacatgagggagggattagttccgccagatctagcnagctatcctctgcaaccggccgcccttgccggcgaaccttcacttgcttgattgccgctgcaccacgactaatcagttcgttgttcaccacctgccttggaatcggttatggttcatctttaacaggagggagagctgcagtgataagattagcaggtctcaacgcaattgtgtgacatggaccacgcggtgaatggtgcacaatcgaaaattccagacgatacgccacctgccccactattaataagagtaaattgcactggcggtacttaaacttataagacgaacttgcaaagcatcactggtggagaaaccgtttgtagtactggttcgtaacccgcctttagtcccggttgtccaaccgggactacgaatccccgggtgaaataaccgggactaaagatcgatctttagtcccggttcatgttaccaaccgggattaaagaacggtcagccacgtggccggccgaaccatctttagtcccggtttgtgttaccaaccgggactaaagatcggtgtaccattttttttattttgcatggccctatttgctgcaaggttgaatatatatataaatatatatatatatatatatttatatgtatattatgcatatatatatatgtgtgtatgtataaaaacatatattacacacatatgtataatttaaagcacttaacattttatatgcatatatattaccaaaatatatattaacactaaagtaaatgtgtacatatataaatatatatatacatgcatatatagtacaattcatttgctcgctagctatagctacgactttgacgccggcattatgtcagaagaggaaggaccgacgttatgaattgtcgatccatcgtagtagaatacaccatcaggatttaggacttcttcgttgatgaatcccatcagttgttcttgaacagccgtgataaaatccttgtatgggagattatccttcatatcaatatgctatcattcgaaaaataatgacatatcaatatatgaaattaataaacaacttaacaaattgatacgcaatgaaattttgaatggtttatgtatacgtacatcgagctctcgtgtggtgtatatttggtttgataggcagtgggcatactcgcatacgtagtagccgcataagttagttctctggtcctgctttgcacactacatgagaaacgatgagagatttaatataatctttatatttaactgtaattagagatttaattaaatacaattttggatcatgcatatactcaccggaaaatgaaacctccgtccaagtttttctttccaagtcatgcggaccaattgacggaaccgatcccaagccctacatgtgcagttgcaagctacgattaattaattattacccgagatcaacataatagcaatagaatccccgcgactttggaatagatggaattatattacctgtctatcagttggaagaccttgtcaaaaatcttctcctctttattcattgagtcgtacacagtgactctgcatgcgtccaagtcgaagaataacaggacccagtggaatctggaatatgcgtgagatgagatatatatgaaaatgtacatgctatatgtatgggaacgaaatttgttcgaatgacaataaaaactcactctgtgttgtacggcagtagtatgaacgtcttgaaatgttgctgcgttaggagatggacgagattgtcctccgtgtctttctcgtacttgtcgatcatttcggtgttgattttccgagggtcgatgaacccagtatcgtaaaccccccgccgtcgggccctttgaatctccattctacaatgataaaatgaaattattattgtttacatatatgacaggagctagttattgaacgaaacaaatcgaactcaaagatacttacaaaatccatgcgctcaaaagagagacgtcgagggcgtccagatggtacagatcgaagacatccttgaaatggagccagagaacatcttctccttgcaagaagtcggggtttctgatcctcactccgaacatctctctacccttggcgctcatttccatgtaccattcatggaatttgtacatctgtgtcggtagggactgcagctactcaggcgagacaagcggtttaccgagttcaaacttgtatgccactttcgccttcgggattggtgcggctccaatcagctgatccatagttagaccggtatctgaaatgaaatccgttattccaaaattttctccggtcaccaacggctcgacctcttggtttgtttgttctccaagctgaaggactggtttggacttcttgtgataggctttctgaagtgttcggtcatagtctgatatcttaaaggcctccttgtttgctatggacattcccttgaagaagttcttcacgctcgggtcaataggtatcttcttttcaggactccgaggcttgagttgtctcttcacttctcctaccatataagcatcaagctcctcttgactgcaatcgtacggcggctccttgtttgtggtggcgtcaactttcgccttcttcgttgcccttgtgcgggcaggcggtagagcttggcgagaccttgtcttgggaagtgcaggcggacacggtggaggtggaggaggcggaggagccgaggagccggaggagatggtgcaggaggaggtggcggaggagacggaggagatggtgcagggggacgtggcggaggaaccggaagatatgatgcaggaggagatggcggagccggaggagatggtgcacgagatgtcgcttgtcgcctagggaggatgttgtaccgcttgcgccatagtataatggcgtggtttgtgtctcgtagatgcgtctcaccgtctcctcctgggtagtccaactcgaggtcctcgtacgtggcctccaccagctcaacttcgaccctcgagtatcctgctggaatcggcctgcagtggtaagtccctgaaatgtccgttgggatggccattccggatgtcaccttcacgtgatgagagcttatctattagtaatcaacctaagcagcaacttgtggaatgtacaagtcaaaaaatcataaaactacgagaatgccacctcctcttgcatgctgagctcgtagctcgataccctgtactcaagatctacaatcttctcctcggtatctctcttgctcctctgccgactcctgtacgtgtggatgtcctccttgaatccaatcttccagggaatcacgcctttccctcatgttcgtcctagatgctcgggagactgtagggcgagtgacagctcgtccttctcttgtctggtcggaatgtgccctgagaagaggcttccactgcgtccgttagtcgactggcagcctcgcgtatcttatcgctaaagacaagggagccatcaattgggttaagcgttccaccgtgagcatagtaccagaacttcgatcgatccggccatttagcggtggccggatcgatacccctctcaatcaatcttgcctccatctcctcccacttcggcattgcgacgctatatccgcctgaccccaagtggtgatggtacttcttcttggcggcattttctttgtttctggccatcatcgcttgcccttgatgccctgtcttgtaagcaacgaactcgtcccaatgatctcttagttttgggaatacgtcgaagttcggtgttagtcccttccaaaatgtatttcttgtaaagatctcccttgaagctctggaactgttctaccattttcttcagagtccactatttcactatgttttccggaaccgcgggtagcgtgaacgtttcgagcattgttgtccacaacatctctttctctgattctgggacaaagttgtcattatccccatgtgcccttgttctgcgccagtacaccgtgctggcaggcacgttgtccctcacaacgcaactgctgtggcgtacaaaattcttggctgcttctgccggggcaataggtcgtccgtcttcgtccacctcagttatgatgtgccgaccgtctatcttcttcgcggaacctcgttgtccacgtgccctcttctgtccagcggaaggatgacttccactagcctcctcctcgttcccctcctcattcccctcggcatccctctccacgttcccctccttgttcaagtactggtttggatcctcgttcccctcttcttcgttccagtactggcagcttccctctgcgattgtatcgtacagtatctgttcctcatcgcgatcagccatctgtgcatacaaaaaatatttgttaggtctataggtcatattc

SEQ ID NO: 25205 - DNA, 1621 bp, Oryza sativa
aataattattgtgagaggtgtgagactaatcacgaaaaacattgctcaacccgcccataaccgcgggcacggctattcgaatagttttactctggccagaggtgtaccactgtacccacaagacacagcctcaacatcatgtctaccatgcgtcgcgatactggaaagtacccgaatagaggctgtgacaataccctctgcacaacacaactcaccacagtgcaccattcctggatcataatcacccccttataaaacaaggcatggactccccagcgacccccgtgggcttatctccgccacttctcagtctggtgctccgcaatgaatcatgttatacaaaaggtaaagccgttgcccacgctggcttgtggttggcacggttaatgtttcacaacagtagctcgcgaaccggtccttaattgccatgagcacgactctcaaaaccatgtgctcacaacccaccattatcaagttttagttggcaagtaattaattaaccaatcacgattgaccatcgtgaactatcattaagccatcattaaataatagtgagtcataagttatcccaatagtgtgctaatgtttctaagcatggctaagcaatcatatctaatatctagctgaaccaatatataaagcccaactagtcaagttataataacccaaggtatcaaggaataaagtaatcaatgcaaattggccataacaaaggaacagattcacaccacccagtgacattcaaaaataaatgcacagttgaaataaatagagaatttaaatataggatcaacatgctcaaaggattgtgtttaggatctgtgtgacttgccttgcaataatcggtcttcaattaatcttcttgaatacttccggcgcactcgcgaaccttcgcaacgacggaaacgacaagctaacacgcaaaacgaagaaaaagactaataaaaaccaaataaacaatacataaaacgtaaataaacatgtagatcataatgttagatgaattatgagacttgaacggcctcattctgacttcaaataaatttattatgaattttacaagattaaatctatttaaagcccatttaaaaagaattaaataaatttaattcaatttatggataattttaatatgtagatctttattttatacaacttttgcatcttgaaccacattaaactgagctaagatgaattagttatgaatttttaaagattaaatcggattaaaacacttatatggattttaattgaattatgacgcaataatgaattatttttgaaaaggaaaaggaggattattgcgtcagcggctagggtttgcggtggaccaggggcacggcggcggttcaagggaacggacggccgagatcaaccctatccaaaacggactgccgagatcgaacggtccacgaccggctcacggggaacggcaacgatgacgtcagcgatgacggcagcgatgacgtcagcaccggcggcgactcgggcggctcggacgcgcatgctcgccggcgaatgacagcgcggcgacgcgaacggagggcaccaacgggtagagggcgacgcggcgaactcaccggtgaccaaaacaacggcggaaaagcaacggacggcgccg

SEQ ID NO: 25206 - DNA, 1390 bp, Oryza sativa
aaagcatttttatttcggtggtatgggtgatcctgcctgaggaacctccgatggcgcatgtacatggtcttccgacagtgattcagccacttgcctcctgtttgggccatgcaccttacacatcgctttcatgcccttcaccgtttggcccgacgtgtttccaagtgctgggtagtctgttattttccctaacaaaatagcccgacatatgaagtgttctcgcttgtacgcatcccacatccgcatgccttccgtccatagtgtatgaagatcctctaccagcggcttgaagtacacatcgatatcgttgccaggttgtgtaggcccttgaatcagaagtggcatcatgatgtacttacccttcaaatagatctaggaagggagattgtagataataacagctactggccatgtgctatgacgactgctcatgttaccaaacgggttcatgccatcagtgcttagtgcaatcctcacatttccgatgtcgtgagaaaactctttttggtacttcctatctatctttctccactgagacccatcagctgggtgtcgtatcattccatcttttttacgctcttcgtggtgccaacgcatcagcttggcatgctttttgtttgcatacatacgttccaaacgggggatgattggaaaataccaaacgaccttcacctgcactcttttcttatttccaccctcatcatccccgtctccacacttatagcgggaagccttgcataccgggcattgctccaaatatgcaaattcaccacgatacaaaatgcaatcatttagacaagcgtgaattttctgtatgtcaagaccaagggggcatataacttttttggcttggtacgtcgattctggcaagacattgtccgtaggaagaatttctttcaagagctctagcaactcagtgaagctcttatcggaccatccgttgctcgccttcaggtgaagcagcgataggaccacttggagcttgctgtgctccgccttacatccattgtaaattggagttttggagtccttcaccatggttgtgaacttgtgatattccttatcatcagtgtcaaatctctccccgtcgcgcagcatctgatctagatttggttcaccgtgatcgacacatgtttggtcctcctccttgtagccgacatctgcatcatgcccgtgacagttgccggcacttccctccccttgctcctcctcgccaaggaagttgtccataaaaccctttgtaaggagatgtgaatggacccgctgagctggaagttgtctgtctttcttgcccaatttttaaaattatggcatggacaccaaatatattctagtgcatcgactgagtttgtgctggtggccgcggcaacgagagccgttactcccctga

SEQ ID NO: 25207 - DNA, 5178 bp, Oryza sativa
gaaggagcggacgagaacggcggcgacttggcgatcacgacggtggccttcccgagcgatgacgacgaccgagacggcggcggcgcacggctggagcgacggcggcgacggcggcactatgttgcacggtgctagaactcttccggcgacgagaggcgaaggcgagagaggcggcgggtagaggagacaccggggaaccttttaaaggggctcggaggcgacggcgaaggcccacggcggctggcgacgagaaggaaggtttagggttcggaggaaagagacgaatccgattcgaactcgaatccaatgatttccaaaaagaattagccgatgattccaaaagagaaaaggtagaggagatcccggagattgtttcccctctatcaattcggccggagaaggaaaggatcgaccaaatttggaaaggaacggcggcggcgcgaaactagggtttcgggcggcggcggccggaggtagacgacgaccctgacaggtgggccccacctgtcagcgtcggacgcgcgcgcgctcggcggcggactgggccgacttgggccgaggagagagagagagcggttttgggccgactttcggcccaaagccaaaagaagacttttaaaacctttttcaatttaaattatttcttaaatgcaattccatttattaaaaatacttccttagctcaaataaatcccagaaaaatctaggaattatagaattaagcaaggtatttaatgaaattttatctggccccattttatattggaatttattaattaaaattagatcttctcttcaagacttttaaaataaattctaaagattccatttaaacaacaatttatatattttgaattttcagggtgtgacaaacctacccccttaaacagaatctcgtcctcgagattcggaagaactggcgaacagatgcggatgagctgacttcaattcatcttctcgttcccaagttgactcttctgcgagtgattactccattggactttgcaaaaacggataacccgattcctggttcttctctcatctatttccaagatacggattggtttctcaacataggtcagatcctcttggacttctatccgttcaagattagcttcttcggtaggtacccttaaacactttttcaattgcgaaacatggaacacattatggattcctgccaaagattgaggtaattccaattgataagcaacctctcctcttctactgacgatcttataaggtcccacaaaacgcggtgccaattttcctttggtatgaaaacgatgaactcctcgaaaaggcgtgacatgaagatacacataatctccttcttcaaaactcaaatctctgcggcgattgtcggcataactcttatgacgagactaggccacacgcaatctttcttggatgattttcaccttttcttctgcttctcttaggatatccgtcccgaaaacttgacgttctcccgtttgatcccacaaaagcggagtgcggcacttctgaccatatagtgcttcgtaaggagccatctgtagactagcttgataactgttgttgtacgaaaattccgcatagggtagattcttatcccaacttccaccgaagtctaaagcacaagctctcaacatgtcttccaaaatctgattcaccctttcggtttgtccgtctgtctacggatgataagcagtactaaagttcagcttagaacccatctcttcctgaagtttcttccaaaaatttgaagtaaactgactgcctcgatcatacactattttcttagggacgccatgcaaacacacaatccttgccatatacaattccgctaagcgacttccggaataggttgtctttactggaatgaaatgagccactttggtaagtctgtcgactatcacccaaatagagtcatggcctgatgacgttctgggtaaaccagtgataaaatccataccgatttcttcccacttccattcaggaatcttcaaaggctgcagcaaaccggcaggtttctgatgttctgccttgactcgctgacaaacatcacatactgctacgtattctgcgatttcacgcctcatacttgcccaccaaaatctttccttgagatcctggtacatcttagtactaccagggtgaatggagtataaagtatcatgagcttctttcagaattgcatcttttaaatctttgttgtcggggacacagattctctcacccaaccatacagttccgtgctcatcctccaagaaaccgatagcttttcctcttctcctattcttcttgatatcttgaatatcaggatcattaatttgggcttctctaacttgatcaattagagtgggcttcgcttctaaggctgcaacaaaacctatactgacaattcccaaatttaatctttcaaattccttgcataattccaatggcaaatgtcgtccttccgtagcattgcaatagcctttcctgctaagagcgtctgctacaacattagcctttcccgggtgataatgaattcccatgtcataatccttaattaattccaaccatctcctttgtctcatgttcagatccggctgagtaaagatatactttaaactcttgtgatcggtatatacctctgtacgagtaccgaaaagataatgacgccaaattttcaacgcatgaactactgcggccaactcaatatcatgagtagggtagttcttctcatgcggacccaactgacgagatgcataggcaaccaccttcccatcttgcatcagtacacaacctaacccaagtttggatgcatcacaatacacctggaaacccttctttggatcaggtaaaatcaaaataggagctgatattaagctacttttcaactcttgaaaactctgctcacattcttccgaccacttgtacttcacatctttctgaagcagtcgtgtcaagggcttagcaatcttggaaaaattctctataaacctccggtaatatcctgcgaggcctaagaaactgcggatctctgaaactgtcttcggttgtttccagttggttacggattccacattactaggatcaacggcaactcctccggctgagatgacgtgaccaaggaacttcacttcagacaaccaaaattcacacttgctaaacttagcatacagttgatgttctcgtagcttctctagtgcaaggcgaagatgttcttcatgctcttctttggttcgagagtagataagaatatcatcaataaagaccaccacgaacttgtctaggtattccataaacacctgattcatcaagttcatgaagaaagcaggggcattggtaagtccaaaagacataacagtacattcgaacaacccatacctagtggtaaaagctgtcttaggtatatcttcctctttgattctcaactggtgatatcctgatcgaagatctatcttggagaaaacagtagcacctttaagctgatcaaacaaatcatcaattctaggtagtggatacttattcttgatagtcacatcatttagtgcacgatagtctacacacatcctctgggtatgatctttcttttccacaaaaataaccggagctccccatggagatgaacttggtctgatgtatccttactgaagcaaatcatctacttgcctcttgacttctgccaactcattggctgccattctataaggtctcttatggatcggagttgttcctggtaccaaatctattctgaactctatatcccttttaggcggcataccaggcaaatcatctgggaacacatcgggatactcccggactataggaatctcttccaaagttatctggttcagtcttgaccttaaagattcagaagacaatgcatgaacagttaccactcgaccatcattgctggtgagagttacttttctgttagcacagtctatcacacctttatgtctggctaaccagtccatccctaagatgacatctaggtctttggattctaacaggataagattggccagaaatggtactcctttaatttctattctgacagaggggctaccttgcaaagagagtgcttgattacttggggtactaaccatcaaaggacgtctaagatcttctactttcatcccatgatttcccgcaaaactcatagataagaatgaatgtgtagcaccagaatcgaaaagcactgttgcaggaactaagttaacaaggaacgtacccaaaatcacatctggagcatcttgagcttctgccgcagcgacatgattgacacgagcctttgatgctggtgcggtagagttgctctggacagggacaaccttcatgcgtcggggcttcggacacttgtcagcgtaatgtcctgggtctccacagttgaaacacaccacgggcttgctgccatgctccctcttggcaggctgttgctgtgttggagctgcaacagggcgtagagcttgattgcggatgttgttgccagcattgttgttgaagaactgacgctgcggacgaacaacagacgaagaacctccatgtggcatggactggggtcctaaagtaagacgcggcctctgattattcccctgttgtgtcttgaattgagcaatccggcgtttcttctgctccatgcggttgtatttgtcctcttgacgaatagccttatccaccaacttctggaaatcagaataatccccagtcatgagtgggtaagaaagctcatcattaagtccttctaagaacttctcctggcgctcttcatcattgcgcacatcctccggagcataacgagccagacgattgaactcgtgcaaatactccgtaacagagcgagatccctgggtgagcgacctgaattccttcttcttgagggacaccactcccgatggtatatgcgtcttccggaaagcagcggtgaattcaagccaagtgataggttcagcagtagtcctgttcagacggaagtgatcccaccattcagaggcagggccatgcaactgatgtgatgcaaatgaggccttctcctgatcagtgcactgaagcaaatccaacttcttctctatggcatgcaaccaatcaccagcttcaacaggattagtggtactagagaaaataggcggcctcacacgaagaaattctgctaacttgttatggggaggtgcatggttatttccttggttctgctggttctgaagt

SEQ ID NO: 25208 - DNA, 836 bp, Oryza sativa
ttgcgcttggattcttcttcttcatcatcacttatgatgatgaccggaggatctgctagggttggggcaacttctttctccaccacacgaacctttggcgccaattgatagcgagggacaaatagagctctcttccttgcggtaagacgaatcctggccttctgcggtggtgcttctcccttcaacgcggctaattccttctccaaacgatccaccttgtcttctaacttgcaaatcttaccacgattccggtcttcacgatcttgagccgctaacacagtctccgcacgactttcatccatagcccacagcatctcgaccaaatgccttgtggtagcatcattctcaattccttcagtctcaaggtaactgccacggtcacttccctggggttgacgaggatggtagcgatactcagtgtcggccaactgatcactataacgatcgcggagctctcctatggcgatccttgccacctcctgacatgcatggatgtagtttcttcctccagcttcgaacatcactgaggggatatcttcactattactgttcaaggtgactttgactcggcacttctcttcatgacgatcatgaggaatctgggcataaaaaggggcagtcccaaatccaatgacaaaggatatcgtacgcaactcttggacaaaaccctcaacaccaaacaagtactcaggcttgtagcgcggcatctaaagacaagtgaaaggagggagttaagacatttatccaattaatagcacaagtttttggattaatttgaataaagtttagaaatcaaagtaaaaaggtaagtaaataaagtaaaccaagcttgcatg

SEQ ID NO: 25209 - DNA, 679 bp, Oryza sativa
gccgatccgaatcgaactcgaatccacgaatttccaaacgattttaaccgacgattccaaaagagaaaaggtggaggagatcctggagattgtttcccctctattgatttcaccggagaaggaaagacgcggccgaatttggaaggagacggcggcggctcgcgctagggtttcgggcggcggcggcgcaacgaagacgacgaccctgacaggtggggcccacctgtcagcgggagagagagaggagagcggcggctcggactgggccgacttgggccgggggagagagagagaaggagagaggttttgggccgactttcggcccaaggccaaaagagacttttaaaaacctttttcaatttaaattatttatgaaatgcaattccatttaaaaatacttccttagctcaaataaatcccagaaaaatctaggaattatagaattaagcaaagtatttaacaaaattttatctagcccaattttatattgagatttaacaaattaaaattagatcttctcttttaagcttttaaaatcatttctaataattccttttaaacaacaatttataatttaaggagtttaaacaagaaaagcacttaacaattataattagatcattaatgatcaaataattactgaactgttctttgtatcatttaggaattgagctccgaa

SEQ ID NO: 25210 - DNA, 2939 bp, Oryza sativa
accagttagactatttatattgtttttttatttttaaactaaaacgttagtacgttctttgagaaaattttgctatgtaaattgagtttttggtattttgaaattttgtagtgtggaataagaccacccatgatttttttttggaaccaccgtaccactggcggttcccatcctctctcggtggagggcccaccatagacaacgccgacacagagcaacctccccttttattcaccgacactactacaaaacacctcatagctaggtatcggcaaaaaggtatcggtttatttaaaaccgacatctattaccgttttccacctctatagactgaaaaatatagataaaatatggtacctatatttatattataggtgtcggttctagataaaaaccagcacctataatattagtaacagtttttttttaaaaaagtacctaataaattgtaggtgccgatttaaaaaaaaggtacctatagtttattataggtaccggttttataaaaccgacacctatacagaggtcagaggcagacaagctggccgacttatccagctacctgcccatacttatccatatattatatctcgccatccatccccctcctctaacatctcttctctcgctcctctcctctccctttgccttcctatctggcagagcagcggcggtggccctctcccggcccaggagcccacccgctttttttcccttttgcttttcccttcccaactttggcaggaagtggagaggtagcggccgcccctgggtggtggcagctgacgtggaggccggtgagatcgcagcagagggggccgtggtggtggtggaggaggctcgttggccccctccctctcggcgaccctcccccttctcctacagatccagagatggcggcggtggagaagactgcgggcgaggtggtggccgacgcagaggctggtgcggcgaggtggtggcggcggcgacggtggtggtggaggcttgcgagcatagtacaaaaaaccaggccagaggttgacccgctctggccgtcggttcaccggtcgaactgccggattttatttatttatattatatttgatttgccttattttaaatatagaaccatcacaaattggtgaaaatatgcataaacaaacaagtatatcttttattatatggccacaacataaaaataaaataaatgtagtgtggtaacataataaattcatagtcatagaacaaattaaaaaccggttcatttcttaaaaaccgccactggttcactggttcccatgaaactgtctggttcagcgtttttgaccggttcgattgcagggacggtctttttgctaaaccgagccgccaaggttgtgccagttccggtttttttccagttcaaccgctagtccggccccctttttttttttttactatgcccccagcgcggcgtggggtggcggccggcacagcgcgtaggccggcgcggtgaggtggcggcgcagtcgccggatcggctccatcggcgatttttaaaaagaaaatactataggtgctggttgtgggtgaagaaccggcacctatattctctataggtgctggttctaaaaccggcacctatatctatgagtattaatgccgaccaatagatgtcggccgaaaaccagcacctataatgatttatgtactagtgccaccatcgatcccccacacctccacaatcgagcagagagcaggataagaccaagacgagcgtataggggtgcgtggagcgagggcatgagaaggaagagcagcggaacggagcgaactgggacgcaaggggtatcgtcctgatgcatggggacgggatcccggtgtatagttttcccgttattttttgaccgagggcaagaaataaatggccagatgcggaagtcttgttttcgcaatggacaatggtaagtcgttactcgttaattggcagcagaagcgaaggatatgaaagttgaaactagctagccagctacgtacgactcgattgaatacacctacgtcgttgaaatagagaatacgacgttctagtagccacttttgcagtaacaagcaacctctcaccttagtcagctagctagcgcatgttaatttgcagatatcggaagcaatcaacttgagcagtacatgtagatgtagtattcgtactgcctgtgttcgctgttgctagctctctcgacgagatgacaacgaggtatccatgcatgcagctagctcagtagataagggaggtagctactacgttgcagcactatagccctagctatagcttggcagctactaaccatgaaggagaaggacacgagcaagcagctgctgccgacgcgggcgtcgtcgtcgtctcgctttggcgggaaagtgggcagcaatatcgcggtcgtgcttctcctcgtctccttgggcttcgtcctcggcctcacctcctccaacgccatgttcctcaaatccttctacccctcctctctcatgccatcatccatggcgccattgcggctagtgctatcgtctacttctacttctccgtcgccgccctcgccaccgccgccgccgccaccgccaccgccgcagcaacctgcaccgatgcacagcatgggagatgaggagctgttctggagagcgtccatggcgccgaaaagccggcggcggctgccggacggcgtggtgccgaagaaggtggcgttcatgttcctcgtgagaggggagctgccgctgaggcccctgtgggagaagttcttcgaggggcagcgaaccgatcactactccatctacgttcacgcccacccgtcgtacagcttcaccggctcgccggagtccgtgttccacggccggtacgtcccgagcaaggcggccaagtggggggacgcgtcgctggtggaggcggagcggcggctggtggcgaacgcgctgctggacgccggcaa

SEQ ID NO: 25211 - DNA, 4261 bp, Oryza sativa
accgcgcgctggcgctggaggtcgccgccgacgacgagctctgcttcccggcgttccgcgacttctgcgtcgggcgccgcgagtgcctcatcgacgagcactacctcgcgaccctggtcaccatgctgggctggggccgccgcaacgccaaccggacgctgacctacgccgactggtcgcggccggtgaaccggcacccgcacacgtacacggcggaggaagtgacggagaaggtcatcggcggcatcagggcggacaagcggtgctcgtacaacggcgccagcagcggcgggatctgcaacctgttcgcgcgcaagttcccgccggagacgctgcagccgctgctccggttggcgcccaaggtcatgggcttcggctaataaggtgacagatcgacatgcatgctcgcttcattccttgcgttaattggaagagatatggcaaagcatgctgcaatgcggctaagctggctgcatgtagttgaggcccagagaaaaataattttcgtttaattatatttcgttcgaaaacatgttgatcaggtatatataattaatctgtttctggctgatttgtgttgttacctgagaaatacacagattggctttgacagaacgaatgaacgatattttgttttgacaaaaatgataacttgtcatctttgcatgtcttatttatgtgtgtatcagttgacttcgttgcaaattcttggtcagcgtaaggttaaacaacatgcatgtatattgatcttcgagccacactataaaatcatggtgatcactaatatatactagttgtgatgaagatttcgctaagaatatattgagaggtatagttgtgaaaaattggttttgagaacgcagtgtttgtgcagcggctgtcggcactataaaaactaattttcataggcaccatatattttactttacatgtgcatcaattaaaatccgtttgtaataatagcaataagctcatgtggtccaaacctgcatgaaatcaaattccctagacggttggtcacccgcctgtgaaaatatgcctttgatcataggcaatggggccggccgacgacagggcctgccggctacggagatccattttatccgccaccaaaaataatgttcgtagtagtatgatcagactactatggagaaacctggtcaaaccaagcttcgtaggtccaactataagtgtgagggatgtagtcagcttggaggatcgactagacatgctatatgaagtcagaccaagatgagatgcgccagtcatactagatctagagaggaattggtttcggttaaatctttgagcatcaaagttgtatcgatgttttcatgccttaatatgttgaatgttgtttttgggttaacatgttagaagtataatatgttagttagagataagagtcaaaaacaaattatagagataagatatatcctaaagataagatagagttttagagatagaatcctaaagataaatctactcttacgtactccaagtctctatcccctatgtactcctatatataccttatgagagggtcgatctaatatatgagaaaacaacaaaatacaacaattagatttttctacatggtatcagagctatagactagcgtctatcgatcctcggtacgatccatccatccttcagctgcccccggggagatgagttgaatctataagctctatctggggcaacgcattagctagctagcctcctattcattagatatatttcctaataattagtattagatcaatttatttttagccacgtcgaaccctacgatctccaggagccaacacgatttcgtcagaagccgtccctcactagaatcattaagcagaaggcgaggccatggcgaatagcaccaccgtccaagtcgccctgaagcccgagcgacgggaacaccagaccgcatctagtcatctactactgcatccatctactcaattgagaggagaagcacatggtgcacaggagaataatattctcacgtccaacaagcatcaaatcaagcgtcaaaacaccaagccatccccatcgatcatcatcgccaataacctaccaacggccacgacctaagccgcaactgcttcctcctctacaccagccatatatttgtcttcaccgacaatacagcaccaatggtcttcatcaacacgctgccgccgtatcgtccacaagcatggacacatgcgtgtcctctgacagattaatctgcaagacgcttcatcgacgacaacatcgattacgtcctgtacgacggcaacgaccgcgtcaccgatgacggcatcgatcacgtcatttacaatgataacgactgcatcaacacggcatcactattgtgattactgctacacgacccagaaggatcaaccaaaagtggtagcctcattgccaacgacgtcctttgacatatgcaagacgtccctaatgtcatcctttgacatatacaaggtgcaagatgctaaaattgcagtttttgtcatcacaccatggcgtaaatatttttttttgccttcggctatttgtggctacaccatctaccatgactaccacgaccgcagctactacatgatcggctacatcgacgaacgtctacaacaactccagttaaagcgtccgtgtcatcgctatcgtccatgacactcccgctatgactacgggagggaataggggagagtcaagcgatgacacagaaggggacgtaggcaccaagtggaggaccgtctatcagagatgcaattgatgatggtgacttgaaaaagatgaagaaatagaagatttcaaatccagtcgcaatcgttcgcttcgctcccgttacgactgagggggatgttagaagtataatatgttaattagatataagagtcaaaaacaatttataatagaatcctagagatagaatcctagagataaatctactcttgtattgtactccaagtttctatcccctatatactcctatatataccctatgagagggtcgatctaatagacgagaaaacaacataatacaactacataacataagtatgaaaatactttggaccaaacgtccgacgggagacaattcatcggatgctacacccaccgagcccacttcactcccaacgaccatccatccctatccccacctctctcacttccctcatctctcatctctctatccaagcagtccgctgtgataaacatgataaatcgtgcgtcgccgccactcctgctacacactcctgagccgttgtcaacctgccgtcgccgtggagcagctgctgaccttgccgatatcgaggcatctcctgagctcgtccaatctcctagcaagcaagctaatcagatcaaacagtagcaaatggagagggagcagtagcccgatcgagctaatgtcgtcgagcgtgtgcctctctgccgccactgatgttgacgaaattggtctcctacagcttccaatgaaaatgaagttaaaatctcatgctcctgtcaccaacaaaactagcagccaaggtcacatgttgcttttcatgctatggagcacatgctgctcggtcctcctccatattaatggcgtattgatcttgttgtaaaagcttccgaggtcagggttctgggattcaatagcgtaaaaatttcgggacctaccaaaatggatgaatctcggaaatttcagatgaaatttgaccgaatttggtgcaaaattcaaacaatcattaaaaaaatgggtaaaatgatcagagaaccatgacaagcatcaacacaccaccaaaataccatttaatacgcattaatgcatagatctaacaaccaagttcataacaacatacatagacttagcatgcaaattcataactgtgtagtccattagtctaattcatcaccatgtctaaggtctaaaataattacagtctatccatacatacacccaaaagaatactaaacatatatccataataaatattagtcatgtaactgtcgtcaattgctactgccactagctccatatgtgtagatgaattcaatcaccatcatacatgcattcataaaatactttgtcggtgacatggaaccgggagtagcatgactagaggcttgaggcagacacaatcgcccacgtggcctggcaccctcggggggcgtcgggcccgagggtgatgcgttcgccctcctcttagtccccccgagagggtcgggccgcacccccctcggccccgagggccgaggcgccccgacccctcgtgggtttttgctccgcgtg

SEQ ID NO: 25212 - DNA, 1511 bp, Oryza sativa
  unsure (1)..(1511): unsure at all n locations
catattttccccgaatagagatgtgtatgtaaaattcagtggtatccaactacttcccattgagaaagtataagtttcttgatacgagatcggggaatttcgtgattagcgttggcatgcttaacatgcccttttcataggggatcaatcggttctattttatgttttaaagaagaccataaaaaacaaatatcatatttattgatggacctattaaaacaaaatctcatatacatttatggacttatctgtcagtaagctaactccaggggcgtccttgggcccgtgcgggctgtgcgaccgaacagggcccctaaaatattatgtcctatatataataatattagaggctttaattttgttaatttgcagttcaaatagtagtaaaacaaggtccaaaacgctgcaaaagatgaaccaatccatcttccatcatactcctgtccaggcgtccacgtcgttgcgtattgccgaagtcctgacgccgcaactgcttcgtctcctctccccagtcccctccggcctccgcttctacctcatcgctgatgataggctgatcaccacgcccctttttaattttactataaaaaattactaggctactagggccccattttaatattttgcacacgaacccgatttggcctggacgcccctggctaactcaatcaaccgggcataggcccaggctccctggttcggtgcagggatgtgatacttggctagtatatgtggttcaattatttttatttctttggtgtttagtctctactattcttatctctttaccacattgagaaagtgctggaaaattccggaataccctcttttatccaatggctgagatttattttatctattttgtcacttcatgaatctaacggctaatattaatatgatgatgtggctcatcctaattgtattttaggattcactttacactagtagaaatttgaccaaatctgtaaaaaaaatcattccgaaaattaacagacatgtcagaaattttgataccccggaatataaaacgaaattacgtccatgatggttaattacacatgccaccaccggaaacatccaatcccaatcacaatttcactttcttcaatatggcgtgcaaaacgccgccttattttattgcaaataacatcacagtatcacatccaccaccttcattttatagctgctagaagtttgccagtttccagctcacaccgtacactcantaaaagccgtagcaatggcgacttggattcttggatggttgctatggcttcccgtgtttctcatctccctctacctcgtcgacatccttgcacactcctgccgccgccgccgcctggaccccgcccacttccgttcatcggcagcctccacctgctcggcgaccagccacaccgctcgctcgccggcctcgccaagaagtacggccctctcatgtcgctccgcctgggtgcagtcaccacggtggtcgtctcctcgccggaggtcgcccgcgagttcgtgcagaa

SEQ ID NO: 25213 - DNA, 1611 bp, Oryza sativa
ggaggaagcctaccgatagctggcagcaataacagggcgatacgacattgatagttctacctcgaccacgtgtggttgagtaggtggatagtgtactggaattagaagaggggatacttgtcggagtgtaggagggggtgacgatgattgatccaatgaaaacccttcaaacaaaggttaggagatatgggtcggaaagtgggtagttgagaagtaggagtatgaagatggctagccagtgggagagcacactagtggggcccaatgagtagatgggtggcggtactcagggtcaggtcgggaagggtgacggtggtgcacatatgtgtgtgtggctgcacatcgtttggatctgtttggagacaggggaggagggtgtatatacgaagttcgaagtgatcgtaatttacaaataaataaggtgcgattgacaaataaccaacccttatttatctttttcaattcctaaaacatcttaaatgttgtgatgtaaaagcaggattagttttcattatctgaaggattatgttttgttattaactgtcaccaccgtttcatagtatatctattatgtaggacttgtttgctgctgggagtgacacaagctctagcacaatagaatgggcaatggtggaattgcttaaaaacacattatcaatgggtaaagcctgtgatgagcttgcccaggttgttggatcaagaagaagaattgaagagtctgaaattggtcaattgccatatttgcaagctgtcataaaagagacattgagattacatccaccggttccactgttaccacatcgagctaagatggcgatgcaaataatgggttatacaatacctaatggtacaaaaatattgataaatgtgtgggccataggtagagataaaaacatttggacagaacctgagaagttcatgccagagagattccttgatagaacaattgacttcagaggtggagatttagagctcatcccatttggtgcaggccgtcgaatctgccctggaatgccattagctatttggatggtgcatgtggttcttgcatcactattaattcatttcaaatggagactaccggttgaggtggaaagaaatggaattgatatgacagagaagtttggattgactctagtaaaagctattccgctatgtgctttggccacaccaacttaagtcaacgagccactgtttgagttagaataatggactgctctttgtcaactcaagcattgtatcatgcacggtattattgatgtgaaaataaaaatacatcatcaatgaaatttgtgggtatttactacttcccaatgtttatcaatagtcctgagaaaattacacagcatatatttgtattagaataaaccctcgtggggaaaaatgtagaaatgttagatgtcaaagtatacatgaagtgaagtgatatgtatgtccttcctcattatcttgagatttggggaaaactgtagaaatgttaggtgttaaagtatacgtgaagtgaagtgaactgtatgccattccccaacgcgagatttgggttgaatttgctagtgtgcataattaaatatggcaatgcatacacaaaggtctcaagtttgaacctcttgg

SEQ ID NO: 25214 - DNA, 1794 bp, Oryza sativa
cacctaaccacatttattgcggtttggctgagcgtgtcacgccgcatgtaacgcagtgcagtgcactcgtttatccggtctgtgaccagtcacagaccggtcagatcgcgggttaggtggcgacaggcgatctgacacacgcctcgccccatcccgtcaggacgagggcttctaggcactcgtccccagctggagctagcgtgttacctcccagagatggcacgttagtcctggtcagatatatgccaggcttcatcctaaccattacaggcaagatattgtatgaagaagggcgaacatgcagatggataaactgacgcgtggtggacaagaatgaccgatttgtgaccggtctgacactggtcatgtcgtcagcagacagccatgttcccacgtcgcgcctgcttccggcggaagtggaggtaggtatgggccgtcccatcagaaggtcattcggacggcaaccatacaagtctccatctgtttatgaaaaggtggggtaagtccccacaaaaaagagagaaatggtgcatgtggtatccccttaagatataaaaggaggaccttgcccactgagatggaggactggacttttccagattagaaacccaggacaagggagaggctggctgatactttgtagctccttcatacacagatctcccaaaacacaggagtagggtattacgcttctcagcggcccgaacctgtatacatcgcccgtgtcttgtgtgtttcctgtctcgcgagccttccacatacagagagcttagaatctctcccggagtccccggccgaaccggcaaaggggggcctgcgcggtctcccggtgaggagccccacgctccgtcatacttcataattgttggactgtcctaaccgttgccttgacaaccaacatcaccgctgccgcacaaaatcaccatgaggagaatgtggattggggactcaagtagaagatggtggaggggaacagggagaaatggagctgggagaaagaggaggacgccggagctgctgctccactcctccggcttggagtgatggagtctcttcaccagccgccactagggggagaggacagggaggataaagagtgggttagggtttttttgtgtgagatttgctcttttatactagggaagatacttgagggctgttttggaccatgggctgggcggaaaattcaaattgggccgaatttttttggccggtttagtgttgtctcgggctggaccgaaatgggcgaatttcaccgaatttcggcccactcggtccgtatcccagaaccctgtccgaggtagctcagttttgtcctgtggtggaagcccggattcggccacaggagcaaattaaaggaagaagatagatctaactattggagtagaggaaaagaatggacggtaggcttgttgcaattcattgtattatattggtgcactttgttgttttcgtgtgttccgtctttttctaattggatgttgcacgaatgtacattgtattttcttggatgttgcacacaatgtgttttcggtgttagaatcagtatctttaaatgttgcatataattggaaaaattttaaccacatgatgaaacatttttcattggacaatgaaacatatgaaacaattttgctgaaacatttcttagttaatggtgaaacatgtgaaacatttttctagatatggtgaaacactgcccggagtttcgactgggatcggacgtctgatgcctagtcgtccccacataagtagtcatttcttttgtggttaggacgttgattcccatgtgta

SEQ ID NO: 25215 - DNA, 603 bp, Oryza sativa
caaatatgtcaggaatagatcgagacccaaaggcagcatcgtcgagggttatgcaacagaggaggtggtcgaattctgtatagattacatggatctacaacctatcggtgttcctgtgtcccgtcacgagggcaggatgcttggaaagggaacattaggtcacaggagaatttttgcccccaatccacaaaccataagacaagcccattttgcagtgttaccacagtcagctttggtggctccgtacgtggacatgcacttggatgtactccttagagacaatcccaggaaaggagcagcatggctcgcgaagatgcataaacatcaatttgggaaatggttgatggagtacctgacaactgcagacatcgatggtgccccttttttctttatctcgggggccatccaacacaatccacatgtaccacggctatgatatgaacgggtataccttttacaccaaggcccaggacaacaagagtacaaatcaaaacagtggcgtgccgcatcacacctacgatgacggtggcaacaagcagactcattacggtttaccaacgcaatctgggagttagattatggagcccctcaaagtccctctat

SEQ ID NO: 25216 - DNA, 3265 bp, Oryza sativa
ttaactgcaagggtgccaccagcaaaatcatgcacccacagcccaacattcagtgtattttaattaactaacaccattgcggtggcacaaatccaaagctatgctaatagtcaaagtatatgtaataatgtgatctccatttgtgtactagttgaactaagcacggctaagcatttcctaaaccaacatgtaatcattttgatacccaagttatcaatggcatatggtaaacaatatatggctgagtaataggacccataccacatgacattgtaaaagaatgcaacatttaatagaaatacgggatatttgtaaattgagtataatatgatcaaatgtaatgcatcactttccttgctctcgcactgatgagacctcagcaacgtcttcgagaaaccgtggatcgacgaaacggccgaaatgctataagactactgaaacaggaaacaaaaccatttttaataaattctagggatttttatgaatttactgagacttgaatagacttaatcggagctcggatgaattagttatgattttaagaagataaactttttttattaataaaggaaaatccttattcgatttattgcgcaatattgccccagggctgacgtcatcaaaggaggggggcgccgacaggtgggccccgcacgtcagcggcttgagagagagagggaggagcgccggcatgcgggccccacgggcagcggcacaaggtggaagggacgcggctggcggctcggcacagctcaagccggccggccatggtgcggtggcggcggcgcgcggccaccagcggattgcgaggcagcggcgatcggcacgaaggcgacggcgcacggccggagcggcggctcggccaacggcggcggcgcacgtgggaagggagagaaaaggagggggagggagtcctcaccggaggaagcggtggcggccggcgcgggaaaacgaggttggcggcgacgaccggcgatgccgaggtacggacaggcggcggcgacacgctaggagaagacggagaggagtcaggagaggggacgacgaccacggcagcttaaaacgccggccgaaaatggggaggacggcgcgactcaccggcgtgcgaggagataggcgctccggtggaatgccggcaacgcgaggcggaagccgggaaagctcttgcggcggcgaagctaacggcggcggccctagcagcgacggcgcgcggccggagatgggcggcggcggcggagctcggcgagcgcggcgcggcggcggtagagggcgcggatggaagcggcgagggcggaaaacgaggaggggtctcgggggagcgatttatgggcgcgggaggggcagaaacggccagggagggcccctattgcgccggtgacgtgggggagtggaaggagagaggggtgggattcaaatcgaatcccgcctccaagcgagcgcgcgcgagagagcgggagaggtggaagagtggggcagcgatgtgggcgcgcggcacgggcggagtgggggcacgaggtggagcggagaaggcggcggcgcgggcggttagagctccggctccaacggccggagataggagacgatcggcaggtggggcccacctttcggcgtcctagagagaggagggaggggcgcatgggccggcccaacaaagaggatgccgagcgcgggagggagtggggcgacggcccaagaagataaaaggggaggaaaaagaaaaaggaaaaatgagaggatttttcatgtgattaaatattgcacttgctcattttaaattagttaaaattattttcaaggctctgaaaattctactaaaaatgcatgcggaactcaagaaaaattccaccatgtcattttcgattattaattgcatttattaattagggattagctctaggttaattaatcaatttcttcggacaatttatttaacaaatttttaaagaaaaaaaagggaaacttcagggtgtgacaggagatggcggagacgatgcgatggtgccgctagccacgaaggccaggacgtcgcacgcggagagacaacgcccgtgaggtctgtgtgctcacttgctatcccctcttcccattcacaatttgattcggttcgattttatttactactagctcatagtgatctctgttcaatcccaaatcttatctatccaattcaatctgatttgtacctatccaatggaagcagagcctctctgtatctgtctctatttctccctctcttcaacttaattaatggataaagaacattttcttgagtgattggagtttgaggatgatgcgtgcgggtccggaggatgaacaggaccacaggagacgagatggggaagaaaggggcaattaggtccaaataatttagaaaatagagtgaaggagtaagtagtggtatatgtgaaataaccaaaaagttgtaatggcatgtctctaaatagatgaatagtaatgacatatttcaaaacagtgaaagttataatggcatggatccaattaaacctattattatagtcggttttttattgaacatgcacctataattaattaaaggtgttggtttttttattttcagccagtggaagtggggaaaacactctagctgttggttttagctcttctggcacctattgtgccgatctatatgtgtgtttttaagtagtgaaaagggcgatgcgctcgatgttgtggtatggtttactgtcaagaaaataaatgcacaacaaaaacacaaatttttacataaaaaactcttacatgaaaacaccatgaacatcgattggcaataatcagtttagaagatataatgacaacgtaggggatacagtagaccgtcgcactattcgcgtatagccgacaagagtatataaagaagaaaaatagagtcctaataggataaggaaactaattcaaactctaatagattaataggaaactactcaaaatatactggtaagtgaatctcagataacatatttaacatctacaacgatagcaatggcttgtacgtcaccagtttctagcgtcgtcggctggggacaagatccacagactggaaagggcgggtgtgctcatccaaatacggtgtgtttgtgtggaagaatctgtatatttgctctcttttatggtactccatagctcggtggtaatggcaaagaaaatattgcacattgtttgtctttatttgtcttatctaagtaaaaaaaatatatactcctcctcttgattaatacttccggtcctgaaatagttatctttatag

SEQ ID NO: 25217 - DNA, 3612 bp, Oryza sativa
aattttgataggggtgattgataaggcaagtccaaattacatctaaaatttttggagtgggcctagaatagggtgagctaaatttctatttatttttcaactaaaaatactagtaatatgcccgtgctaaacactacggtacaattatatttgtttttaataatttttagaatttcatattagcaaaaaaatatttttatatggtctgtgctgtgcatgtgagctttaaatcaattaatgccgaacatcaaatatatttcatgtaaatctatttccttgcacggtattcatgttgttttctattcctcaactgtcaatcttcatcattagttttacctgtgaattttttttgcaaaatgaaacggagaagagcgattcatatctcacttatatatgtaccaaggggtaaacactaatatatacgatgatcttttcatttcactgcacctgtttggctgtttggttattggttatatctccaaatgcaattatcggtccaccaccaaactgattttcatccatacttacctaatcgacaacatataagattagtaatccaactcatatttacaatacttccagatgcaccgtttaggtacaaatatggatcaaaataaatgaactatacagcacaccggcaaccatgtaacagattcttaataaaatacccataaataaccccacctcacaattgcttatcaacatgtgctctatattaaacaccaaccgtaatatctgacaccatatagtttatttacagattcgagtgcagaaaacactaaatatgcatccatggtgctaaaaaatattggttatacaaacaaattggaaatatgagctctcagtcttgtatgttcagaagctaggaaggaatcaaattggaagtacttgaatgttaaatgacactgaaaaatgtaccatcaacaaaagaaatggcaagtacagggcatgctctttataagtggtcatgacatcaaaatagcaaaattcttaatgacagtgcctatctcactaatttatctctcgatacaactggagagaaggtgacacagcttcagctccccaatcaccctatcccttgtatatgagaaacaactgaacgaatcagtatagaaaatcacaagcatcttccataacagtaaatccacatgcagagatgcgtaaattacagtgaaattccagattaattcccatatcccgttaagctgcattgccagtggcaatgtaatataggatgtgtggcaatgtaatacagcccacctcataggatctgtggccatgtaatataggccatgacctggattactaacagatcaaagaccccttgacggctgggatattaccttgtgacacaaaagagagatcatgctattttgtctaaatagcaaatatagggtaaataagtgaataaatttcagaagtgaaataaccctaccaaaggtaggtaaacaacagaagaaatttctcttatacagagtctagttagcaataacaacagcaagtaacatgaacattgatggaggaaaatcaagatgtttattgttcataaagtgatcacctgtacataaatagaatcgaaaaccaccacgaacctcattagatggtacctgccaagtcacaaaaggagtggagcaagcagtgaagcatgggaataggactaaacctgggctgagaaaatattatctaattgtttgctcatgaaatctcagccccttttgattatgtcaagacatatcttctcattgattatgtcaaaaataataaagctaaagagaatgttagtaaggtaaatctctactaattaatcaatagcaaagttttttttaaaaaaaataatcaataggtcagttggcatttttaattacagaagcactacaaaaatctgctcagttttcagcttggggatacacctattataagcccctcatattgtcgaactcagccattgcccatgaatcctacactaagtttccccttcaaacaatatatgattaattacatacagaaaatgtaaatttagttgctactgactatatgcagatttcatttcgttcttgagtaagttatgtcatgaaaaggacctgcaattagcatgagatgtattccgtttattagttgactatgaatacttgtacctacagccagccaagtcaggcactgaactgcaactgtcccctccagttgccaattctggattagtcaacatgccatgcaagttaagcgaacagttaccaaaatgaccaaatacatatttagtttctttcacatagaaacataattgttatgtaaatcaaaatgtatcttaagagcatatgagatggtatacaacagaaaaatatcttttcattaccaaagggacataaaaatcatttagttgagccagcctgatgcaaaaactcactgttttccctttttctcacttactgtcatgttaagtcctaagggctgagtgcacgctaccaaaccctatacagattaaagaatcaaatatccccaacctagctcgacaactcgagcattgaagtttcctggaatgatggaggtataccaaaatgaactatcatttagatagagaaaccaacagacacatgaatcatgcacgcagattacctcgtagtgtggaagcctgtgtactcctcactcctaccggccatgagcaacggatccggccaagacccccctcgacactgtcgcattagctggtttcataaaaagcatgagatattcttctgtagttgtttgtctacaagcagtcgaagacgatatggaaaatgtaaagttttgatggtaaaagagccatagtttaagaatgttcaatgaatccaaattccatccaaccaaatctaaaactgcatggataagccttcaacttctggaatttttagcatctaaaactactaaaatgtattgaaagatttttctaactctcaagaacagtggagataaattataagggttttctcataatcaaatattccaattaagatggtgtcaggtttgaaagcactcatattaatgaggtaatatacattttacataaaaaagaagtgaacattcatgtccatatgttacatatttcagtagcatcaaatatcagcttaacataccatacattagcatcattaaacaatacttatctcggtgaacagggttgaggaacgtggtactctactttcgagaggattttacaaacatgtttgagatgtttgcttgtcaggtacagtaaaccactaaggacttcagattttggagtagagttttgcatcacaaatatccatgcacaatgaacaatgtttaataatgaacaatggggatttagtcaacaaaggagataaaggcattatgcatctctatggatgaaacataccatgccccgtatgcctcctcgtacaggaacgggatcgagaagcactcttatcttgttcgcaggcaggatcgatggcttgcagggttgagcgagccctgggatcagtggcagcacgagggactcgaagccggttcaacttcgaggtcgggatggcgatggagcgacgcagcgatggcgccgatggggctgcgggctgcggtggcgtggagcgtcgattgagggcaggcctgacctcgcctcctcca

SEQ ID NO: 25218 - DNA, 658 bp, Oryza sativa
tactggtgtgattatggtgaataagagcaacgatcggccttcggccaacaggatgtaaggttattacctgacaattcaggggcccgaacctgtataaaaatccctgtctatctcttttacctcaatctcgcgtatatcctagtaccaacgatccccatactatgcaaataccggaatcgcgacatcaaacgttgacacatatcataccatctcaagaagaattgaagcgtcgagcttattgtaaatgtcatgattctcattctcattctactaatgattgcaatgtgtttcgacgacaggttcaatcggccatagatgaaggacaattgaagttcactgatggttccaagatgaagcttgatcatgatcctttttcggtgaatacaattaatttcaatgataagaaggtgttgattcggccggagcaagccgaatctactaaaggaaagggagtgatcattggtgaacctaggccaaagatgatagtgccaaagaaactggaggttggtgtatggaaggagaataggagtgaggcttcaacttctaaagcacctaggaagactaaagtgactttggacatgcttttggagaagtatgagaagcaaggtggtgagagaactcgcaacaaaggaaaaagaccaagatcacctcctaggga

SEQ ID NO: 25219 - DNA, 1657 bp, Oryza sativa
aggtgattaccatcaaagtgggatctcatgatatgccaataccttctggagatggagttgggaagtcatcaagcaacaaatccgaaattgggaccagctcatcgcagttggccggtctaaccaggccctctggccggtctgaccgtagctctgcggaccggtcagaccgggccatcaggccggtctgaccaccgacccaatgtcggtctgaccggcgcttctagccggtctgaccggtggtctacgtccggtttgaccgggcttcaacgccggtttgacaggaggtttgaaaggagtagtgcaggggcttcattgtcttcaagcaaaatcaatagggggcattatttacctcctggaacagagccgaaacctaggtggatccctaaggatttaacggctactcaaaggagaaggttgcagcatcttcgggcccaagagataagagagaaaaaggccgaagagcaaagagataagaggttcaatgaattgcgaccaccaccttttggaggcataaatccgtagagagggaagaaccggttgttgtagaggagaaagaagaacaatcggttgctaaagatgagtcatctccaaaggaggacatggatatcaacatggtgtgtatgttgcctatggagttttgtgctatggatgaagccgaggttgctcaattttcactaggtcctaaagatgcggtttttgagaagcccgatgaatcaaaccgtcatatgaagcctctctatttcaaaggtcatgttgatgggaagccagtctttaggatgctagtagatggaggtgtcgccgtgaacttaatgccgtattcattattcaagaagttggggcgtgaggataatgaattgaagaagaccaacatggttctcaatggcttcaatggtgaaccaatggaggcgaaaggtatcttttcggtggagctcaccgtgggaaacaacacactaccaaccgctttcttcatagtcgatgtgcaaggtaactacaatgttattttgggtcgttgttggatccatgccaattgttgtgtgccttctaccttgcatcaatgtttgattcaatgggacggcgatgatgttgagattgttaaaacggatacatcggccgaggttgcaatggccgatgctacatttgaatggcgtcatgggaatatccaatgcttatcggggagggatctttctagctatgatttcattagtatctccgatggcaaatttgtacttatctctgtaaagccggctagtgtagcacggctaggctatataaatttgtataatgagtaaagaagctaatttagagtggttgcaaaagagggtgcaagaatatcggtctacaaagaacgatattggtgaaactattgaagattttgatgaagtagagaagcttggacaagggtttacatcggccgatccattggaggaaatagacataggtgatggaacaaagccaaggccgaattttgtaaacaaaaatatgagagccgattataaggttaaaataatcgagctacttaaggagtatgtggattgctttggatgggagtatcatgaaatgccaggtcttagccggaagttgttgagcatcggcttccaatcaaaccaggttttaggccttataaacaaccacctcgtcgttttagggctgcaggaat

SEQ ID NO: 25220 - DNA, 743 bp, Oryza sativa
acggaggcggcggcgagcatgtcgcggatactcctccacatgatcgaggacggctgcaccggcgacggcggcgccgggatcactctccccaacgtcgccggcagcgccctcgccaaggtcatcgagtactgcaccaagcacgccatcgccgccgccgaaggtagcagcagcagccgcaaggcgaaggaggagctgaagaagttcgacgtggagttcatggaggtgggcatcgacatgctgtacgacctgatcatggcggccaacttcatgggcgtggagggccttctcagcctggcggcgcagcgcacggcggagctgatcaagggcaagtcgccggagcagatcagggagatgttcgggatcaagaacgaccacacgccggaggaggaggagcagatccgcaaggagtatgaatgggccttctaggctatcagggtttaaaattgtggaacgaaattccagttttatcggaggggaccccctccgatatgatattatttcggccgaaattttaattttttttctttctctttatgtactaaaaaagatgtccgtgcgttacaacaggtgaatgatattttaatcttattattgttatggtttggctagcgtgaaattcactgtggaaattcccttggatattttttttagaaaatcatgagctgtaattaggagtctgacattaatcattacgagtctgaccttaatctcaagttagtatgtaaatttttttaaaaaatatt

SEQ ID NO: 25221 - DNA, 711 bp, Oryza sativa
gcaaatagatcagcaattgtaaactttgtcaatgcaataagtagagcaattcctgcaatcattccaatcgcaaggaggccctgtagaaaccgaacaaaagttggcaaggcggttgacttcttcggagttgcagtaaaaagctgcagcacgatacagcaaaagattagcttagatgatgttgcccatataaattaaaatcacagaacaggtagagatattaagacttcaacgtaacaaaccttaaataggagcaccaaaacgagaagtacaatccatgagaagccataaacctatccaaaaaatgcattagatataatagaagatcagaaggatagatttgctagattgtagaagctataggaatccataccatgcagtcttttgtggtttataacactattgttcacataggaattttaaatcaggtgctccagacaaatgccaaaactaacaaaaaattctttttcagctaacatgaggcctcacagtaccaagtgtttcacattaacgaaaacacatgaatgttttttaggccaggaaagaagagctacagcatttaatactgcattcgacatgaatggaagaatgcaagatggaaaaagaatcaggcagacacgtgcttaactgcattttaacaaaggttttgatgtgacgaaatggtttgctaacatagcaattaaaaatttgcagtgcaaaacggggtgcaggaat

SEQ ID NO: 25222 - DNA, 628 bp, Oryza sativa
aaaagattcgggatttcaaagcgccgacatgcaagaaggaagtccaaaagttgctaggtaaggtgaattatttaagaagatttatttctaacttagcgggtaaaatcgatgcttttgttcctatactccgcttgaaaaaagaagccgattttacttggggggcaaaacaacaagaggcatttgaagggttgaagaagtatttatctactccacccgttgtgcgggcgcctaaagccggaaagcctttttggttgtatattgcttccgaggataaagtcattggtgctgttttgccgcaagaggaagatggcaaggagtatatcattacatatttcagctgccatcttttggatgccgaaacgaggtatgtctttatagagagactttgtctatacttatactatgcttgtaccaaattgaggcattacttgttatctagtacatgcatagttgcttgtcaagccgacattattaaacacatgttgcaatggccaattctaagtggaagaattggcaagtgggcatatgctttgattgagtatgatttggattatgaaccgttgaaatctatgacaggccaaattgtatgtgattttatagtagaccatcatgtagatattgcttatga

SEQ ID NO: 25223 - DNA, 846 bp, Oryza sativa
cgaaggcaagtcggcggtgaagtcgtagacacccaacaacagcggcataataggccagctgtgcaggcggagacaccagtcggcggcggacgaggcggccgctcggtgaagacgtagacgcccaacaacggcggcatagtaggccagccgtgcaggcggaagcaccagtcgacggtggcgaagacaagctaacggtgaagatgtagacgcccaacaacggtggcataataggccggccgtgcaggcggaagcaccagtcggcggtggcgaaggcaagccggcggtgaagtcgtagacgcccaacaacaacggaataataggccagccgtgcaggcggagacaccagtcggcgacggacgaggcggccggtcggtgaagacgtagacgcccaacaacagcggcataataggccagccgtgcaggcggtaacaccagtcggcggagacgaagacaagccggtggtgaagatgtagacacccaacaacggtggcataataggccggccgtgcaggcggaagcaccagtcggcagtggcgaaggcaagccggcggtgaagtcgtagacgcccaacaacaacggaataataggccagccgtgcaggcggagacaccagtcggcgacggacgaggcggccggtcggtgaagacgtagacgcccaacaacagcggcataataggccagccgtgcaggcggtgacaccagtcgggggagacgaaggccaaccggtggtgaaaatgtaaaccccccaccacggtggcataataggccggccgggcagcggaaacccccgttggcaattgttacaagccaaccggccggtaaattgttaaacgcccaacaacaggg

SEQ ID NO: 25224 - DNA, 910 bp, Oryza sativa
ttcagaagaaaataaaacggagctatgtcttttgcaaattaaacagcgagttctcaccacatacctaaggttcggggccagaaactcatgggtaacaacctcataaagctcacggagagctttggtaacaccacctgcacgatcagcagtttcatcgcgtatctaaaagatattcaatttaccacataagatttcttcatggtaaatttaccaaacagaaaaaataggaaataattaaacaagaaccaaggcacgatatctctctatttgcattttactccaaaataaagtgcaatagtctttaccagaagtcctgtcaaaccagtaagcctcgactggactaattgcagcttcttgagatttatggtcactaaaagtgaaccttgtgctatactttcattcagatcccgaaaaagcctttcaaccctgtacatgtatcaatagtatgcattggcattaagtaaagaaaacttgggggaaatacaacacaatattggtgtcagtatcagatatttcatctttcagtaggaaagcataccaacgctgcccttcaccatcaactaaagagtgaagaattctctctgcactgaaatagcattccttgacggcgtaggccatgtattcatctcttgatattctgtcccataactcatactgtgagtctttacaatctgaagcatagtcattcgccaacataatctacaaaagaaaaaaccaacagattcatagcaaccaataaaagaatatatatgcaaaaaagggatctatctagctaatttcaattaggataccttgctagtcagaagaaacaatggccactgtacaagtcttagattgccacagttacttggcatcataagcaaatccatttccctgaaagagaactttgcatgatactgaagcaaatggg

SEQ ID NO: 25225 - DNA, 939 bp, Oryza sativa
gtacactcaatgaagttcagtatgaaaaatgctggtccagcactaactaatattttaatggtaccaatgtctatcttcccatgatgaaaagctataatagttaggcactgcatcagaaaagagcacttttagcatcataaactgtattcagaaatgatacttggatttaagctatacatgtgtacaagtacgatatcaaaccactgacctggaacattaatattagaaaaatccaaaggcgatgaaaactacggtacaagtgcagaaaagtgcgatgctcaacaaagtttgtctttccagtctgtaaatataaaattaaaagcaaagttaagtgcacataaataaccataatgcaaacaagatatgtacaaattttcagtaaaataaatgtgtccatttccttctagtcattgccccagccttagtcatcggtaagacccaatattttacataactaagtttaatgcccgtaagtttgctatgggttaaaaatcctacttccatagcacagcaagcccttgtcacaaatcccaacacatgccacaccatatgttcttctatggtgactgaacgagctccgctttgacctctgttatgcctctacggccttgcactacctacatcttgccctcttttacaccgcgcacaacccactttggatccactgttagtggacagtgggagtgtagagcacaccatgttaccatcacaatcaccaagtgcatcttttaagtaataggcataaggataggttaggatgaagattgaacactgcatgtttacttaacagaatacatattcttttaatactctccttttcagtcaatagatacatacaactcctttttaatactgaggcttattgttctcactctacatattcattacatgattgcagtagggtacgtaagtgcccattttgtagcaacgactcctgtt

SEQ ID NO: 25226 - DNA, 773 bp, Oryza sativa
gatcaatctcggtgatttcatcgattcaatctccaatgtcattggctttgtcgtttcactagttagattgttctctaactgcagactaatctcctattacctttctttttcttgttttcacgcaccggctgagatcaagacgaagtcccggtgtgtcttctcgtcgcccagtacgatctgtataggtaccggcgtaaccttcatacgacacgggaacaattcatgtccatgggatcaacagcaattgagtgcttcacatgcagatcaactgatatgcacggcttaatatcaaaccctagcttgatatatgtattacacagttaagcatgtaatattttaaggctaatcaaattatatttgtttattttgcatgtatactggagcgatgcatggttggtcgcatgcccaggatggcaattgagatcaaaaaatcgttcattaacgagtgatgggatttggcagtgctgcggttcctgacctccttgtaatttatatatttagattaattactaacgcatattaatcttctcatgattttttattgcatgtatggccgtcggtgcaatgcttcctactgtaaccatgttgccgagaggggtacgccaggacatagtgcgtggctcgactactgatgttgatgatgcagcgttcgctcatgccacacacaacacctctaaggccggttggctgcaccaagcccatcatgtcaacaaaatcagagagacgaatctacatgcaaatcagcctcgcttacaccattggcctattatgtc

SEQ ID NO: 25227 - DNA, 1457 bp, Oryza sativa
gtgttggtctgtgagggcagtctatgacctatgaaagctatcagatataagcgggcccgggctgggggaaggggggacgttacaaaatggtatcagagcccgactctcgcggtttcacgggcgcgtgtgtcgcagttgcgcaggcatggtgcgcatggctggtgtagacccggagtggttacacagcatggcacatgcgctggcactggacacatggacgtggccaagagaggacgttcctggcctagggttgatcgacgggggcgtcgatctctcttaagggggtgagggtgtaacatcccggcctagggcttaataggattaatagaatactcatatcaacaagttgcaacttcttttccggaagccaatctccaaagaactccagggttaagcgtgctgggcctggagcaatttgggatgggtgaccgaccgggaacccgggtgcacatgagtgaggacaaagtgtgcagaaaagatatgtgttggtctgtgagggcagtctatgacctatgaaagctatcagatataagcgggcccggcctgggggaaggcgggacgttatatgacctatgaaagctatcagatataagcgggcccggcctgggggaaggcgggacgttacactgcctttgccgccgccgaccggtgtttccgcctgcacggctggtcttttatgccgccgttggtgggcatcttcgctttcaccgtcgaccgcctcgttcgccgctgactggtgtcctcgtctgcacggcttatgaagccgttgttgggcgcctacgtcttcaccgccggccgcctcgtctaccgctgactggtgtcctcgcttgcacggctggcctattatgccgccgttgttgggcgtctacgtcttcaccgtcggcctgcctttgccgccgccgaccggtgtttccgcctgcacggctggcctattacgccgccgttggtgggcatcttcgctttcaccgtcgacaacctcgttcgccgctgactggtgtcctcgcctgcacagctagcctattatgccgccgttgttgggcgtctacgtcttcacctccggcctgcctccgtctgctgccgactggtgtcctcgcctgcacggctggcctattatgccgccgttgttgggcgtctacgtcatcacggccggcctgcctttgccgccgccgaccggtgtttccgcctgcaccgctggcctattatgccgctgttgttaggtgtctacgtctttcaccgccggcctgcctttgccgccgtcgaccggtgtttccccctgcacggctggcctattatgccaccgttggtgggcatcttcgctttcaccgtcgaccgcctcattcgccgctgactggtgtcctcgcctgcacggctggcctattatgaagccgttgttgggcgcctacgtcttcaccgaccggctgcctcgtccaccgccgactggtgtctccgcctgcacg

SEQ ID NO: 25228 - DNA, 1284 bp, Oryza sativa
accgctgactggggcttccgcctgcacggccagcctattatgccgccattgttgggggtctacgacttcaccgccggcttgccttggtccgccgccgactggtgtctccgcctgcacgggtggcctattatgccgccgtcgttagacatctacatcttcaccgaccgaccacctcgtatgacgccaactggtgctatcgtcttcacggctggccacgtcgccgccaccgctaataggcgtcgttatcttcaacacaagttgtctgcgtctgctgccgactggtttcttcacttccatggctgcatgattatgatactattgattggccttatagtcttcaccgccagtcgtcttgtctactgattgactggtgtcctcgcctctacggctggtttataccgctaccactactgatggacgtcatcgtcttcattgctggctgccttgtctgacgccgactggtttgttgcctccacagctacatgtcttcgtcaacattgactggtgtcatcgtcatcaccagtttgcctttgccgccgcccatggcgtcttcactttcatggctggcctattttgccgcggttaaagaacgtctttgttttcatcatcactctacttcttcgagcaacttcatctttattatcttcggcaccggcaaactctattgcctttacttcgcaagctttggtatttcgccgaccacgacgtctacaagagcctcaacatctcggcatgcgtcaacaagtataatgccgtgttattttactataacaagtggtgttccaatattcaagatttttactcggacatcttctatgcgtatcttcactcaagcaatgactactcgacgacaagaagctacaattctcgactctatgttcagttgtttctcaactaaccaaagagtcgggggctacacaaatacaagactctcaaaattcgacaagctttatgtcaagatgaagcaatcaatcaatcagccaacgagttctatggaatctacttcgggagtcatcagtttggtcttcacttcagagcagacgttctacttcagcaactcttattattacaccggcaattttggcttcttcacgccgccacaatctgctccaaatttttccaagtatcaaagtttgagattctatctacatgtccgggagtttagagttatcaaccaatcagtcagttttgatgagttggataacagtatttacttttcttcaagtgaagcatttgcaacagctacaactccaagttttactaccatctttacaaatcaagggg

SEQ ID NO: 25229 - DNA, 622 bp, Oryza sativa
attcctgcacccccacaccgctcattgtcagtgatgctggctttaaagtgccatggtataaatccgttgagaagctgggttgtactggttaagtcgagtaagaggaaaagtacaatatgcagacctaggagcggaaaactggaaacctatcagcaacttacatgatatgtcatctagtcactcaaagactttaggctataagaggctgactaaaagcaatccaatctcatgccaaattctattgtataaatctcgctctaaaggccgaaaaaatcagcgctcgacacggactcattgtcaccacccgtcacctaaaatctactcagcgtcggcaaaggagccatggattctagcaactaacttacctgttgaaattcgaacacccaaacaacttgttaatatctattcgaagcgaatgcagattgaagaaaccttccgagacttgaaaagtcctgcctacggactaggcctacgccatagccgaacgagcagctcagagcgttttgatatcatgctgctaatcgccctgatgcttcaactaacatgttggcttgcgggcgttcatgctcagaaacaaggttgggacaagcacttgcaggctaacacagtcagaaatcgaaac

SEQ ID NO: 25230 - DNA, 1342 bp, Oryza sativa
catacaaaataccaaccagcatatatatcttcacttatattaatcaccccggatgctttgcttatgccacctctggttatatgaaatatgcgatcaaaaacatcaggatgtccataatgcattcgaaccctgtaataagaacaataaaacacaattaagttccttggttaaaaccattgtcacaggtttgttgcgggggaaaaaagagaatgtggtaagaatgagatattattccctgcaactagctaaatttgactcacttgaggtaagcaagaacacgttgccccaaagtaacaaaacttgtttcctggttagacataaatgatgcaagcgaagaaacactgcagcaggaataaaatataataggttaatacaaaaataaaagcaaaaccaaaagctagtgaataactgagagtagtcatagtaaggataccttcccgtgaacacatgttccctaacaccaagaattgttggagggcggattccatgcttaccacgaaactcttcaagtaaattcctcattttcattgcttcctctaagtagttatcctacaggagaaattttatcagccaaggatccaagatggtttctggtgcacagacaccttttcgaaaaagaggggagtgccaagtatatttcatctacgtagagcaagtataaactaatgtattgcatggaccaatggacaagataaggtagatgggtcagaatatgaccccatgttatttctccatatgagcctgggtcaatgatcctcacatctcttttgaatctaatctgcatgtcacatgttagcacctaaagatgtcctctacctcactcaatgaggtattgagtgtaaattccccgtggcccctggtttgtacacaatggatacctttctccagtgattttgttaatacttccatcacaaagaaaaaaacaagaactcatcttcatgtttagttgtttacaccaatttaccaagcatgaagaggacctatcaccgtcagaatcatggttaataacagcatgaattgtgaataatccaaatggcaagcagcgtactacatgagcatatttttagaatctatctcatagaattacacataagaatctagacaagctcgacatttcatgaggaatatatcaacaaaaaggataatgctactgtttttttgccgggtcggccaaaagatttggtcgacctaatttcattaaggaaaaggggagtggacaaggctactgttaatgataatgataagaagaaaacctgattcatgtcaattgtctgtattgcatctcctcgagtgaatataatagcagggtgctgattttcaggttttccctcgccgagcttgg

SEQ ID NO: 25231 - DNA, 1083 bp, Oryza sativa
caccgccgccgccacgcgcttcttcggcgtcgcgtcaccaccgacccgctgccctgcgccaccaccgagcgccgccccaccacccccgccggcactgtgcggcagcacctccagccgccccagctattaggcagcacatggcatggaaacgtagtaatccttcacaagaacatgccatgttttccatgttccatagctagctaagctttttagctttagcagcagcatggtgagtgagtgacaagattcatcggcatggtagcatctagcgatgcatgcaaagctactaacacagtgatgtttgtgtagccacagcgccacagatcgtgcagtggggccgtcgagttggggcggcgggggcgcacagtggcgccgccggcactcggcggggtggtggcgctcggcggttggggcggagtggcgtcgagtcagctgcggcggcggcagcgctcggcggttggggcggcgagctcgcctccccttcttctctttctactacaccataaatttttttaaaaaaataaagttagaaaaatttatgtatagaaatattatatataaaaatattgaattcaaattcaaattttaattggatatataaacttttgacttataaatattcgctatacaaactttagatgtgtaaaatttaggtgtataaacttaataaaagaggaaaagaaaaaaaaaacgatcgccgctagcgatcaatagctcagtaggactttcgaacaatttctccgtgcaaatcggttgctagcttgcttgacagttaatgtcatctatggcggcggcagaagagaagaagaagaagaagatgatcaaggtgatgagctccgacggggagaccttcgagatgacggaggcggcggcgagcatgtcgcggatactctcctccacatgatcgaggacggctgcgccgacggcggcgccggcatccctctccaagatcatcgagtactgcaccaagcacgccgccgtcgaaggccgcagcacggcggcggcggagctgaagaggttcgacgaggagttgatcgacgtggacacggacacgctgtaccacctgctgatggcggggaactt

SEQ ID NO: 25232 - DNA, 754 bp, Oryza sativa
tttagggtagacgtgtcacgctatatgagtgtacgccgatttttcataactttcatatacctaaatcaaatggttgagacgattattagtaaaagtttagtaataaaaaaaattagtccgtgtagcagtgctcagtaaatgaatgcaaactgtgaaagccgtggaaggggtcgttctccggcgatggctccggcgacggctctggctccggcggcttgtccttgtccttgatgagctccgccgtgcgctgcgcggccacgctgagcatgttctccacgcccatcgagctggcctccagcctgagtatgtccgtctcctcctcatcgtcgctggactcgccatcatctaatacttcctcttccttaccttcagcttcgccggcggcgtgcttggcgcagtactcgaccatctcagcgaggggtttggcggcggcgcagccgtcctcgatcagttgccgcaacaggctcgccgccctctccgccattgatgatatctccccgtcggagctcatcatcttgttgatatcttcttccgccattgatgacgacaactgtccagcgagctagcgaccggtttgcacggagaaatcaattaatggcatgaaaccgatctaatccgagtctaatttcaatgcgaactgttgcgatgaatccgtttttgaaacatgcacacgggtgcagttgagggatttgatctttcttttttttttgcggggagtggatttgatctgatcgagaggggtttatgtaaatct

SEQ ID NO: 25233 - DNA, 2799 bp, Oryza sativa
attcctgcagccctgatattttcccgtcggagctcatcatcttgttgatatcgtcttccgccattgatgacgacaactgtcagcgagctagcgaccggtttgcacggagaaatcaattagtaatatgctttgtcgatcatctattttattagtatatattaattaattgcatgaaaccgatctaatccgagtctaatttcaacttattacgaaatcgtaaaccaactgttgcgatgaatccgtttctgaaacatgcacacgcgtgcagttgagtggatttgctctgatccagaggggtttgttggcaacttttcgtaaaaagtcgacaagcacgatcgcagcaactaaacgacttgcggtgatatggagtcgccaaccacctcgatctagccaaaagctagaccaagatgggttttgataactaaatcggctagcggagccgatttctagataactacccgtctcgtgggcaaaacggaaggttttcaggacaaacctataaaggggtgtcgcactctcgcagcggcggcggacgatttacagcgcaaattgacaaagatggataaactaagagaaaattaaaagcaatatgaaaaacgattcgattgattgattgtagattgattagttacaattgaaccggccatgtcccttatataggggttggtcttgccctctacaggccctcctccacgtccaactcggggtagaaatcaaatgaaacccgaaacatgccttcccgagcaaggaaacctcgagacccgacgaaacacagtcggactcggacctgccggtcagaccggccacatgccgccggtctgaccagccctaaaccggcggtctgaccgcccaacgcacggcggtcagactggccctactcggaggaaaccggcagacttccaaattttggcaattttttctatttaatctttaggtgccaaatttgggtgtaaacacatgccccccctaccttttttatgaacaacgtgaatccaaaagcatagaacatgtttttggtcttagggcgataatccaattactggccatagcacctcctaagcgtcttgccaaacgctcgggaagtatttcttcaagtatttcccgttgattgctcgctgaaaaggctccccttgaagtgtctccaaaaaatatgcgttccctcgaacaatgccgcatattcgataaggaccttccctactaggagaccacttaccgaatttccaaaaaatatgccgcatattcgataaggatgccgatacaaatttccagtatcttttggtttgaacccaacctgctccctcattacatcggcaatcatatcagcccatgatgtttgctgaggtactccttgtgtttgttgctgcattagctcaaactgattgaactgaggagcaaactgaggttgaggcgatcctgcctgctgatactaaacatgaggtgacagaggctgatattgataattcaaatttcttccttgatagttctagaagttcggttgaatattacgtaccaaatgttcagggataatctgaggcacaactgattgatcggcctgtacatgatggaccaagtgttcagaataacttggttcacagtatgctgcattggccgattgtcaagtgttctcaatctcgctgacgcatgttgtaagttttgctgctgagtcggatgaactgtctgctacctcggctgtgcttgctgagtcggcaacggctgtgttgggtcggctattgtcggatttggcaagaacattgcagcaacttgctcctgagtcagccgattgacattttgcccagcatgttgtggttgttctctggtcaacaatctggggttaaccatctgtcttggtgctgattgtcacgcccagaaatttagcccaaatttccagactattttgtgtattaaatccctgtccaggaccagccagggtacacaaaacgacaagtaatatacagttccaaacgtaaataaagcgtaaaatacttacagaagaggcacttagtcctcacaccgaaacaaaagcagcagcagcggaaaaaggcgatcctagcggggcttcagctccactccacaggcaaaactcaactggggtctgagccttggtcttccaacttcgtcttcagctcagaagcactacacttctgaaaagggggaataatagcaaggctgagtacaaccaccgtactcagcaagccacaccaacgatgcggacgtgcaaggggatacaaggaggggtttgtggctatttgcataaaggcggttgtaaaacattttatttagcaaacagtaaaactgttgaataattaaagtgacattaaaatctccactgatcaacgctacaccacgttgaacaggcccaaccaacccacctgtactacagtgcattgggtcgatttattaagtgtgagactaatcacggtgaatctggtcgatcgcccataaccgcgggcacggctattcgaatagttttactctggccagaggtgcacaactgtacccacaagacacaacccaccgacatgtcaccgcgtcatcatgtgcccatgatgcacacgtcaccgtgtcgagtgattgtgacgagacccttcgcataaccctcccctaaccatccacaccacgctaaggtttcacccccacccctcaaaaggcagtgggcggtcccctcttgcgccgcggtgaatccggcagctggacaaccggacaccccggccgacccaattccatcacgcccaccttggccacgggggctaaggaaagggtcaagtatacttcagatcaagcagttacccactcccggct

SEQ ID NO: 25234 - DNA, 523 bp, Oryza sativa
agaggctcaattttagatgaattttgcaagttgaatggctcaattcggaattcgaatgaattagatatgaattttggaagttttgagccattttaatggatttctagaattattaccgatttattgcgcaatttaaatcaattatgacgtcatccgacgggggagaggtggcgccggcaagcgggccccacctgtcggtgactcacgggtggcgggcacaccgtggaccgagtccacgcacgcgctggtccgcgggcgcaccacgtggcagacacctggcggccacgacggacggctagcggaggtggcgccgacgtggcgccacagaggcaccgactcgggcggcacgggagggccacgtggacggcccagatcgccccgaagggggatcgggcggccacgggcgaacgggaaccggctgaccgatcggccggccgggaacgacgggcaacgccccaatgttcccggccaccgaccccgggcgcgacagcacgcgcggaaggcgacgaaaagggctgcagga

SEQ ID NO: 25235 - DNA, 887 bp, Oryza sativa
ttaaagtattaactaatactccagactgattgatcaggcatgttgcacggcatagtcgatcctatcttgaaaattattgaattgcagtggctcttggttgccatctgcaccaggtcttcaactgtaccatcttgaggaatatcacttttgttacctgagccagttgcagtacctttgtcaccctgagatgaacttgggctgacctcatcggctgcgaccaccttcaacttgtacttttgtacgatggttcctctgcgggtctcctgaaaagaatccatgaatttgttcttcacgttgctcatcatctgttcaagttcatccctttgctcagctgtcagcctatccaatgtgattggaacaatattggttgggtccacttcagctgatggatttttggcccccattttatttacgggaggtttgactcctgttcccggtgatggtggtggtttttcggccatcgggatgaagtcgttgaaaactcaggtcccaccgggcgtgccaagagagtgttgatgtaaaaacacgaggcctgggagatctgcttaactctagtgcaggtccaaaatcttgcctttgaggttcatgagcatgccagttgatttgatcctgcaatcaacaagaaataaagacaaagaaatagtagttagtccataaatgatagccgatcgaccagccgccgatgacgtatcatttgtactcgagccgatgtcatctttgcatcgatcggctgtgcgaggcaataataaagaaactaaatctattcaatcggctgtagatatcaatgataaataatcttcatgtcgatatatacttaaatcaagtaattgggatagatcggtcgccatgccgagacagtataaatcccttagaccgaaatatatatt

SEQ ID NO: 25236 - DNA, 670 bp, Oryza sativa
ccaaacttatctgtaaggaaattacataaaatatcctaattaatagatacaattgccttcttaaaactctatccatgtgtggcaatccatgtgaagcacattaactcagctcgataatgtaaaccgattcatattgtcggaatcggctgtatcggctaaccctatctgacttggactcagccgatctggtcgtagccgatctggactcttctgttccctgggcacaaatgtccgaattcacagctaattcggtctttgaatcaattgcggcgtgccccccatcgctctgtccagaatcggtcagaccagccatacaagaccgatcagaccgcccggggtggctggtcagactggtggcatgtggccgatcaaaccgcccctgctcaccggtcagaccggccgtgcaacgccggtcagaccgcccctggtctccagttttgccaattttgcacaaaggtttaaaaatcaagcaccggctcttctagtatcagaaataatcccttcttcacattatagccagatgcttgttgtgccaaatcatttgctctagaattatcgaaattagcaataatgtccaagcatgaatcaagatacctatttagtgatccgtccaaacatttgtagattccggcgacttgttgcaccaccaattcgaatcaccaaaagcttc

SEQ ID NO: 25237 - DNA, 26020 bp, Oryza sativa
tgtatgcacatatcaattatctatcagcactcatgccaccatatgaaatatcacaatctctagtaagtaaggctgtccttacatatcacagagcaatcttggaaagtaataagcaaactacagtacattactaaaatatcaattcagttttctggtcgaatctcagaacgtttctgcttagaaaatctaatctctcccctaatacattggaggggaaatctgttctgtgctgcctactgaaaggcagaattattttaagccaatctcattgtcatccaaagtactacatctaatgaagtgacaatataattgaagaaccaaagcaggggacatacttgtagacgaacaacttgggtgaaatgagagagcttccatgcttataggcaacatatggaaactgatctgtaatctcctacaataaagaaaatgatttactctgtaccgatcgaccgtggatgagatcggcgaggcgggcgcttcggtggcacaggtcggtggcatgcgtcgctggaatggcgaggaggatgaggagttgtacgagtcgctggatcgtcgtgctcgttcacgtccgcctccgatgacgacgtgaccactgaccagcagcaccggcggcggcggccgcagcagctgtgtcgtcgtacgtccgcgacgttctccgcctacgaggtctggatctctgagccgacctccgtcgaggagcgccaccgcgtgctgctgcgtcggctcggcctcatctccgactccgatccccgtccgtctccacgcctatcctcccctcgtttggtggcgttgattcaatggaatgaggatgtaagggcttgtttggcctggagctggagctcagccaaacagtttcagctccactaaaactgggagtgaagttgggtgaagctctctcacaaaatgtactagagttgtggagctgcgtcactttagactcaactcctggagttatatttaggagttggagctgtaccaaacaggccttaaagatcagttagttggtgaattattatagggtacgtccacctattaggcagccactcagtgaaatcatttggctttttcgtacagctatttttggctatggctgcagatgtaagaaccgaacaggcccattttctgtcctcaccagttgccaacgaaatggctgactcagggcagtggtcggcctcccagccgaaaagccctccagacctcctgtgtggcatgccggccttcaccgccgccgtcggcctccacccccgacggccaagacacaagtgctgccaatgcctgaatccgattatattcgtcattggtttcgtgagtttgtgtacgatttgatctttctgactcgatttaccatcgattttctttctggattcctcaagattgaagattcgtatcggattttgtcttgagcaatagttgttgccgttcttatttgagcaataaattgttgcgcatcttattagagcaataaagttgttgcagatttttttaaaacatatggacggtgtctttcctttatcttcctttttaacctaacttcatctcaaacacttcttctattcctccctatcgatcttctcacacatgcgcggctgatcggcagccctagcacacaaggaggcacctgttccattccagtggtctcctcccggccctcttctggctctgacgcctgccctgcaggaattccccccacactgttgttctctctagcatcgcttacggagagacttaaggaaacttattcatatttccagaattccaggtatgtatgtatgtatgtagtgtctaacttctatgttattactggaattagagcataaaccttgccgttaatgacacagagccgattagattaaattagatagaatttggtaatctacgtgatccttatgtcaatcatactgtcattggaagtttagtgccggcaatactgttagattaagcttaattactgtgcttagccaccagaccaacgcatgcaacagtactatataagtatttaattaccatgtttgatgcaagctaaatcaaatgcttacaaccattgtgattataacctgaaccattatattttccttttaggataattcaggattcatagtctaaactgttaagaatacaggaccatctatgtaatcttgggagattgttttcctctcctaaatcaaaacttgacctaaattttagtctccatggtaaatgttatacggagtttgcatgtatctgtgcacacttattatacattgttatacctaaacaagaacaataaaacttataaatctgccactgtttgaactgttcaacaatttctgtatgttcatagacgtacatttagcctttgttttactaaaaatacattcacacttaaatattgctcgacaccaaaactatcacggcaccaaaattgaaataatgtttatagatacagcttgtgaaacatcgctagcatcctgaaactgaaatcaaatagagtaccactgaatgtttggttttaaattgagcatgttacttactatttaacaacttaatgataataagtgattagaaaataatattttctttgtaggataatgtcagactctacggccatggacaaaagctggatggacttatctaataggagtcttcctgaatatcagcaaggagttgaccaatttattcagtttgctttcaaagattacaatgcagacaaattcctccgatgcccatacagaaagtgcaaaaacaatcacttctttgatcagaataatataaaggaacatctctttatccatggagtgcagaaagactacaaattatgggtctatcatggataaaacgtcccagattcagaagacagtggcaatattgatatggatgaaaattatgataactatggtatggatcagatgatgaatgattttggagaacctatggttgtgaatatgggatcactgggtggctcaacacctggtttgaatgatgacatggataactctacagtaactaacgaagaaactaacaaattctacagacttctagaagatgcagagcaagagttatatccagggtgtggtaccttttcgacactagcatttattgtacaaatgttaaatatcaaatacctctatgatctagtgcaaatgcaatggaggctctattttccatgttatgcaaggcatttcctagtagcagtaatgtgcctaagtcatatagtgatgcaaagaagactatgacagatcttggattggattacacaaagatcgatgcttgtttgaatgattgcatcctatatagaggggcttatgataaggctgattcttgtcctgtttgtggcatttcaagatggaaaaatgaagggcataataatgtctctaaatcaaggaggagaagagtgaagaaagtcccatagaaggtattgcgatacttcccattggtaccgaggttaaaacggatgtacttgtctacaaaacttgcaacacatatgcgatggcacaaggagaagttagtagatgatggatataagagacatcctgctaattcaaaagaatggaaggacttcgatgggaaattttcttcatttgcattggacgcacggaacatccgacttggtcttgctagtgatggatttaacccatttggaaatatgagttcttcatatagcatctggactgtagttcttgttatatataacttgccaccttggatgtgcatgaaagatccatatatggtgatgtctatgataattcttggcccaaaagcacctggtaatgacattgatgtatacttgtagccatatgcttccacaaagcagacttttaatttacgtgctgctttgctttggacaattaatgattttccagcatttgaaaacttgtcaggcattagcacaaaaggtaaatatgcatgtccttcatgccacactgaaacctgctaccacagacttgttaatgggcacaaatattgttatatgggacatcgccgcttcttgccgaggcgacatgtctggaggaacaatgatgcttcttttgatggccaaaaggaaaagcgaagtgctccaaaaccattgtcagaagatgatattatttctcagtatgagaaattcgaacaggttattgcttccatcttattattgaatctttttgtgtgatgcttctaaattaaaaaaaatcaaactatgcatgtgacatgataatactataaggcataacctttttttagaactatgactaaccatatgaatttggatttaccaccttactattgctgccacatgtttatttcaggtgaagtttgggaaatcagggaagaaaaggaaacactctagtacattgtatggtacttgaaggaaaaagagtactttttttttccaactcccatattggagcaagctgactataaggctgtaacggactcaaaatttcaggaaaatattttgcgaaatattttaagttatgctcttctcgattcttgcattagagtgatcttacttttaatcttttcttttattttggacttaaactttatttgcaaagttaatcgctatcttttaaattttacaaaagctctctatttattttatttaatctctaactttgactctaaatacatttcctttgaacccattcccgaacatctccaacacccacaaatatcctttcgattcccgctcagctatctccagaacacatgaaatgccattttctaacctccctagagtacatgaaatgttgatacctttcctttgaatctccacctaaatatctctagagtcacaaaaatatccttttcaatccccctttgagtcaatatacctatcctctagagtttatcaagctaccaccaattccgttcccgtagaaattcccatccacatatacttccgaatccagttctatactccaataaatatttcctctttgaaatctcattcatctaaattatccactcaagatttcaaagtctactatttagcttgggccaatatttccctgattgacccaactctctgttatatcccattaaccatttttatttttggggctaaaccagtataacttcctttttattggaatttattttggatcaaactcctatctagacctatcattagaaatccccattttatccttcatacaatacctaccacaaactcctctagaagatcaactattcaaattcttctatttaattatgaatcaagccgccaatttgattcctatggcttgatcacacccttagcacaagaacgatattatcacgaatatttgaatgattgctcttgtgctaagaacactatttccaattttttccttagaaagtctaacttcccttagccacaaatactaaaccaagaatccataccccatatcttggaggtcaaaatcctagttatttgcctccatctatttttgctaccatttcaaatttatccaaagttagaaattaaattattgcctttccttccctttttgattattctaatttttaatttttaaatattaaagaaaaacttccgtgccaagtcttatgtttgattcttattgaattctataaaattggagcacttttacccatttcaaatttttccaccaaattttatctcaaaataaatatccttgattttatttaaaatattttcaaactccttttgttttaaaaacctttcatttaatttttttataaaaaaaccctccatacaaaattttcttaggttccatttcccttgatttctatttgatttctttgtccaaagtccaaaaaggtccacatccatccatccatcctttgattttcatctcctttaaattttattcaaattccatgttcaagttcaaaaatcccaaaactttcattctttcatctcctttgaattccgttcaaaactctccacacaaaaatattaaaccttcctaatcaattcgggccgaaattcccttcttttcggcccattccttttcctcctctctcccttccactcactccttcttgggctgccggcccaactgagccgaagcccagccgagccggcccaaccagccgcctctctcttcctcccctgtgggcgccgccactggcgccatgggcacgccgccgcccacggcatcgcgccgtcgccacggtcctgccgccgctgcagctgttttgcctagctggagcgtcgtgccgtactcctccacctccaccgcccaacgctgccacggccgccgcgtgtgcgcgccgcccttttcggccaatggaagaacgaagccggcgccgtcgtccacttccccacgctgccgccaccataaccaagtatcccttctcctctccgaaccgacctccgcggtcgccctttccccctccacagccgagctctctaaactctctttctctctttcctgccatgccggccaccacctcgccaccggccgatctccctcaccggagctccgctggccaaatccttgcgccatccgggcttgcctcgccgaggtgaaccaatttttcctatttcccctttccttccaccctaaatcgagccaccaccggagctttctctctcctggccggaccaatctttatcctcgccattccggcctcctccctcgcttccctcgctggccgacctcctcttcgggtgagcaacaagcgggaacaccacccgccgctggcgtcgccacctctcggccaccggagcgccgtcaccttgctcgcgcttctctctctcttctctcggcttcctgtgagacagaggaaaagaagacgaggaggagaaaaggaggaagaaggaaggctatgacaagtgggccccactgcatactaatccctttcctttttgtttcaatttcaatctctatagacacccatatttctcaaatcatagatccaattctagtaaattctttatctaaattcatctaatttcaaactctttattttgataccaaattttctatttttaaattttatttaaattttctcatttaaatccctttttattcatttatttatttacatttcgaatttaaaatttattttaattaaccttttttaattattctattttattcaaatacctttaaatttaaatttctgtgttatttaaaaacccttttttaaaaaactaaatttttcctttaatttatttaaacaccttttatttattcatttcaaataccattttaaattttatttctttaaaaacccattttgaattcaatttcctttgatctatttatttccttttatttctaaaaccttcaattatttcttttgctaatccaatagccactaaacagttgtcgtgcaaactttacgcttccatgagacattcgtgtagtctacaaaccccgacgtcgaatcgttgatcgtaaaacacggcataacctagttccaaggtcaaagtgttgcccttcacaccgcatgcctcgacgcgtacagtgattgaagcctcactactctcccgacctccacagcacactagtccttggactatgtgcaatcctagccgctttgctgtcactcacagctttagagtagcactttccatcttgcaaacccacacgaatttttcccaactctctagtcattgcgctgtatcatcgactaaataagccaaatatttagccgtaatgttgcttatccttagcatcggctaaccaactccaaatatctagccattgtgctactctattctagcatcgactataaaccaaaaccaccaaataaaccctacctacccaatctctctttttcctcaactttatttgaaacccaacctttagaaaccaaaacccctctcttttgttttccaaactaaaatttcttttgacccaactcctttttccttcgccttgctccaattttctttatttcttggtttatcgtttctttgtagcaatttgcttataggctctatttgctatctttttcgtattcgtacgttagaccgtacagcaaattctatcgacatccaaggagctgacgtggactcagatgattacgctaaagccgcgggaaatcttaaggcgcaaggcaagacataactaaaattttgatcatatagaaaacttaatataactgtcattttatgcatgaaatattactctttagatattaaatactttcaagcatttttgcatgagattatagaatgatgctttagtcatcattttatgtggttcactattccaaatatctttacaaacttaggaatccggttaaaatgggctttttgaagtgtgatttatgaagttggtatggaagttttgggatgttgagatattttggtggtttaaccggattataattatccccttataccatagaaatgacatagttacgcccatccacacgaccaagtaattggacttagcctagtacattgtcctactatatgaaagattgttgggtggcttattaggagcaggttttgtggtgaatcatgcgtaaggtgtttgggtggcatgaatcacaacagtgggcttcatgaaagtgtgacgatatagataccttgcctaggcctggcaagagtttgaccactatgatgaaccaagaccccactgtgcagtaactagtggtaaatgggactctcgaacggctatggtgtttacaacctcgcgaattgttctcatcgtgtgggtaaagctgggcagacattgcagacgtattcgaatacaccatgctcccggtcaaggagatatgtcataagggttattcctactccaaaagtataagtagttttgaaaatctaaaatgttgagacttctccagaattggcctagatttaggagagggtttttaattacttttccatttaaattaatcattgcatatgatcttttccattaaaacgcttcaaatgctccaataattccaataaaaatcctcataatacttgatcactcaaagtatttaaaacaaattataaccagatcatttaatgattaatttgtatttaaataattactcgtatgttcttttgtatcttacaaattaacaattgagctctgaaaaatccgagaattttcagagtataattaatcatggagaatgtaataataaataaatcaagccattttttatttaggaagttttatttcccacatttaatatcacttgtaaatgtgggaatatttaatataaattctaggaataatttattaaataattttattaatccctggaactaaaatcagggtgtgacatctactgaaagagggcgcatgctaaatctaacaacccctatgataaacaatggattaaaaatatggcatgcaagtacctaacatatgacatgagaacgtttatttagctattctatgcaatggttattgcaagctattacccaatcttcctatcgcacatctacagatttatctcccaattaatataaaagaaacacactggtaccttgccgttcttaacgccaagcaacgtgaagtgcaaatactcgattcgctagccatatatcccaatcagtgaagatcgacccgatctaaggcgtgtggtgagcgatacacttcgatccacttgtacaattcaaatcgagttcgtcgtgttttaacaaacctgacattacaatcacttcccagctggtagctatccagagaggattacaggggacaaaaaaatcagcacccataattacaacatgactggcctaatttcaatattacctcatgggaatacagcgaagtccagcaattgccaaagcaaggagactacgtgggttactcctaaactcttccacatgctattcatattatttaattattgtaatgtgttaacctaacgcctcaatttttctaacgcctcatgtggcctatatatccttgagttcatggagcattggagcggatcttatctcccaccaattcaaattcatgcaactaaaaccaactctattcatattttgcaccaatgcttcccattatgaaaatcatttaaaatgttctccctttacattatgcagcaagatattaaaacatttcaacaagacttagcaggaattttgatcaagttcaaactgaacaatattaaagactgtccactgctacaaaccacaatataaatggaatattgtccaacatttaccatactatgccctcttttgttcaccaactgaggcccttattaacaaatttagttacttcttgagtatttgactgttcccaaacattgttgccttttgagttaatttttatagttgagatttttatttcctctagttactgcacaaaacacttctttaaggaattgtatttttaaaaacaaaaattcagttggtttaacaatttttactaatatctgtacccattttctcctgattaagctgtgttggggtaacacacacatgtaaacacacaaagaaagccgatggaatagaaagccacaacaatccgataaccaaataacaatgtgtacacaaaaaattgtaacgaccattattcagtggcatcattacagggcatagctaaataacccgattttatgaaaaaaaaattgtgcaggacatattgagaccttagtttgacaagctgtgtattctacaatattctacaattgcaaatcaaacaccaatgcaaactaaatgatctagtttgtggcaaaccataatatcgttcacgccgcccacgctgaaactaccgaaaaacacttgcatgtgtctatgtgtccaaatttatagtattaggatatatcatatcatgtattaagtgtatttacttggacaaagggaatgaaatgtattagtgcctgaatccaagctatctaacataaatagcaagtgcagtaaactaaaacggattagtgatttgcattcgtagaactatgtggcttggcaagcatttcaccgattaggtatgtatgtaagataagtaaaaggcagtgtatttttagaaactataaatctattaaggttttgcgttcataaaaaataattagattggtgggtaactaataattccatataaacagtactatagatgcatcaacaatgggttgcttatacattgggtgataagtgataacacaccaatctatccacagacaaggtcaacaatgtgttgtttatacagtttggcatgaaactacatcgtggggaaaaaatgggtccaatagcaactaagtgaattagatcaacgcgaaggaaaagtataattgacaaaataaaaaaatagtaatcttacataaattagttgagcaaactaaagaaatgcatttataaacaccgcaacattagttaaatgaacatattgtgagtttgtaaccagtgctacagcagtacatatctctactctaaggctgtaaaattcaatgcacaaatgtttttactctgctcaatataacaccaactcttgctggctcagttttttttaaaaaaaatatatagctagattacatttaccaaaccattggtttgaattacttgctgctaacgacatagattacgtactctcagcttctacatagcatctatcatctcaaatccaacctagtgtaaatacagtaattacaagtttgcagcagtgaaatttcgcaatatactactagtactatctacacaaataaaactggacccacattgaaatctccaattgaattaagaagccattttttttcttgagggaaggaagcccctacagtttaatatattgaaaaaataaaaggtagaaaattacaacagattaatccaatgatcaaacaaattaagcctatggagtaaaagggagataccattcttaaagagaactctccaagagaaaagagaaggagcgatattataaaaaattaaaccatttcttttctcccagatattccaagtaacataaagcaccttctcaacaaagtgtaaagacctataggtatttttggccgtaatcaacatttctccaaatttaaggacaaatcccaaaccacaccaaattgcgcctatcattcaaagctgaaaggacataaatagtatattaaaacaaacaatacacacccacattcaaatccagttgcacaacttacaaataaaagagagaaataatatatcgcgaactatctcaaacactcacagacttatagagacgagactccaagacagagactctagatgaacctaatgtaacaaccacgtaggcacgcatggttgcatcttgaaaagtctaaattaacaaccgaaaaaattaataactaacgcatcctcaactggtcacgtcttgtgattagcccaggaacaagttggttgcatagctcttcgtaggtggagaagagcaccctatccttggcaccggtgcgatgccggttggtgtgcgcgcagaaatacttgagctgatcaagtgtgcacaaacccagtgtctccccaagcagtaggaacaaccagttgatgcgctccttctcggcagcgatcaccggacgcaagcatttctcatggccgcagtcgtcacagttcggcacgacagggttcatccaccgcgcctgcgcacggtcatgcatatgttggtggttttggcgtaagtagtcggacacctcttgaaacttagtggcaatgttgtagacgatcaccttgcgtgcatcacagcgcctgcaccgagcgtcgccttggatggtggtgatgtcgcggcgagcgagctcggcgagggagtggtgtttggccggttcattggtagcccaaggatacggtggatcaggaagagcattaccgtcgttgttgttgttgccgccaccgtttgtgacgttcggcgcagcgatgttgctaagtgccatgtcgtcgtccccgccacaggtgcggctagatcttgccatggacgcgttgctttgacgtcgagtcgaggagaattgttgatggaggtgcgataggattgatgatgacattgaaggtccaagaaaattaaagcatggaaataccgagactgcaccattggggatcaaaccactcgcgcagccggtgaacagcacaccggctgccgaggccacaaaagacggcgtgaccaccgcatcatcggcaggaacatgttcaatcgatggttgggccgccgatccggagaccacaccagtggccaccggcggccgcacctcgatcgacgtcgtcactgccggagcgcaagaagaggagtcgtcgtcgacgacgcccgtggcgaccccgtaggccaccggaccgagagacagtttcagccatggtggcacgttgtcgtcctcgccgctgccatcgtccatggcggccttcctcttctgtccggacaacgacgagccggctccatgcaccaccgccggcggcggcggcgggggcggtggcgaggacgcctccctccccatgacgagggaagagagagcgccggccggggcgatcactcgtagggctttacacgcacggccatctcgatcgatcggtggttaatttcaacgcgtttggacgacaaccgcgagagagcgcgatgcgatcgacgaccacgcgcgacgacgcggcttgactactctccgctcatccgctgtttgtttgtttgttggtcggggccgaggaaatagcaaaggctcctgtttcttttgagatggaaatcgatcaatctgaacgatgctgctgctatactcaatgcgattttcgggcaccgcgcgttcgtacacgtacgcgcgcgtgctgcatgcacagaaaattttgcgcgtctcgatcgccctagcgcgttaaacaggacgttcgagctgccggtctgccccttccaagatgcatggataaagaccaataaatagataccgtgcctatccacgttccaacaattgcatgcacgcccttcccggtctgatcgttgtttttcttttcgtccaggggcggagaaaccatctttcgtcagtcggccgaatttcacaatagtcctggttgcaataaaaaccggggctaaagatgatctttagtcccaatcatctttagtcttggttcaaatgctgtcagggtctgtcaggccctcccgggatctttagtcccgattggtatcggttccgtcatttggtccacggcaaatgacgagaaagacttaggcggaagttcaattttcttgtgagtacacatgctctatatttatattcaatctccaattcaaatacatacaagtgtatattaattagatctctcgcagtttatcatttatttatagtgcgcaaagcaaaagcagggaactaacttgtgcggctactacgtgtgcgagtattgccattgccttgcagaccaaatcatcaccacaagagagctcgatgtacgtacaaataaattcaaaatttcattgcgtacgtatcgatttgttgtttaattactaattaatttcatacattcatatagtttattcgcatgagggataacctgatcacacacaaggaatttatcgcggcggttcaagaacaactaatgggattcatcaacgaataaatccttgatcccaagggtgaattctactacgacggaaatacaattcaaaggtccttagcttctgagataacgactactactacgtcgaaatcgtagctagctaagacatcataatagattgtaattaatacatgtctatttttctatatgcatgtacacattttctttaatgtaaatatatattttggtcatatatatatatatatatgtatatatgtatatatgtatatatgtatatatatatgtatatatatatatatatgtatatatatatatatatgtatatatatatatatatgtgtatttatacatatatatgcatggtttatatatatatatatatatatatatatatataaaccatgcagcaacagggccatgaaaaaaaaaaggtcagctcgatctttagtcccggttatttcacccgggacaaaagatagcgatctatctttagtcccggattggtagtcccggttttcaaaccgggactaaagggggttatgaaccgggactacaaacgctttctccaccagtggtcttattattgtttgatttttttttcaaaatgttgcgagtatttctatatagcgtagtccctctgtccctaaatagtaaatatgggacgtcgtggactttttttaagcatgtttgaccattcgacttatttaaattttttttgaaatatataaaactatatatatacataaaagtatcactggtagagaaatgctttttactcccgattggtaactcattgtagtcccggtttttcaatcggagtttttcttttttttttctattttgtatatctcacgcccattatctcaaatcattcacagttatatagttcatcccaaatcattcacagtaatagttaatccccaatcattcacaacattcacaacacagatcattctcaaaatcattcacaacaacaacacagatcgaatcacacattcatcacagatcgattcaacacagatcgaatcattcaacacagatcgaatcacacattaaggaaaaaagaaaaaaaaaatcacgcagcagccccggcctccactgcctaccgccgcaccaacctccgcgccggcttccaccgggcgcggccctccgcgctaggccgccgcccggccggccgcgctagatcccggatccgcgcacgaggctgcctccgccgctgcccggccgcctaagaatggggaggagaggggaggagaagatgaggaagaggaagagaatgaggagaggaggaagaggaagagataggggtgaagaggagaaagagataaattaaggtgagggaggaggagatagaacttattaactgatattgcctctgggtctcgcgcacgcctcgtcatctctgccgcatatgccgatcttatttcccggttggtaacaccaatcgagactcgaaataaccgggactaaaaataataaaaataatagaggggtttgacaccgcctgctattttttttcgaaccggaactcatttttagtcctggttggtgttcccaaccgaaactaaagatcaaaaagtagctctaatcttttgaaccgggactaaagattaataatctttgatcccggtatctgttgtagatggtgtgaactggaatgttgcatgcatgcaggtacgtatatacgtaattcgagttcacatccggacacggttgtcgtcaatgggaattcctatatggcaaaggcaggagcccatgcaaattaaagggttgggatttggtctggcggtcgttggaattttgatcgattagtttagttgcgcagcacaacttggaattttgaattatctgcgtctatcttttgtatatggcaaacatacaattaatccgttgttcataccaaatccgacttttcatattttttattagtgtaaaaactatacaaaattattggatatgtgagaatcgaacataagggcaagtttaataagagagtaagcagccatctattagatgagcttacatgtcatttctatatcattaaagataatataatatttaaccgagtcattaatttttctctcaatgtgggccaaaccttggttctctctcctaggctatcaaccagtcacagatgctctttccatgtgggccaaccttaattatctctcacctattcttttcaccaatcacagcatccatcgtatgcatgccgtgtctaggcgcctgtgcacaggcgttgtcaatttagtcgacggctgctctctctctccactccctctttcttccagcaatgaaaaagagctgatgccagcggctaatagtaggtacattttccctattgcacctgccctaagcctcccattgacatgtaggcccaaattacacatagtcattgcgccttgttttggcaaattgtgggcctcttcagtttgttgcctaaatcataaattcttcattagtaaataattaatttaggaaagatacttatgatactttgcatttttaaccatcatgtatttggtgaagggagatcatatgtttttttattagaaatgaagcacacataatcaactgttatgatttgccgtggctctatgctacaccctaaaatggttcttctatgttttaaggatcagtcattatttttttagataatggatttgagaaaaaaaaaaggcctctacatcccgcaggatatatgcaaccacaaggttacatagtatgagcatttaagctcgtaatacatgttccaaacaataaaacaacccgtgctcatgttcttcactggttgaatcagtttgactcatcagtaaaaaaaagatatcaagctccaactcattacatgtagggatgaaaacggtacaaaaacggcggaaactatattttttgttttcgttttcatattttttcggaatcagaatcggaaacccagatacgaaaacggaattaaatattgtcaaaaccgaaaacggagcgaaaactgaccggtgctgatacggtaacgaaaatatatcggaataaaaaacccctcaaactaagctttaaaatatgtcaaatccaattctcaagtctcaaatttcaacattacatcacaaaacacaatcatgtcaagttcaattctcaagtttgaattgggtgtattgggttgggctgaattgagtgacataggaattaggatgctaaattgggttgggctagggaggaattatagactatgttatgggcctttgtaattccggaaattccgagaaatttcccgaaaagtctccgaccgattccgagttccgacggaaactgcccctatcatattcgattccgtttccaagaaaatatttccgaattcgttttcgttttcgaaaaaattctgaccgacagattctgttttcgaaaatagatccggaatccagaaaattttcgtaccgttttcatccctaattacatcagcatccggaccgaccaaacacttcgatattccatcattcgaaatatggcctcttctcaacaatactctccggctatttgactttttttttgttcagtgatagtgtgactttacagtttgcatgaacagccattacatgcatgtgctaccaatacttaacaactgatctttcatcgtggtatcaaaaatcacaaatatctcagctagatttagaaccggtactaaaaatgttttagtactggttctaaaagtccaagtccctgaaaacattttgtctcggttggtattaccaaccggtactaaaagtgcatctttagtaccgattggaaacacaaaccgagactaatgccggaggatctttactttcagttggtaacatcaacccagattaaaagacttgactatttgtgagctccttaacagagattagaatcccctcaagaatttgaactccgaaaaatatactgttacataaaccttggtgatatcctctttccctttacctttcttgttgaattgctttctaccacactaatgtagtgatgtttgacctcgcctccttacttgtggattggatcaactttaatgttgttgcctgtttgtattgctgctctacaggtcagatggtccgttcttacttccgacaatctgacctagtatcataatccaaccatgtttcgctttagctttcgtatttcattttaaatcatctattcacctcctctctaagcgatatcgaggtcattttacttttctataaaacaaatggttcaacctgtatcaatacgtaaatggtgccatctgttaaaaccattaatatacgaatggatgaaaatggttcagatagttataatactgggatgctttttcggaaataaataatgtcggccggatattattttttgatagttttgacaatagaaacgaatttagattttttttttcagaaaaagatacagtaaggttggtatatggcgaaaacgaaaaatggttagaaaatatatggataatttttaaatagttattcggatagctttataaaaccatttatctccatctttaggttcacatctctatcccaacatatttgttaaataattttattttagaaacaaggtatgcagctatccagtatgtcatatttgctagttacaaatcatacactatattcggtactattatctataataaaaacattatttattatagtaatatatcaaataatttgtttttaatggaataccttattattttaaaaagagtaagaagtgtccatgtcaattacatttgttcattactaataactttgaaatgaaacaaattacatttaaaattgagattctaatatgaatattgaatacaacttcatatttacaattatattttttattaaaatctagaaaaccaaagagcctaatttagaataacatattatatataccacgaatttattttcttttggataaaactgcctatatttctttgttgactttgtaagaatggtaaaaaggtctttctttatgttccgataaatattcgtgcccgtattctaactcatattcattatgtatcagtattcgataatattcgactccatttgattttcttttctgattccaaaaattataggaacattatccccgtataaacaagttaggctatgttcgggaggtaaggttgggcacctctcgacacggaaaacaaagcacgcgattatagtgaaattaattaagtattagcctaataaaaaactttaaaaatagattaatatgattttataaagtaactttcatatagaatttttttttaaaaaatatattgtttagtagttttaaaagtgtgcgcgtgaaaaatgaggcaagtgagttgggaaagaggggaaaagaacgctatcttcacgggaggcagttcccaacacaaacacgaaaacggattggtccattagcacgtgattaattaagtatttgctattttttttgaaatggactaattttatttttttaagcaattttcgtatagaaacttttttttaaaaaaaagacatagggagagatgatgggaaaaggggcatccggacacaacatagtatatacgggtacaatacatagacacaactattcaccgatctagggctgtcaatgagccgagctcgagcaagctcgtctgcccaagctcgagctcgacacaggctcgagccgagctcgagccgagcctactgcactttcgagcttttaggcaagctcggttcaagctcgagctcggctaccgagctcggccataagtagtataatatatattttaataataatctcttgataagtataattattttttagttaatcacactaataaaagagtagaaaataattaaaataaatatattgtactaacatatgctaatttattgtgtaaatagatactaatatatatatttatctattagtttattatattaataaggtaaacatgcaatataaactatgcacggtcaagctcggccaggcttgataaagctcgagctcggctcggtaaagctcgcgagcttttgctcaggctcgggttcggctctcgaaacctcgagctgctcgctgagcctcgacctttttttttgacagccctacaccgatccctgcataccaaagtcggcggctacacctgactcatcgatccactactgccgccgccgcccatggcctccgccgccgtcgccgtcgcccccgtcgtctccgacctcgtcgacttcctcaacgcctcccccaccgccttccacgccgtcggtacgccccccttcccccccgattcctatttcccttccttcttcctcctttggtgtcgatcgacgcaaactggactgtgaatgtgttgtctcagatgaggcgaagcggcggctgaaggcggcggggttctcgcagctgtcggagcgggaggagtgggcggggctccagcccggccgcaagtacttcttcacgcgcaaccactccaccatcgtcgccttcgccatcggcgccaagtgagcctctgctagatccacttttaccttgtcctcacactccttggattgctcgaggctataggattatttaatttgtcatactttttctattttttttttgtgaagaaacttatctgtagtaattctatacggttttgtggatcatgaatgtcctgattagtgcattatttattattggattatgttgatgtgttgtaggtatgctgccggcaatgggtttcacataatcggtgcgcatactgacagtccatccctgaagctcaagcctgtctccaaggtttagagtttgaactcttcgtagttgatttctgtttatgttaattggcgtggtacaattcgatgaattggcgattaaatcctgcttcttgccacgcaggtaacaaagggaggttatcttgaggttggggtccaaacttatggaggtggcttgtggtacacatggttcgaccgtgatcttactgttgctggtagggtgattgtaagggagaagaaggatggtgcagtgtcgtatgcgcataagcttgtaagagtgcaagagccagtcatgagaatccccactttggctattcaccttgacaggttggtgttagcaacttatccatttttgtgttttattcctgtgattaagtccatgaaaattggacctacattaaattttaggtcgtaattttgttagtcctatattgctagatcggaacagttaatcaacctaaactaaagtaaactataggtcacatgtgtgtccaattgcctatttggtttcttgtggcaacttatttattctacctactatcctgtagtaattaatgtttgtcaaagaaaaaaaatctggactaaaccaaagataacagtaggtcccaaatacagaaaatcgacgacatgcttcaggtatcagtttcagcttgaccctgtcagcatgcacttgaaccttttaccattagaaacttagagtagaaatccacacttcagctaactgagccagatgcctaactgaaaacatgcatcaccaatttaaaggaaactcaaagtaatacttgtacactctgacatatctagtttggatgtgttcgcttaaactgaataagagaaggaattgccatatttgatcagtagtaagatagctcgtatacagatcgtgatgtccaacattatttcacaacatcctggtccatttgttcatcttgtattgaaacattttctacagaaatgccattatgttcttttgtttcaaaatttagttaatataaattttctcatggcaacgaaaactgaaaatttgacatatcatattgattagttatgtgaactttaggtcttcgctaatgtaatgtacctagctgtttacatgtaataacaacgatacatgtggataaaaccttagcttttagcaccttacacaattgctcttaacacgtctaaactaatttaccgttcacagattaactttgaagaaatgttttgagaataaatcactatatttaattagtccaatactttggtttgtcatgcccacttgccagtactttgaaatgtcattctcaccatgcatttactttcaatagtgcaacctatgctggacataaatcctgttatgtttcgatgcttttattgtttataatagtaaagagtaatttcatttgtcttgcttaaattatgtacaggaatatctcctcagaaggtctcaagattaacaaccagaatcatcttgtccctgtgctggccacatctgttaaggtgatttgaatacattggccagtgtctgagtttccttttttttatggaaactagaaatgtatcccattaatatgacatgttaggaaatccactaacaagcgttctagatacaaactctggtaaatcttcatgcctcttcatgccaaataaacaggctcaaagaagaatctaaagccatgctgaacttggctagttcatgcacaaaattgcattacaatcactaggaccaaacatgagattaataacatccaaaccaagcaaataagtttttttggcttctataacaattactgtgccattgaagcaattagtccttgaaagtaactattgagtaaatatggcaatctggagcaatacaatattttgttcgataacaattactgtgccattggagcaattagtccttgaaagcaaatattgtattttgttcgttgaaggtttgtctatgctgttttcagttcacctatagttcctacatttatgaatttacttatttgaaatactattgcttgattttgtgtaaaatctagctccttaattacgccactttgtaaattttctatgttgttgtgtttgcaaatcgtattttctgctgagggaggaaattactttcatgcaagcgttttgctaaagaacgtttaaatatttctttcacttcaacgaacaaaatacaatatggcaatctggagcaatacaagactgaaggcaatacaatattttgcagaatgaaatgcagaaattagtggcagaaaatggttcagagtcatctgagagtaagaacaccaagcatcatccactattattgcaggtacttattttgtgtagtatactaattccattggacaaataggttcacaaataatacaaaactcctgatatatctttcttttaaatttgttgcagttgattgctaaagaagcgaactgcaagcctgatgagatatgtgactttgagctgcagttgtgcgatacccagccaagtactgtagcaggtgccatgaaagaattcatcttttcaggaaggcttgacaatctttgcatgtcattttgttcgttgaaggtttgtctatgctgttttcagttcacctatagttcctacatttatgaatttacttatttgaaatactattggttgattttgtgtaaaatctagctccttaattacgtcactttggaaattttctatgttgttgtgcttgcaaatcgtattttctgctgagggaggaaattactttcatgcaagcgttttgctaaagaacgtttaaatatttctttcacatgtttctaagtgtattattacatttacttaatttgaactagtacggggattttttataagaaaaagaagatagagaaacaacaaacaatgacatcaaaattaagttgtaaaatttgctggaagtaatagctcatcttctcaccttctattcattccaaatttgtataatggagcccctcttgtatcatgaatcgcaatcgtgattgctattgaatgggttagcgacctagcatcctttataactctagttaagtgctacaccgtgtcgtcattttgtatatgtgctgctctagaacagaaagatacctttccgttgtgtactttaaggcaataaagttagtcaactgcatccctttctaaagaactaattatttctttcttcttgcgagcaaataatatgcaattacttaacccctatactgtttcaggccctaatagaatcgacttcttctgaagaatctcttgcgcatgaatctggtgtgagaatggtggctctatttgaccatgaggaggttggatctgattcggctcagggagctggttctcctgccatgttagatgctttgtcaagaatcacagggtcttttaactcttcaaattcgagggtactaactgattttcattacgcaagaataaagcatatatttctgtttcagttggtaaccagatctgttactttcattaaacaattttgtttttgttgaccatgtaatgtggcatggcttaaaggatactttaaataaactgtttgcacatattgaaatagttctccccagctccattatgcacattacaaacaactagactgtttgcagtctgtgtacctatttaggtttacattgtgacaatctgcttttaattttcagttgctagaaaaggctattcaaagaagctttctagtatctgcagatatggcacatgccttacaccccaattatatggtaagattttctttgcatcagtatctgagatttgcagttatacagcaacaattaaattaaaccttttgaacctatttctatttatctttgcaggacaagcatgaggagaaccaccagcctaaattgcatggaggactcgtgattaaacacaatgctaaccaacgatatgctacaaatgctgtgacagcatttatttttcgggaaattgctgagaggcaccatctacctatacaggttagttcatgtatgaaggatccttctataacaactgtgaaatagtgctttgttctgaactaatcaagttgtcatagtctctaagttcaaaaatatgtctggctaatctattgaccttgactcctgctctatcaatatataaggcaaatttcttgccttccttttcggaaaaaagaatctattgaccttgagatgaataaacaaattagataagctcttgaacagtttgtgcttatccagtttaagaacaaggggctattacttgtttaaacaaattggaaatcaataaaatctaatttctgcattcatttttgcaggattttgttgttcggaacgacatgggttgtggttcaaccatcggcccaatactagctagtggtgttggtattcgtactgtggatattggagcaccacaattgtcgatgcacagcatcagggaaatgtgtgctgtcgatgacatcaagcactcgtacgaacacttcaaggcatatttcgaagagttcactgaattggacagcaaagttaaagtagattgctaagatgaagtagtgaccatactggatcagccgactggtggtgttgctttgacatatcctgtactgttgcaaaataaatgaacaataaattgggttacattatctcgtcacaggaatctcatggagaatatattttctggctgtgatttttatctcctcgttcctggtcagttgccgggatctgtgctggccacatcatcttttatggtctagtacaggtcgaaatgtgcttcttagaagtataataagttttcacctcaagtataggagaaaatcagaaagcctcctccctccgtttataactgttttgactttttcgtagttcaacttttgatcaagtttatagaaaaatttaccaatgttgataacaccaaataagtaacacaaaattgagtatactttggtagtatgtttattttgtgttgaaaatgttgttatgtttttatataaattgggccaaacataaaaaaattaatttgtctaaaaaaatgtcaaaccatttattaatttgatgaaacg

SEQ ID NO: 25238 - DNA, 72682 bp, Oryza sativa
atatatatatatatatatatatatatatatatatatatatatatatatatatatatatatatatatatgattgtatgatctttatgagatggatatttgaattgaaataactactacttcctccgtcccctaatataagagattttgacattttacttgtactgtttgatcattcgtcttattcaaaaaaattttagaattattttttatttttttaacttactttattatccaaagtactttaagcacaacttttcgttttttatatttgcacaaattttttgaataagacgagtgatcaaacaacacaagcaaatgtcaaaatcccttatattagggagtactactacatcacatacagttgcctcgatcattttaagtttgaatgcttgaggtagccatcatatgagacaggtagtacaagtcaatgtgttcaatttgttgttcacaagttaaaataattgggtagaaaatatgaacgcaatctttcagcacaaacatgcatagctactttggctgtgtttagatccaaacttctaactttttccattacatcaacctgtcatacacacacaacttttcagtcacatcgtaccaatttcaacccaaactttcaactttggaaggaacaacatagcctttaagtattgacaatgttgaaaaatgaggggcatgttgaaatggaaaatgtatacctcttccactctttgtcaatgtgcttaccattgtgctctgcgatcgtgtgaatgtatgggtcgagtcatcagcgaggatgttctataatcaaaactattaatgcgaactactctacattattgagaggtgactagagatcgggcggcttcttctttgtttgtaagccgtcggtttggttcggtgccaccaaactacaccttttatcattttttttacaggttctctattttctacgagatatattcaatttcttatgtataaataaatttgataaaactacaaccatttgtcataactaccagcttgttgcaactttagttgattgcatgataatcactgattttaacagaaatatacaactctgtatgttaggttgctcactgtcagttcatccatgcaatatccgcacattcatgcaaattaggcccacatatcagaaactgtataggataaagtcaaaattttgcaataaaactgtatgttttcttgtagttttgtgaaatgtcgttgtaccaaccgattcagttttataaaatttactctttatattttttctaaattgatatttgattttagaatttccactttgctacctgattttttgtttgatttttcctctgactattcatttatttagtatattcaaatataatgcttatgaagttcagttattgtataaaggattttaaacacatactttatcctgtagtacatttttagatacgttatttgcatctaaaagtgtcggattgataagctccgtagatgtaggaaactacaggtttaaaaaaataggaccaatctaggaaggactagattgatattgaaataaggaggagggtgaggctcgaacccggaccggctagctcgcagcttgcgttgctagccgggaagaccccgggcctttctcgaaactacaggtttgggatcaaccaagggttttgggtgagcttgttgtgcccatgagtgtttgggagtaacacaagtcatgtatacaagttcgagtttcccgaaagataacaattatacactcctgttttgttcactatcggctaagtccatataaacctggaaactctcaagctagctagcatagttcttgccaatttctagaaccaacccttttatgtaaaatcaaagtgttttgattattattttgtgatgaacaattggcatatgtgattattggttttgatatttggagattattggcgaagtggttttggagatgattggattttacagatgttaaacaggagctgctgagttttgggtccggttagaccgggcatgggttgccagtcaaaccgacggttatcgagcggtcagaccgggcgactctgtgttgatttcagtttcgggttgtttgtttggatatccgtgattattttatgtttatggcttctagatggatactacgtatgtaatactgttatttgctaacaatgagtcaagttggagatagcttggtctcgaaatatggtttctttgtttgattcatgtgtaggtgacttgatgcctcgagagagtattgccggtgatggatcgggagtcgacttggggataaagcgatgtccgtgacggtcagatatcatgcaggatacttaggctagagttcaatgcacgtggttggtgaagattccatatggcatacgatggaggcattgtgtgcgtatgggatacggagtcgaatttggaaggagtctaaatttggtatgattggagtttgtaaagtttgtttcttgtacaggaaggtttcctaagtggattaggacttctagtatgagtttggttcatggctttaggctgcctacctcatgtataaatagagagggagcgtgaggcttcccggtatcgcttttgagagtattgagttgatagtttagttagggtttcgagtttagttgagatttttgtgaggagtgctgttgtcgcactttgtaaacacatagagaaataataaaattgtcatctacttcgagagttcttcgatttgtgttttctcgggtttggtggtctaaccggcgaaacaccggcagtcagaccagtgacattgcggcggtcagaccggcgggtacactacggtcagactggcgacggcaacaggaggcagaggcgattttcaggcggtaggaccgggctttcaacgccggtcaaaccgacggcttccaggcggttaggccggcgcatcacctacggtcagatcacgatccatcgaatttaagggtaacttttaattccgcaaaaagtttaggtttttgggtataccaaccattcaccccctccccctctggttggcttagttcttgtatttcgatcctacattttatatgctttgatggtttgacacctctctctctctggggagacaacaaacattcgctcataagcttaaccaagctctatgccggtacagacatcccgtgggatgtaacgccaggcccatttgaagcctcccagttttttccctgagcttcccaacctcctcttttggtttatttttatttgctaaaaattgaatttttaacttttcaccgtagattatttttcagtttttacttttagatcgctaagaatacgcatataaaagttttatttacagattatttttcatttataaatataccgtttctcaataagcgaataagcgaaacgatgtagtcctccatatccatgcccgtgtgaacacaacgaattgttaatacacatatcaaaagtcgaagacaccgtatattgaaaaacaaagagatatatgcattgttacagtagtcatctacatatttatcaagcattagtccattatttatatgacctgtaaattcaaattcttcgggcaaacaactgccattttcacttgcaaatggaattgttcaccttacttctatatatattgcaaatcggctgtacgactgtagccgattcaaactgaccctacaaatatattgctacacaaacacagaggatctgtgtagtcaaagacagggaatcaccacaaaggcatcaattccaaaattaagatgaacagaaggaataccctgtcaagattgacttgatgtaattatatcggtgttggtatacaaaacttctttcctcattccaacaaattattttgacaaatttcagactgtgaagcgaaaactgtgataaaatggagcaattgcgccatacagcaaatcaaaatgaaaaccacatggtgttggcagcagtttaaacatctagaaaacccagtgtaaggggttttcggcacatgtcatgtttataggctgaagaactggcagtttatgatagggctttctggacctcaacagtcacttcctttggtggtttttcggcatgcagatttgcgactatgcccttcttggtgtagtagtcaatcacctagaggaaggaaaccattccacgaattaaattgagtgaacaggcagcaactgctttgcattatggcagataataaacaatatttcacaataaaactaaggattacaaaagaaatgaggaaattgaagccaggagatggaaatatcaggcaacaaagatacataaacgtataccgcaatggaagtgtacttcaccatgttgtcaaaaatcttatgcaatacattatacagtcatatgaaatatataagaactccatctcatgaattctcaaatgatgtcgaatttgtaggagaaaatgaacaagatggttcactgaaaaactcccaatctactcccagttcatactcaaaaagaatttttggatctagagatacccagcaccaagaattattggagctctactaagcagacccacaaatgaagaaaaggtacaaatctagaaatgaagggttggcaaaatgtaatcagaacttaaaaacaatgaaagatatacaggaaacactgtaatgcaactgaaggaatccgccttaactgaagtacgactacatcctaaaagaatatctgaatatttaaaaacgtagttgctaaaggaaacatacaggcttagtttgtacgtggaaggcttcaagccttgacttcaatactgcagctgtgtcatctttcctttgaattaagggttctccagtaacctttgtgaaaagacaaagcaatcagggagcagaagtgcacataatattaccaattaaaagatatatatgatatcaaacaaatttacttaatagcagcacaaatatgtcccacatgaaatcattgctaaagaagaatatgcttttaatggaagcaatagaaacaatatacaatctcctgctacaaaaacatgtcgatgtatctatttatggacacttaaacaggcataattgtcagaaaaggaagcaaaagtgtgtcatgcaaacactgcctatcatttcttgtcaacaaaaggtgcattttactcttcgtacgagaaacaaccaaaacaagaaaaatatatccataatcacactacctatttaactatttgggaagcaaactaaataaacagtggcaagaagaaggtactcaatgaaccttttttattttgaaagaatgatggctcatgttttgttcttaaaaaacaagtaagcagagtactacgatgatcgatgatgagacagggaaattatggtaaaggcgcatatgctgcaagcatcaaacaatatatgtaccaaatctaatagaaataatgaaaatggtaaaaatctgagtatctgacaaatgcaagcgagagcaagtaatctggtatgacttacatcatcaagtccaggagtcttaggaggagcaaattttgtatgataagatctaccacttgatgggtggatccaacgaccggtaattcgttcttccagtattgcatcatcaattgcaaaatttagaaccttgtcaatcttagtaccttgtttggccaacatttcatcaagctgcaccattttttagtaagaaaagtgatacaatgatagaaactgtccatttatatagacagctctaataacaaaaaggagctcttttatatagcggtgcatattgaccaaggacctcaccttctgtgcttgaacaacagttctagggaaaccatcaaggataaaacctttctggcatgaagttttcttcatggcttcatcaataatcccaacaaccaagtcatcagaaacaagctctccctagaagataaggaaagaaacaaaagaatcaagaaacccattcctgctggttataatttctgttgctatatgtttcttaaaaactaccttgtccatagcttctttagccttaatcccaagtggagttttagcagccactgcagccctcaacatatcaccagtggctaaatggcacaagcaaaattcatccttaatcagcggtgactgtgttccctttccgcagccaggtggacctaaaatttagtaaaataaagggatgtcaaaattgtatgtcttaccttttttttttttagaacacgcagagattgtcttaccattctagaacatcaatattcaagctttctgcccagatgcctattaaactatccataaaagcatcaaaatttgacatcactttgcctctatggatatcaagttgtcaacactatcctatcctcaataacatattagggtgtaactggcattcttacaatgctgttaacaacaccagtgtctcagtgacacatgcatgaattagaacaagccatcaatttggagatagctaagagcagacgatgactagattcggtccacttaaattaggtagtgcagagtgtttgtaaattagctatacttcatgaagtaaaagaacaatagaataaaccttccataatgatttgtttgatgaccagtaaattagagtagtgcattgctgaagcagagcattgcgcaacagaacaagtttatttgaaatttgttgtgtcacacagtttacataaccatacagatcgatttggtttactagtgaatattgaaacaaaggagtaatacgtctatctctttgtttttattccgagtgacatttccaaacctttatcgatacatataaagttgcacctttctgttttggttattttaaaaagtttccacatcagacaaaaaaccacgaaccgccctgttgttttctgctcatcctcaacacatgccacatgacaaatttaaaataacatgtgtgagaacaaaaaatgcaacctccaatttcaacacatactactgaatacgaataaattctataccttaaacgcctgaaattcctattatgcgtcgaacaccgatcatataaatatttcttttcgcttgatttctgtcactaatatccttccgtcaaatggaaaaaccccaatcgactcaatcgcaagttgcaagaacaaacgcaatttgaccatcaaaaattgccgcagtttccaaaggtggaaacaacaagtaaattttacaagatttccctcgaagccaaacatttttgtttgcaaaaaaccacgaggagagcggaagaagaaacccagatttgacccaaaaaaagaaagggagacagctttgcacggatctaacgcaacatccccagcaagccacagcaatctttccccatctcccgaccagggcagcacgcgccgccgaaccggatccaccaaccaacgaaccaaaccaccgagagagagagagagagagaggaagaagaaagaggcgggcgttaccgacgaggatgacgcgcttgtcgggcttggagctgcacttcatgcggcggagcagctccgtcatcagctccatcgacggcacgtcctccaggttcgccgccatctccgcagcaacaactactgcactagccttgttcgtcgacgaactcgcgtcgcgtgctctccgcgtgcgccgctgaaatggaggagtctcggtcggatcgaggaggtttaggtggtggggctttttgtttcgtttctggtgagacggtgacaaccaaagctgggctctttctgtttcctttttaagcagtttttttttccaacgaaaaagacgcttctgcccacgcaagcacgcaccgctctcggggagtgtatggcaaataattttctacccaccaaaaagacacatttaaactctaaccattcattctccctctttcattttaatatttaatcctaaccctgattcatttaccaattctaatcccaccccatttttccattatccaaacacaccttcggtgaatctttaacttcctcgtttcctattaggatgctttttaaagggttaaattggtgtgtttttaaaaaataatttatgcatacattgtttaaaaaattcaaataaatatttttttcaagtttataattataaatatctaagtaataatgtgctaatgagctttctcgtttatcatgcgtttgaaaatcaacctccaactagaggatcaagaagccttaaggctgtgtttttctcttgtttcccaactcatcgttctagttttctatgtgcacgtttttcaaaccattaaatgatatgtttcctaaagaaatttatgtgaaagttatttaaaaaaaatcatattaataaaccatcatatttttcgtgcgtacttcacctctcgaacttagccttagatgggtgggcttagccgtctacgtttatttttcttaattggaaattggaattttgtgactgaaataagaatttacaaattagagttgtagtacgaaacatggtttgtaattaacaaccttcttttttatgtgatattaattttgtttctgcactagactacttatttatgacagcatatttctcgaacggttgaattgcgtttcatgaaaaaaaaattaataatttctttttgaaaagaaaaatcgtattgcagtctcagttggactcaaatttcaatttgagcaagatagataaccatgatattttgcgaatttgtattcattgcatagttcagcacaattaccctgaggtggaatagaataatctttggggttttcggtaataaagatactccaagaagcaatttgatgctttgtgacacaagtcagtatcacacgagccaataggagccatcaaaccgttggcactgtcttatgtattctaaacatggtagtacaagagaacgacttgaaattcgcttccattggattacgttttctcatgtcagcttgagcattcttcttaattttcttgcttaattttcctgcaaaaaccatgtccaacgaacaccccagttgattaacaacagggcgtcaccaaccacagggtttggtgtgtccacctaattaatcttcctgcagcattgatttccacgtgccggctaaataatccagcttttggttgtttcaactccaagcgatgtatatagaatagtcgccaggggcccttcttcagtctccacgagtatttttttaagtaaattacaaaccagttttggagattttttttttcactttaggctaggcattgttggcaaatattgtattttgggccaggtggcctatctgtaagtgagacacaaggacgggtgactatgtctcattaatatatggttcacccgatctaaagtgtaattgtaaaaatagcaaatccaaaataaaaagatgtttagtttaaggtggtcaaagtaaattttggtataaatgtgtgccataaactacaatttttttttgcgttgggctgctttctaattaagttcaaaaagttatgatcatatttccttcccaaaactgatttcgagggttattagtgaaagaattggatccaataaatcccaaaagccctgcgttagttttggagttctcatcccgtatatttcgctatgtggatttgagagctagagagtgatccccaccgactcccagtctcccatttgcgtgcttctcctctccttccccgcgtctcttccctccttcccgtgcaagccgtgaaaacgcaccgagaggatcgacggatccttttccgtgcggtcacagagagaaaaaaaagagatttttgttgttagtttaataaaaagggctcacttttagttttgggattatatttaagctttttcttagtttttttacttactattttcagtttaggaaacaaaaacaaaatttttgggtgaattatacatattcttttggtgatgctcttaataagttgaagatccgtattttttattttgtataatcattatttgtgttctttgagttaaaagattaggcgtcgttgcatcgagagaattttaagcatttcaatcactgagattttaaataacggaataaaatttctaaaatccatttcttatgcccttattcaataggaaagcaaacgtgagcttctagcttacgttttcatttaaagtaaattacgttcacggtatatgaacttgtgctgtgaataaaaatatgtatatataataccttgtaaattgaccatttcggtatagtaacttggctagttcataatatcatgatagcttaacgcatgaccggcctggctaaagagacccacgcaaagcaaacttgatgtaatatggtacacattaatatcatgatagcttaacgtatgaccatgttttaaagatcccaagaaaaagatcaattagttgtcctacagaactatattttcatgttcagaacagagacaatttatttcatgtcttggaaaattttgaacctctatatagctcgttcaatgttgttcaatgtaatataccaggatggtttatgtcatgcgttaagttaggacaagtaactttgggaaaaaaatattttaattttcatgatcaatcactccattttcattgaaaatttatttttgaaagtttatttattttcatggtcaggtatttttaatcgttttgtttcagagtcggtttaaattttataaatttcgtgcgaatcataactaaacattttgtcggtctaaaatttgacgtgtaatcaggggcgttcctacatgtatctacccggtgcttatctatttctaggtgttttaggtcatattaagcattatattactaaaaaattagcctataagcatatcaaggacccctggtaatttttttctgggttcgccactgcgtgtaataatagttacactgcaacgtgtgccatgttatatcacttttgcttgcatgaatcgttttggtccagattcgcatggattagccaagttattgtatcggaattagcaattttcaagctattatacccattcatgcagccaccacgcaagttcatgtagcgtgaagataatttattctttcatttgctttgagaagtccaaagcactatttcctttttttttactacaatttcctaagtcccttcaaaatccctggacaatggagataacttgaaactacaacattgcattccaagttagggttcaatacctcatggtacatgactaacatctggttacatagagagaggggaaaacaaactctatttttttttctcaaccacatttacataacagaacttgtgtacaaattaatcaaactattaatgcaggacaattttgaagtgtagttatgaacacataatatatgttcatttaccaggcaacttttctaaactggcaaaggatatctaaagctatactgctaaatcattctaaggttttggctaacaaaatcactacttttatacttaaaggcaaagacgtacagagatctatcactccagtgtaaccaaagataatagaataagtacatgatatgggggcaaattcgtaccagacccaaactactttctccacacgcgaagatcacatcttacacttggacaacctcaattagcattgtggaagatgttttatgggcgatattcccctccaccaatcaatttatagtgccacaacacaagctatatatattatctgttttcaaaagatcatacatgactacatgttagaatcatgaaaatactataggttaattgagctaaggccatgggcggacacaccatgggacataggggtacgcttatacccccaaaaattttttagaaagaacccatcgtatagcatgcatattatggatacatatacttgaaccaaaagagcactttggcataaaagcaagaaattaatcttgccttgaattattaagtatacattacttttgtgaaatctactatctatatactactactgaatatatatgctaatagttgtatcatatttagttatgtctcggtatatttttaaactttgtacccccatcggaaaatttctgcgtctgccattgactaaggccagtgacgaacaaaagcttcgtcttgtagtcacttaagatcaagctcactattacgaaatatggttattcacaaccactagtctcaaagcttcacttaatacaataagatcttattcaccccgagacaagtaaaccctcctcaattgcttccttcaatacttcttctctgagtttcttaatctcatccaatgtggcaactactgaagtagattggttggctggagtagattgcttttccttggcagcacttcgtttatgtcttttaaccactttcttcaccccctaatgaaatttgaaattaaggtagaattaaaaactactatatatatactttaggaatgttattcctccatacattatataatatgaatgcttagcatggttcctgtcctggtttggaatagactggagcttttttcatagaatatgttaacgaaattatttgtctaaattcaaacttaaatttgtaatcagaatcagtgcaataacgttttgaccaaccttgtttgtgttttatgcttatgcagggcagtcttcaaatcatttacagtcacatcaggtggtccatacttcacaagattttctgctataatatcaacaagcctgcaccacacgtacatatttcatactcttttggattacaaaataaatagatctttgagataagaaagaataacagttagttaatcttacatttcttcacttagattagcagttttgtttatcctcataacattcaatcaaggccagctgaaaaaaaatacgagttattacatgtatatatattgcaaaatataacatcagctataccatagaaaaacttttactaagttctgaccttaacattcaattagaactgacaaaattagccccaaactacaatgttgatttctatattatcaatttgggcacatgtttggtcttatattgcatttggtaacgtgtgaatagcgtaaggagagagacacaaacccactaaaactactaacaaattgaggatatgcgtgcaataatagagaaacaaaaggcaacaaatgcagtcacaagcgaagatcatgacaagttaaataagcacacacgcataaagttttgtggtagcattaaatttacatcactttgccatacgaaacaaaagggtacagttcaccgtgcagtttgagtgttctagttgcatcacttgcaataaaaattaattgatgttgctgggatgcaaacgcactaggtatccaaatacccacagtctacacaacacacacgagaaacgtacatccaatatttacaataatcataagattgcctactttctattttagtacaaccatggcatgcatatagtttataggcataactgatcacacataacccatgaagtagggctgtcaacgagccgagttcgagcaagatcacctgcctaggctcgagctcgatacaagctcgagccgagcctataaaatgcttgagctttcaaacagactcagtttgagctcgatcaagtttgagcttgactactaagcttgatttgtaagtacaacaatgtatatttcaaggataatctttaaaaaaacaataatttctaactcatcatattaatagaagaagaaaaagaataaaataaatatataacaccaatataagacatacaagttacatatttaatatcctaatttattaaataacaataaaaaacatatattattggaatagttagaagctcgagctcggttcgacaaagctcgcgagctttgggagaggctcaggctcggttcgtttgaagctcgagctgaacgagtgattattgaacctaggacctaggacgagtcgagctcgagcagcttacgagcctcgagctttttttgatagcctatcatgaagaaagctaccatgaaccacttaatgcatgaatagcaagaaccataatctgaacatactcaatcacatagatatgtaatgaaaacaaataaacaaagcgaacaatccattcatctcacacaatttaattagtttgttatgcacttgcattaacattatcagtaactcacgggtggcataaaaaatcctcaactcctaaaataacaaaattacactcaaattctcaataacgaaagactttgagtgttaaattttatccaccaatttaccgattaaggtctaagcctgaaatcaggaatttataataacccgtcaaaaacatgtcctcgctgttttattcataacacttgaactgctaaaccaaatttagcaaaaaaaaatacatatagaacatctacagaaaattatctacaactttcctatccatcaaaagttataatttagcctctatcactaacagatttgtgccatgtagggccagtttttgttgtatcattattgacagattttgtttaacatctacagaaaagtatcactgctttttttttctcctaaaccgcttatctgaatcgagtgaaacaagtgcctatagaaagatattaacatgacctacaagtgttgtttggaccacatgacctgattcccttactctttaattaatccaagaaatcaaaagaatatttcggactacaatcgaagaaatcaaaagaatatttcagcctacagtcaaaagattaaatttgatataccggcaactaaaactgtatttctacagagactaggatatatgtaactggggactatttgaggatacccttgtagtgaagaaccttaatttggaccactccaatgaactacactgtggaatccctaatttcctcttcgtcttccttttcttcgatctgtcctcttctactggtgagatcagaacagcagcagcaacgaacaggagtagattagcaggcagaacaacagattggtaggggaggatgcagatggcaatagcaaagaagaaactgacaacgcgcgatggtagtggcggcgccgcgcggcagtgggatctcaaggttttttttttctttttatagaaaattcgatccatagcataggaaaaaaagcggtaccaaaaaatagtataaaaatttttcgctttcgattagaagcacaggccacctgtttttcttagctccatagtaattctgtcaggtttagagttaacagcattagattgaagtatagaaaaattttgttggacccatttgcccttcgtcttcctgtgtcatctcgtcctctcggaccggtgcccacgacgacggcgccgtcgccaaattgcgacgcggcgatgatccccgtccccatccccgccgccgccatccccgtccccagccgcgcgccattccatgtccctgtcggctcccgtcccgacgacaacagcagttgtaggaagctgtacgagccccggctggtggccatcaggccctaccaccacggtcgggacgagctccatgccatggagcagcacaagtggcgcttcctccagcgagcacccaccgtcccgctctccgacttcgtggacgcggttcgggccgtcgagcagcgtgctcgctgctgctacagcgagagcacggccatcttggacgacgacggcgacggcttcgcggagatgctgctcctcgacggctgcttcattctcgagttctcggcgaagctgagccgcgcgaattagtgcacttgcaaaaagctaattaggatttaattaattagttgattaatttgttggcgctggcgccgccgtggttgcagatgctcccgatggccgccatctcatcaccgctgccctgcggagacgacacgagcgagctgagcgcggagtcgaagtgcgccatgcactccgccgccgccggcaccatcatcaccatctgttcagccgccaccgcccacggcggcatcatcatcatcgtcccgtacgccgccacggctggcagcaatgcgcccgcacccgtgccggcgccggacgaggaggtgaaggaggagaagtagtagcgcagcggggaagaagtgctcgtcggccatcatcgttgtcgtcgacggcgtacagcggcccacatccatccacgctcgggcagtggcggggagacgaggcggtcgcccggcacgccgatggttgccgcgccgccgtccacgagggagtggaagaggagacctggtggggaatgtggggagcgaagggcaaatgagtccgacaaaaattttctctactccgatctaacgccgttacatcaaaatgcgacggaagtgctacgtggcgaagaaaaatcggtggcttatgctatggatcgaaagtggaaactttttgtgctattttttggtaccactttgtttcctgtgctatggatcgaattttctctttttttttcccaccgtgatgagcagctatttataaagtggataaagaaaaatccgatggcctacatcgatccaacatccactattacatgcaaacacttggtaatagcaaaattgtagcgaaattgccaaactttagttattctgttaggttttgttgcttctggcccatatcgattggttgggctttttttaacttcgaaatcaaatctgctgcttggatggttaagcctgtttaggacatgggcctcatagagtataaaatttttgtgtataaaggttttggggacttagctatacatttgtcatcaaattttaatcaaaaaaatttgatagatatgaatcaatcaaaatgtaattagattgttacttgcgatcccgactcccttggcccaacagcgatggacgagggagagatgaggatggccgagcgacaccgatgacgatgaggccccgcggtggcggtttcgcggtccttcggcccggccatcttcctctctccctcatccactgttgccgggccaagggagaccggttccaccaccgccgggccacctcgtcgtcaacgtcgcccagccatcttcctctctccctcgtgcaacagcggcaggagcggtggctggccctagggctatctcgttgcgaccggtttccaccctccgttgccgatgccgatcgacgctgacaactttttatgaattttgtgatgtgtgggatccttttttttttaattttgggatggtggtgcattgtgaattctgatatttggtatatgcaatgtgaatgtgactcatgaattcattgtgggtatgatttgtgagtttgggatttgttattgtcatagttgaattcattgcgattaatttgaggatttttgcaaatgtactttttgtattttatttttttcaccaaaaatccttatcactggcggctgcattaatggtgtcgcatgtgaaaatctttttggcatgcggctgatcatccgccagggaaaaggtccgcaccgcttgtgaaatcttttttcgcacgcggttggctatccaccaatgaaaattctctattttcattggccattactcgcagctgccagcgaaattctcttttgaccgctagcgaaaatctttttcgtagcagtaggcccttctaattttatttgtagcttaggagttctagagatggatttgttggttatatcaattcagattttgttgaagatttgaacagaacaatatcacccacatgttatgttttaactattggaagttgtatggttagtgggtagattagtttgcaagcaactgctatgttatcttatctactatgagtgtggttatttctgaagcttataaagaactattttgcttagaggtttgtacattgtgttttatggagataagtcttaaattaatatattttgtaatagtcaaagtgcaacatgtcttatgttttacgagataacaaagcgtatagatattactttattcgagatgtcattattgatgatgatatcaagatatttaggaagtattcactaagtttatgcttttctcaaacttggttagtgctatagttcagtcctaatgaatatttactgtgcaatgattttacctacctgagacactttcggtgattgatgagttttacactacaagagtaaattcatcttaaagtggaaattgttaaatatgataaccaaattttaactagcaatatattccgattagttttcgggtagaattttatttagttacgagaatacatcaatgccggtttcaaaaccagcactattgatcccctcatcagtgtgcactgtagtgacagttgaggaacggacactataaggcttcccaactaacactaaaagcattttctgtagcagtagtgaaatcttccttatatgattgaactactggcctcatcttttcacttatacttatgcttatcaggcaaaatttgaatttttaactttaaatttagagctgatttggaggggttttttttcatcgaagttaatttatttttcagcctttgcttttagattgctaagaccacatatataaaagttttattcacaaactactattcatttgcaaatattccgtttcgcttgtatatgctgtagtacaagtgttaacgtagaaataaatttgattttgaatgtagactgctattcatccatatctaacattggaacaacactagctgtagctctggctctgactgcttccgatggtcgatcaatatgctactgatatgaataagaaaatggacatttggccacattcaaaacacggtttcgctagaatgctattccgaaaacgtgtttcattaaaatgccaatatagagcgggcgctcactgccactttaccattttagtcgttttgtgcatttttgaaattattttcgctccttcactaggtaatgagacgaaattgcccttccaccctttcgcgcgcggcaaccctggtgacggcgggtcggagctcgaggaaggcggggaggaccggatggccgacagcgcgaccagatcggcatacggtggcggcgaagcgagtccatagcggcggaggcccgcgctctagctcgccatcagctattgttgcctctccagctccgcgaacccgatgctcaccgcgtctccctccgcctccgccgtaggcatggggcccacctcaaaaccctagctagcgccgccgctgccactcgaccccacgggcctccgagataactccggcggcggggttgtgtccctgctcaccgcactcaagacacaccggatggttaattttgtctcaccacccgacggatgagcgaacatgatttcgaaaatgcacaaaacggtcaaaatggcaaagtaacggtgagcgcgcgtttcatattagcattttaacgaaacgcgttttcaggataccattctagcgaaaccgtgtttcgtacgtggccaaatgtccattttcttgatgtgaaccagtgcatgaacctgcatcgataactttttcaagtacatatgtacatgattgaataggttgggtacaataagaacataaaattgagtagttaatttatattcacgacaaatttgcttgacttgactccataatcaagcattgatatgtatctgatgctgacacacatgatacctggtttcgttgaagaaaaccattagcaagctaggttgtttcttggtcgtggcattacttagatgtcctatgtcctttgagaaaactagcttcctagcttggatctattcataagtagtcatatgagtaacatcattggcccttttgttttagaaaaatcataatgcaattggtaagatctgagacgtactgctccctcctgatcaatcctgctactactatatatgaaaacatgtttaatcatgtgacgttcactctctccgctcggtttcatctaggtttcagatttgattcctttttttaatagtaaacttggactcccttgtccaacttgatgaagaaaaatataaatttgtcagacaacttgtaatgtacggaccgcatgcatgcgatgtcgtaattaaaatgggcctgcatatatatatatatatatatatatatatatatatatatatatatatatatatatatatatatatatatatatatatatatatatatatatatatatatatatatatacatataccaccatgcatcaatgtgtgagttaattaattatctcccatgacataacacagatcatgattatggagcgagagcgacaatggccaaaatcggcagggacagagtcactcctgttctctcttctccactccagccttccagctcagttcaagaccggggatggagtaagcaaaactccatcctattcagtccaatgtattatatcctttttacaatgataaaagtgtatataaacccccagcctctacatatatattgtaatagtggtaatgccaactgccggctaagttatatccatgctatccaaatataacgctcattatcgatagattacctacttaaaaaactaatttaatattttgccttttgtctcacatctgaattaattctatatctttctagaagtacatataaaactggccctttaataagagccaacactcattttccttgcgccgtgtttagattcaaaattttttcttcaaactttcaacgtttccgtcacatcaaatgtttgtacacatgcatggagcattaaatatgaacgaaaaaaccaattgcacaatttgcatgtaaatcgcgagacgaatcttttgagcctaattacgccataatttgacaatatgatgctacagtaaacatttcctaatgacgaattaattaggcttaataaatttgtctcgcagtttacaggcggaatctgtaatttgttttgttattagtctacgtttaatatttcaaatgtgtgtcagtatacttaaaaaaatttttggcacacgaactaaacacagccttggtctctatcctcaacatgtgaaagaagtgatgttgttaggaaacgataggcgaacaaacgataaaaaacaatagatcaatcacagaagacacgagatttaacgtggaaaaccctcccaaaacaggagagaaaaaaccacgggcgccagccagcaaaatatcttcactatatctgatgtgaggttacatcgccgcacggcggcttacaagaggtatatatatggtggaaccctaaaagggatgatgattcgtaccgtgggggctccgcccccgcacccccgggcgtccccaggtgcacagcccaatgggccaacttttgccttcactccgctacggcagaagctagcctttattaagtgcaaatgaatttggatcacaactcaacagatgtaagcatattttattagtaaaatgacaaatagccatttgtcattttctcccagcaaccaacattgtctcctccctatgctcaatccaaaggtctttatcacaaagggaagctggcctttgggctgcagaggctgtcatggcgggcatagtggatttcgaagagggatggcgcctcctggcaaccagcctcgccaagcaaaggagcatcatcgatggtagcatgagcaagagctcttcagaggatgacaacatgcagctctacatgtatgtacaccatgcctacctcatatagtcttatcatattttcttggctttaatttgatctgatctagctagtttaatctatctaagtacattctttgctttgtgacaggatggtgtacaacatgtgcacgcagaagccacctcataactaagcacaacagctctatgaacgctacaagacggatattgatggctacaacagctctatggtatgaacttgtgtttgtgctaggtgatggcggagtactcatagtgtctttccacatggttgtgtgagatgatcgttgtcgatgggtaattaatggtgcaggtgttgccgtcaatgagacagataaatggcgagactctattgaaagggttggttgacaggtggcggaaccacaagaaaattgtcataagtgagacgaggttcttcttctacctcgaccgttactacatcttacggaagtcacttgtcccacttgaacaactgaacttatgttcttttcgtgatcaggtacgtcaacctctattgtttctcccgtcatgtgattattttacatgagtgtatgttattagtgcacatttgctgtgcttgatttggacatgccattgttgtgttcctttttatttgtgatatataggtatacagtgagctcaaagataaaataacaaggactgtggttgacatggtgaggctcttgttctgttctacgatttcttctaacacttctgcacttttgcagaggtgaagcgatgatcattaattttcttttttctgctattaatttccttgatttgtcagattaatgatgagagggatggcaaggttatagaccgtgatcttttgaaggatgtccttgatgtgtatgtccagattgggcttggcatggagtgttacgaagttgattttgaaaatgcgtttcgcgagagcacaagaaattactactcaaacaaagcccaaacttcgattttggagtgcaatggcgctgattctcctgaatacatgcttaaggtatccattcagagttcatagaaatcatgcatagatatagtctgatcttcttgatgaagtctgaaggatattatttaattagttgtgttgtttccacaggctgtggaatgcttgcaagccgagctggaacgagtgtcacattacttgcattcttcaactgaaccaaagttgatgcaggtaagtgttgagtagtggtttgtgcaatgactttctgttctaccatcttttttaatattatactgagtttcacataaacgcatgcaggatttgcaatcagagttgatgattacgcccgtggagacgcacactgaagaagctgattaagttattttcttgcttcaaaggaattgtactgttgcttttccaatttggttcatcgtagtaaactctgatgcaagtccgtttaactaatttggattttattatgggagttgcagattcccactaagtatggatgctttgtgtaattgttagacttctacagtaattgttatgatgacggccgagaagaactgaggagaaaattaaataggggaatcggggagaagcaaaagcatttcagtattttctccaccgttaacgatgtgtttggctatgtttgttttttatgacggagtgcaaagactctagtcgttgaaacaggaaaaaacatggagcatacttgttaggagctacgacttgcagatcacgatcacgcagagcgtaggaatgctcgacgggaggacgaggtctgtaacctcgccgccccggagccgtgttgagaagacgaacagaagaaggtagaaacagagactcggtagatgaatataatttcttgcttgccttcatcctgaattcctggctctaaatagccttttacacttgaactaacatttgctaaaattaagggataacaaactacttaacaacttaatctcaacagaataatctaatcgccattttcttgcgggactgttgctcgtccggcacgatgttcgctcctgtcccggcgtctgcggaaggaaatgttggaacattcatatttcgttgcttacataagagagaacaaaaaaatgcatgcattttcgaggtttgtttacagcatagtatataataactctaaacatatgtaactgtcccaaatacacttcatctgttcattcaaatttgttttttttttacttttctcaaaaaaaagtttataactcatacagcgtgcacttgggcacttctctaaaagtttaaaatcaggaaatctaaactacaccaaaacaagattttctttccttctcttattcatatattactatatttcaatgcacatgcatccctttttaaatcctaagagaatttcataattaatgggctaacaccctttggggaaaaaaaaaggcttccgctgttcggtccggtctcttgctgcttgtagcatccatcctctcttggctggctgtctgtggaccatgcctttcaggctttcactgcattgagaacccatttagtacaactcctactctaaccaccctatcctaatctatactttctttaaagttataacccactaactctaaaacttaacatgtaaccatgccacatcatcacccactaataataattacatattcaacctcatgcaagcatgcaagagcatctacaatctatttaattctacaaattaacatgcaaacatattcaatcaccatctctcacatcattttcacaatagttttacaaatctctctatcatttttataatatttaatatatacttatcaaaatgttctacattaaattgtgaattttatttgtttcatgataaatattgataagccctgagatttgattatttttttctttttactcctagctgaattgtaataaaaaaataatattaaaaattacttagtaatttctatagcaaagtgcggggaatcccctagtagtagtaatttttaagaacggagtgacagctctactctatatttaggatcttgaaaagtatttggtacaactcaaatttcacaggacaaaaaatctggagtccaagctataccaaacgagccctcagttccatagaaattgaaagtttggccttatgatgatggaaagctgcaagttcatagagtttttttctaagccagctcctttcaaagcctagcacttttagcgtggataatgatataacttataagagcaggtacaatagcaactattagccagctataaatatattttaatgagatagaagataagagagaagagcagtgggctacagatctgtagccagctgcagcacggactccatgacacagtatgtgtatgacaagtgggaccatatattaatagtatcttaaacaactattgtatgaattggctattagattggctatagatgaattggtgtcaacccccgattttggaaatcgaaaatcttctgtgtttattagtaccagtctctggatcagtagttggtacacacatacatagccgaatcacaacatatcacgaatgaatttaggctaagagagttaaatgcttacattaaggccaggtaggccaacaactatcagagaaacaacaacggaagacaaaataatataagggcccggttgacatgccacaagcagtcgactggggaacgagacctagaatggaaccgcactccggtcatcttgttaggtacgcaagcgtactaacaagggcttctcttcaacactctgctaaaagatatatagagagcaacaatgagtacaaaagtactcagcaagccaccatacaaaatgcagtaatgtacaggataatacaaggagtggctatggttactttgcataaagctgagtttccaaatatcatttcacaaacctaagacctagcataaactgatcaagttttaattccattgttcattaaacagcgacggttctatccaccatctattgtgttcctaaggatagcttcccgccactggtcgtcatggttttctggggtctaccccttctcgcctctcgagaagttgatccaccggtacaaaatcatcatgcatatcccatcccattcagattaagaaattagagtctagccaagtgtaatacgcgtctcggtgctcaataaccgcgagcacggctattagaatagattgatttactcacactgcagtggatgtacactttacccgtactccgcgacttgcccaacacatgagcctacgtgtaacatactagatttttcagggtacaatttttgcgaaaatatttaaagttgttgttcttcgttctttcgaattggagcctcccaatccttatatttctttagttccctataagtttccgactcccacataattttgtttagtttctctctccaaaccaaatctgagatatccagagaaaattctcaaaatcatcagaagagcttgtgttttttttaagttaaaccggagtcatcatgcaaatgttctaagatcccaaatcctatcaattcctattcaaaaatatcctaccaaaattccatacaaaaatctctccaaaaattcaaatagatcactgtgttacttctcaggcagagttccttgcaatccagtccatattccaaatttcctttcccttgtctctttctctctgttgggccattctagctcatctcctggcccagccgaggcagccgccccaaccaagccgctgctcgcttcactcggtccagccaccgctcgcgctacgcgcgcgtcgcctcgcaccaccctgcgccttgcttgcgcccgcacgcgcttggcccgcactagccgcgtgccgccttgcacctgcctgctctgcgccgcatgccgccacgcgcgcgacacacgctcgcttgaagccgcacggaggaactcgatcagatggtgtagacgttgtcgcacaaatcttaaaaaccgagcaagcaccactgctaccgtcaatctcaatctcccactgcccaactatttaagcaggcaaggtagccatgctcatccttttacccctctctttctcctttactcagaaaggaatcgagttcccaaaatttcttcaaactgccgtggtcgtcggcctatctgtcgccgcaggccaccggtcgtcgtatcctcgcgccaccagactcttccagagccggtgaggccatctccttttttttcccctcctctccatgcttgtactgaggtcctcgcatgctcctgtctgccaccatggctgccaccgtggtcggcatggccgacgcttcatctctatcaactaaccaaaaaaatggaaccttctcgtccgggaacacgttttgacgcgctcacccagccacgttcgccaccggagctcgccgctcaatcttctctctccttcggggcctaaatcctatcattcgcgttccggccggcatgaacatcctctctgagaaccagcaacagcttcgagttcgcagtacctgggaacgaaattacctcaagacgttcttgctgttccgccacaataaccatcatccaggttttccctttttacctctcattctgtctgtgttcgtggttgacagaggaagaagaacagtactagattcaatactgttccaccatggtccaacctgaccacaccacctgagccagcccagtagttgtcaaccaaaagaaaactgattcatatcaattcttccatcagtgatcacttccagattcaaacccaatcaattctagtctttatctctagtatctatagcattaatcccaaagtgcaaccatactacacataccatcaatcataactctaggataaatcgtttgccatccaaatcaagtcaactctggattattattttcttttgttcgggctatgattcacaatatttattttatcgtttatttgtagtatttttattataggcttatttggtcgtttcttcgtgtgcgtacgttagatcgtattgaaaatcccaccgggcacacaggaactgaagtggacctagaaggctacgctgaagcttcagaaggccacgttccacaaggcaagccacagttccaatctttgatcatattgatacctagtagagaaccacttagttattttctgcattgagtatttataaaattattttgcgtatgaattatttttgaataaacttgttagtttagttattacccattattacattgttattattggccaaatccatggattgctatatcacgtcctttgataacctaggtgtagatttatatacttcacaataatattctagtggataagaccaccaaatatctatactcatatacatggtttacccgtcatcacgtggtggcgtgtcgggtgatataaaatgtgttatttgatatgagtcactcgcctggagtgatatggaagattaattccgggtgaagatggatgttgtggtgtctgaggccgtgcatattgttatattttttttgtggaaagtgtatatttacacttgaagtatgcacgggcctatgctagttttggtggctttccccggatataaggactacccccttatgccatgaaaaatgatgtaatttgcgcccatatacatgactgagtaatcagacttagcctagtacatttgtcccactatatgaaatactgtagggtggctctatgagcaggtttggggtggacatgtggaaggggcttcggccaggttgacatgatccgcaatggtggaacccgtgaaagcagcgaccgtctagccttgcttaggcccagcaagtgcccgactactaggacggatcaatattccactgggcagtaaccagtagtaagtgggactctcgaacggctatgttgccctcagcctagctagctgttgacatcaggtgggtaaagctgggcagtctctgcagagatgagtcttaaatcattcgaatgtgccgtgcttccggttaagaagctatgtcattgggtgattcctatttatcatggtatgagtagattttaaattaaaatatggaatatgataaagatgaggatgaatggtgattaatattgctattattttaaaatgatgatttacaattgtttgcaaatgaaatattttacaaagtagggaaaaactatttataataggcttgttatgaaacctccttgatgactatattctttgtacgccttgcatatattctatttgtattattatgggtgtggcttgctgggtacctcggtactcacctcttgcataaaatgtggttcagacgatcagttcttccctgaggaggcgcaggaaggggaagaattctatggtgctgacgagttcttgttctaggtcgatttgctctcaggcattgcctgtggtgtttttatcctattttgtgtttgggtcttttgtttgtagggagtgtgtttggcttgtcggcccctaaaacctgtcttagttatcttttatgtaataatttctgtaaaaacttgggtatatgtatcgaaagctgttctgtatatcaatctgtgcgcgatcgaaatcttggacggtcgcgggtggtttcgggataccatactcaaaccgggtatccccacactacgtcccaatgaatgagacttgccacgacaaagcctttcaataacctcactttggcagtactcgctccatgaactttagtcctcatgcactctaggcgtccaaggtttctagcactgagaggagttctggcgctccccagggggaaagattcacacattcattaagttatagttaagtttaggtttgcacatggcagtcctaccgatggtgacaccactgtaggcacccgcccctcgcggtcctaccaatggttgccccaccgtaggccctgcctcacacacaacaagaaaaccactacggcttgggtaccgcctccgctcggctctttactccgctaggtctatacccacacgagaagtacggttgtacgggggtcgtttcatgcttaacttcatggctcggtccttaattgaccagggacggcactagcctttaccggacaccacccaagtcctccagccgccccagtcgaaaacagttgtttagtttaatttttcctttcacaaatcatgtggcgctcatgtctccacatgtcgtatctcaactaccttccctagggtagttgcccaagcatatagcatttgataaatatgagaatgcatgattctaaagtagcactactaagcttttgtcataattgactaaggactcatatgtaatcatgggtacaagaaaataatgagataagcaataatcaaaggcaaggcataataacaagtaggatattcatcattgcatgcaattttatttgtaaacaaagcaatttcgcaattaggatcaacatgctcaagggatggggtgatgacttgcctgctcaggacaatccttattcttgatataatcttgatcaaccttcacctcctggaagctgcatacgctgcctcacgactaaccgatatacagattctataatacgcgtgaagaaccaatattcaaacaacaatcaaatatgcacaaacaaaatataattgtcggggtcgaacctagggctgttcatactactcgtgtttgcaaacggataatctcataatcattcttattgtcatggcggcttatttaggagctaattatcataatataaatgggatacacatttcgttaattcggagttgatctatctattgagttatagaagggatatgaccacatatatatgcttctaattagtttacatgggttttacagtgataaagcatgttaaagagaattattcttctacctagtttactgtacagtaccaattttatttattagtacatttttaggtcaaccataatctaatcatttgatattaattatgtaacaattataaatatattttattaaacagttaattatataccattggaaagcttatgaatttagatgaattttaggttcaagtttcattcaaattggagttaaaatgagtaagttatgctagtttaaatatccaaatttgaataatagcaaaacaatactgttcattaccgatttatttttattccgaaatccatctcattcctaatagcggctgacaggtggggctccagggttctatttgcttttcaccgtattatttttcttagggaaaaacaggaggtgggcccatcctgtcatcggctcggctgagggaggtcgtcttcaacctccagccgggcagaggcagcgcgcatggcgcggctgggcgcagccgggatggtgcgaggccggcacggaagcggccggaaagatgtggcgaggctccggcgacctcccgccggtggcgacggctcgccttcctcaccgctcgcgtgctgcgcgccttcgtcgacgcccgcaaccgcgagtagttcctgccgagcaaccggtctttccgccacctcggtacgtgttcgacatgttgcgcatatttgatctgttcatgttttactgcttagtttacatgtgtagatctaatgatgcgttcaatctagtttacatctgcaatgtcatgatttatttatggaataaattaaatcattatgtgcttataatttcaacagaagtgaccttgagccccccgactggtttgaatcccagtcagagagagagtttgttggagtattcggtgacgaggaggcaaaaaatctcccaaagcgaagatgaagcgagtgactcacgaagttgattccatcgcacttttcgacaggaaactcgacgtcacccctacctggcgtgccaactgtcaaaacatgaattcggcaataataaaagggggtagcgcacgagacctaagagtggatggatgcggagacaaaggatttagacaggttcaggccctctcaataagaggtaataccctactcctgtttggggatttgaatccgccgggtgtagtatagatctgacgatcatatgtgctcatgccccctagagagcctcctgcccaccttatataggatgggggcaggattacaagatagaaaccttaaccaatatggtatcggtttcctaaatctaatttacaatcttatcaaactaggactttaggccgttccataatatacagggaaacgtagtacccaagtcatgatccgttacatattccatagatataagttatcccctataactagtcggataaccgtgccgtgtgggtatggggtacccataatctcaacaaatggctaggaggagctccgggatagcatgtccaacgggagcttgtcggcggcacaatggtggccaggtcagcacggctatagacactaattgcacaaactggagctggcgctagttattagaggtacaaaggatgctacgggcgtgagagtgtaccatgagaacgcgagacggcgaaaagcggcggagtagggctcgatgtgtcgcagaacataggcagacagcattgacggtgcccgaaagtgctcgtcgacgttccttgcattaacgtccaacctccccaatggcgacgacggcagcgcggctccgcctccacttcctccaacctccaactccggccggggagaccccgcaatggtggtttctagtagcggtgagatcatgcatggaaggtgcttgatgaaatgtattcgggacgaaagctgagaggaatggggattttactgggggcttagcttagggtgtaaggaaaccatggggataagatcgccagcacatggcctggatgagctagagctctaatggcgatcggataagagcaatgaggtggatgacgcgactaaggttcatctccttctccattaaggttctatggctccatcattgtgcctatagcctatagtctgcgagttttagtcctagctggggaaggggactctgttttatccactagacataaagaggggcgccgagacatcattggctgtggataaggtggcggacgtggccatggcgacgcgcgcacatggaagctgtggcggaacggcggcttggttgggcggcgggcccacgcgggcgctgtgcgccgtggtgcggtgcacgggaggcaggtgtgaggcggcatgggcgttgctggcgcggccgggagcgatgtggtgcacgcgatacataggatcgaacggttggcagacaatgtacagtagcgcctagaaaggagagaaaaggaagaaaaaggaaaaagaggtagagtggaggggctaaaatgcaaaacagttagaattggattttgaattgagatgtagctctacacattttggatttgagaattcaaatatttatttgaatatttatttatttattcatatctctaccaaatgattttacttcccattagatcatcagaaattatccaatatacttggaggctttgatagttcaaaaattaattaaaatattcaatgtgacaatttatggtttggcaagcaagaacaaccataacatctagcatgatgcaaaagttttaaaaagtttgaaattttagtgatttttattatcagggattttcaggatgttacaattggagcgggccaataggttaaggcccacttaatcaagactagttatatttatgtcttaatgtttagttttcaacacatgaacaatagggtaatcttggtgtctagaaaaagctgccacataagatttttgtaacgtggaggcaacagagagcagggagaagaaagttatctaatgattatcagtctaatagacagtgcagaaatttcttggccaataacttgaataggcaacctatcaaaattgtattagttgttagtgatcatttaaaccattgtttgtaccaattagatggggaaaaataatacaatggttaaaaggcaaatgttattggcacatccgttcttcgttgggtttgatggcttacaaagatgatactccctctacttttagaatgtttgacatcatttacttttgaccatatatttaactatttgttttattaaaaattatataattattatttagttcattgcggtttctttatacttttttatgtttacatataatttttaataaaacaaatggcccaaaattcaacaatgtcaaacattaaaaacaggagggaatattgttttctataagtcaaaatttcatacagattctaagggaatatattcgctaggcttctgagcatagctgcaaaagtatgatgtatacaaataagtaatgtgtaaggaatgctgttctcttgagattatagtcctacaaatttttatcaattatggatggaaatttaataataaagttcgctttgatgtttggttcatctatgttttctatgtcggtcttctcatcatgacgatgtgtgatgtcttagcttgataataactggattagtataacgaattttggacagaaactcttgagctaaagactgacatttatttccattatctaaaaatattggtaaaaactagttatgagggggcaccccaattagcatctcaccggctcaccgcttgctacaaatgtgcaagtagatgtggattgccggatttcttttttcataattttgtaggatttacatgcagatcagttcaattcacgcaaatgttggagaaaaaaaatatatcccccgtgttaaaacatgacttctgtcgatgtgcatgtggtgccattcctgaatacaaaatagaactttatggcacaatgcagcaactggttaatatcttgtcctgtaaaactagataaaaagggttgttgcttgagcctggaagtagaatctgatgctcgtacttgatggagaccaacctagcttacatgcgactgcgtttgagattcctccctctaaacagaagttcattttctttcataatcaaagtttagttagtatggccatgtttgggaagctacaaatactaaaaaagtagtaagttctagtacaatctagagaaaaagtctgcagtttggagagttttcttctttttttttttactttggaagtttttcatagttctgtattttccctagctttattgccaattttattcagaattttatttttattccttcgggttttcatttttgtttcacgtgtttttgtttttatttagattcgtgttttcccatcctattgtacctatattagttctcaagttatgcatcatccagacctaccattttttattttaaatatttgtattcgtcataaaactgtgacagccacacacccacaccactcgaggtggcataggaaattacagctgtgacttttgacaatgtcgtcattttggtttgcttgcttagaagttttgttttaaaaaagtatgttttaaaatttagattaacaaaggttcaaagaatataaaagcaaatgtcagaaaaccacatttatacttagcatatgacctacatattatggttcagggttttataaaactccatgttaaacatatggagcatatattttcttaaagtattcgtcttataaagtgtctataaaatttttagttactcatttcttaatgcatgtggttagggtaatttattcctattttgaataatattttttacatatgctaaagagttaggattctaataacttcttagtggttatgtgtcacaagtcataatccatgttgttctttttaactttgcttgtgagaatgctatgtaacaaattgccatcctgttcatgacggacgagataggccatcaggcaaccaacattgaatcacctattttctctccttctacttatctattatattgctcttcctctctcttatccacaagagcacacgtaatgccattgctcagctagttgagaggagccttcgtcacctcggatcaacgcggtttgggagaggggggctcccaaagagagagcacacgtaggcaagggattctctcttctctcacccttctattataatgagagggtggagacggcggaggccactgagtggcgccccaatgatggtgacaagcagagggtgcaggccatcgggtttggcgcgctcattgtggtagagaccatccggattttggtattgtttatccacgttgggtgagatctagtggcctccattttggctggaagtacacatttcactctccccttctcactcttcgtccttgccgcctatgacaggatgaacaaactttgtttacctttcttctcactagcaaagggattcatatccatctggctttcttcctcaccgttgatacctcgcaaatatctcatgataccttgcaagtattacctgatacctatcagtatactcacagatataatcccgttcaaggtatgtgatatagcagttccctaactttgaggttttcgaaaaactaattacaagaaaaaagaaaacttcttacaagtccctgtaaaatacacacaacctcttcttatttatccataatgagtcactaacaagtaagccaaatacctacccattatattatgagtaaattttacattgtgccacatattttgaccaagatttcataatggactagggttacattaatgttttcacctagcaccatatatctttacataagtttttagtttggactaggggtgagcgaagcaaggaatgtgagaaaatttacacagggatagttataaaaagcaaaacattttatgttttcttccttcttttcagtgtaagtggtaattaactattttctattttatttttcttcatttgtccctatgtatagatcattttgtatcacttttaaacatatttgcatcattattttagtgtgatttgctgaaaaaagttgttttgtgatttgctatttctttctaaagatatttatcttaatactatagaactaaaaatgattgatttgaactagcttttctctaataacttccattgatgtactcgtgcaaagatatgtggtgctaagtgagaaggttggtttggcttttgcccattgtgaaactttggtcaaaatatatggtgaaatgtgaaattaactcttatattatctttttttttgtttgaaactttggttaacttcatattaaactaactgatgtcaaaaaaaaaattgggaaggaggtagtaggttatcgagagaatggaagctggagtatcaggcaattttcagggtaaaatatgaattttacccttaaaaattttaacctggcggtcatcgtccagattcgttccttgagaatagttttactccactttgcttccatctgacctctttctctgctcatcctcccctgcctgtcacctcgagaacgccgggccgtccgtccgtcctcttctccctcttcttctcgcatcccgtgtcgtcttctcacttcttcccccacaacccacaccgacaaccaccaccactactgcgtgcccacgaactcctcctccctcctcatcccagtcgcccaatcattccacgcgacgtgaccaaacccccctctactctatccctccatctcttcctctcaattctcaatcttgcatcgcgttctcgattcaggccaggtagctcatgttgcacaggcctcttcttcctgcttgctgtttctttcagggaattctctttcggttgggttggttggttggttggaagtcgctgttcttgacgcgtttacttgggttttagcgaaagctgctactatctttttttttcttggtttctgacatcccttctctgcatttgggttcttgatctgattttatgcctggctgctttgcatttggaatgctttgattgttctttttttttgtactgaatttggttgcattaaaatctgtttatatgtgtactgaattcatcctctcagcttcccctttctttagggctttctggtactggatttgggtgtcgtaaatggctagcttaatattaccttagcatttagaccacattcaatgcacccgtactgagccatcttgcaatgctgcctgctaattttcgtagcatttccttctctctagtactgtatttgggtgttattgtggataaagttcctgagctttattccccaaaacccctctttttttttctctcctaatgtatggtttctcaatgcatttcatttgggggcagttcttgcagaccaggtgaacttgttttttttaatctccctccttttctctgatgaaattggttttcagggatgctgcattgaccgtgccgtttgctcagatctctatgcacctctggcatttcccctctcttttgtttattcgatttgagggggtgcttctccatacattctttgttgctttttcatggccatgttgtgatttatctatgatatacagtaagttattatgtaacatagattcacaaaaaaaaataaatagtatctcttcttgtcagttctagctgcatcttgtttatgccacccatgtgatgccttgagttgtatttatgtgagtggttgacttagttctcacctcctcaaatcattgtaataaattttcctatgattttgatgtggacagatgcttctcatttcagttggatttctaccccatttgcagcttttttgcaattagattggttgtaggacttggtgttttggtgtgctttatccttaatttttcatgtacagtagctgccttttctccctttgttagttagtactaacttactaaccgcttttactaattgcaggagcttttctttgtcaatgaacttaatggcagtcgacttttcgttggataattgagagaggactaccagattgtgcaaattgtcaactaggattactatatttaagctcagagtgtatcaactgttgaagcaatggtgctaggcctccgaaccaagacgaggaaggatgcatccttccatgtagacttcaatatcttcattcaagaaatcagcccatggcccccttctgagtccctcaagtctttgaaatctgtggtcctcttttgggaaaatggcgagcgcaattcggggaagaccaatgctgttgcgccttcaattggatcaggtaccacagtagggaaggttgaatttaatgagttcatcaacctacaggctgtttttcagaaggaggggtcatccaagagtgggaaatggcagaagaacctgcttgagctgaatctgtatgaaccaaggagggataagctgaaagggcagcatttagggactgcgacactggacttggcggagcatgcgatgtttcacgaggacacgagtgttcccgtgccgctcaactccaagaggagcttgagaaacaatgtgcagccgatggtttatcttcgaattcagcctttggatggtgataactcgagcgtttcctctagagatgcattgtcaaaggaggcatcagtggacagggattcaaaagaattgatgtcggagtacactgaggatactgagtttgcttcatttactgatgatgaggaggaggaagctccatacccttaccgctcagatgggaacttgcgtgcaggtagtaatagatctcaggagtctctcaaggtaaaaaactgaactctattcctacatgtgtactaggacctatgttgtgtctgatcatcttcccaaaagatgttttttaagacagtaaatgaagattttttttccaaaaaaaaacagtaatttgggcaggccattggggactatctctagccacatttactaaaaatgtgtctgaattagaaaacaagttttcaatttaataaagttttacatacttttgctctcaatacaattcattgctgttggaatttctgaatgggcattggtggttattttcctttacttaattatgtcatgtaaaaacttaaaaaaaaatgctatctgtaaacaggattttcacatgtatgattagtactttcagtaagaatagtattgtcgaaattgtgtagttcagttcagtttttttttccttccactgcatgttttggcgtctagttgaactaaatagtcttcttttatcttttatgcatgattctgaaaccaatttgaaattctctaggggaaggatgtaagaacagttggtaatgaaggctctagatcaccatttgattcccagcgtgaaatgccatcttccagtacaaaagtgaggagcgaagaagttgaaaagtatccaattcaagtccaaaaggcaaatggccatccagggaatctgtctcttttatcagatttgcctggtgaacaaactccatcttttccagcacaaaatgctctcagagctggtcgtaaaatgtcatttgcttatggtatgagtgattccaaccaaagaaactttggggagagaacatatagcactttaactagtgatagagcaaagaatatgaggtacagtatgagagttccggattttagtggtagtgtcattaataagaaagttgattcccagaaggaagaagtgaaagaagttgactcccaagatattgcggtctctaatgatactaggactgatacctatgatggagcacaagctcaggtgccaatacgcatatcaaataatcgtaacgacaccaaagttcgagaactagaacttagggttgagttgcttgaagcagagttgcgagaaactgctgctgccgagataggcctttattcggtgatcgctgaacatggtagctcatcaaacaaggtacacacaccagcacgaagactctctaggcatttcattcatgcgcttaaaaactggtctagagacaagatggggagtgcagcaagaagtgcttcctctggtttggttctggttgcaaaagcttgtggatatgatgttgcaaggtactacatgagacttcctctcatgctcaacattcgcattttctttagataaatgaagcttttattaatctcagacgattacatcaagtgtgatagaaccatactaagaatgctcaaacattcgcattttaatagtgttttcttttcaatggaataatttgcaatgaattgacaattgcttaacttctatatgtcatcattatatagattgcagtaccctgtaaaagtagtttatgtaacttcggaattcctgttgtgttattttatttattgcctaatataacttctccaaccaggttgagtttctggctatcaaactgtgtggtgttgcgagcaattgtttctgaaacttctaaacaatcgaacagcaatgctatcaataatggttccaaaacaggaccaaggaggaattctgcgtcaatgtgggaatcgcttaaccggaagaaaggaaaattgctttcccctgagtttgataactgggaagatgttgacacatttatagccgcacttaagaagattgaatcatggatattctcaagaattgtcgaatccatttggtggcaggtctgcctcgttattagttcaatttatttgctgtttgtgcccttgtctgtaagatttgttaaatacattgcataacaaatcttactttgcaggcattcacaccacatatgcaatctgctaatataagcagtgaaccgatgcctagttcaaatgcaaagaaatgttatggaaggattactgttgtgggcaatcagcaacaagcaaccttatcaattgacatatggaagaaggctttcaaggaagcatctgaaaagctttgcccagtaagagcagctggacatgagtgtggatgtctccctttgttggccaaattggtgagctacatatgattaatcaatagtttgaatttcctccttgaaaattgtaccataacttgtcaccttgaaatattctattcctcaaaatgtgttttccctaaaactattcaaattgtattgttcccattgttttttttttgtccatctcaccttaatttcttttatttaagaatgttttatatgatcagccatatcttgatttaacactcaaacaatgagaatgagaaaatatagacttcatataaatattcaagatctgtactaattcctaacatcatttctctttgataggtgatggagcaatgcatagctagattggatgtagcaatgttcaatgctattttgagggaatcagatgatgagattccaaccgatcccatgtctgacccaataactgatcctaaggtccttcctgtaccatctgggaaatttagttttggtgctggggtccaactgaaaaatgctgtaagtgaaattaaaagcatgctcattacgaggtcatgttactcgtccaatggagcctatttattttatctggctttcgatcaaaagctctgaccatttgtctttcctgctggttatagattggcagctggtccagatgtcttagtgactcgtttggtatggatatggatgactatccagaagttgagagtggggatggtgacaatggtgctgccgaactccgcaaaccattttatctcctaaatgcattgagtgatctcctaatgatccctaaggatgtgctcatggaaaccagtactaggaaagaggcatgcactctcatcttgttcaacaaatgcacattatttccatctgaacttgtgaagttttcttttctggtcataatattgttttctaattctaatacgatcatcctgcttttcacagctttgtcctaccttcagctcatcaatcatcaagagaatccttgatggctttgtgccagatgatttttgcccagatccagttcaacattccttgcttgaagcactggagtcagaggttagtttatttagcattgggctgcattgaaattgtatgttggtttatgttgcaaacaaaagtagatgattgcctgattacctagtctcgtaagtatcagatatcaagtcatgacagtgtgattgaatcttacgtttcatggtggaatggggaaaaaaaaggcacttatgtgattgcatcttatgtttcattgcacatggttatactttaggactgcaaaataccttttactagttatattgggcatacgcacatcgctttttttattacgaactacgggtaacaaaaaaaggagaattgatgatttatgccacttctttgtgaaactaaatatggaacttggttgctatttctgacaatattagcttgcgataaacttactctatttgtacaaccgagttgttttcctggcataaagttgtagtttgctagtttcatgagaagtaaacctaagcattaccttcattgaatgtaccatcatgcatcaaaccacaatttgaggaaaatgaggaattttcagttcaaccacaaacagtactggactattactcatcaaacattcatgctgttaggatcatttggagggtaacaccaagggcatccgagcggtcccgtgcagcgcgtcacccatcctatacccatacccggcatccggagcaatcctaagcatgatcggcgaccccaggaagagcgggtcggccatcctccgcaagtccaacacgagcgacgacgagctggatgagctgagctcgccattgaccttcatctccaaggcttcgtcgaacccgctcgcgaagctgaagcagattgggaacccaaacagtgccaggtacaggctcctccatgaggtttggaagctggatgaccagtagtgaccagtgagggtgtgtcctaagcatcagtgatgctttgcttctctactgtacatacacaagcaatctctttctgatagtctccaggtaatttccagctctcttcggaagcaagaacagaagaagaaatttcaagggttgggttaaaagtaatatttttggtgcttccatgtatgtaagaatgctgtataacttgcatcttgctccaatgtgttaccagctccctagatttcccatgaatttcagtcacactattaccaggcagaagtgtaaattcagcaaaatctcagccgttcatcttgtaatccattggtcgaaatgatgtagtcagctacttagtccaatcatcctccaaggctccaaccaaaagaattgaccgagttcttgaaatggggtgggtcgaatccaacggtccacaagagtcggcccatcaccagtgactccgtgcactgcattgcacaggggcagtgaaaactcttttagtaccacaccgctttcctacctcggacgcatctggtttataagctggagcgaggcgtaggcccgcgacgccagagggtgaagtgtggccctgtgggaggggcacccacgtaacaagcgcacttcacgtgcggctgtaaccctaaaccatactgcctctccctcctccgtggggtttgagtcgcaggggcgatccgcactttgctgcttgatcgatttctaaaggcgtgttctgccggtgctttggccttcataatataagcaccgatgctttgcgtgggtgcccctcccaggagaatagggttggtggcgtcctgagtagtcagggccctatatatccccctatttagtagccctccttttttttatttttgttccttttttttttgccattcattgattgaactaccaatgcttaatcccaataagatggtctttttttttgtcgttcattgattgaactacaaatgaataatcccaataagtagggatataagtgggtaaacccactatccacatttatttttccgttcattgattgaactacaaatgcttaattacccacttgctatttcattcatcacataatagtacaaattttagaagaaaaaaagactagaagttcttttttttttcttttatagttcattgattgaaatgcaaatgcttaattccaataagaagtgggaatataagtgggttagcccactaggccactatccacgtttatttttccgttcattgattgaactacaaatgcttaattacccacttgctatttcattcatcacataatagtacaaattttagaagaaaaaaaagactagaagttctttttttttcttttatagttcattgattgaaatgcaaatgcttaattccaataagaagtgggaatataagtgggttagcccactaggccactatccacgtttatttttccgttcattgattgaactataaatgcttaattacccacttgctatttcattcatcacataatagtacaaattttagaagaaaaaaaagactagaagttcttttcttttcttttatagttcattgattgaaatgcaaatgcttaattccaataagaagtgggaatataagtgggttagcccactaggccactacccacatttctcacatgattaaaataagcgggcaaaaagaataccgcttagcagctccgcttgcatccttaaggttgtatttagatccacgggtataaagttttggcgtatcacatcggatatacggacacacatttgaagtattaaaacatagactaataacaaaacaaaatacagaatctgtctgtaaactgtgagacgaatttattaagcctaattaatccatcattagcaaatgtttactgtagcactgaacgcgctgatgaagcctagagggggggtgaataggctatccctgaaaacttaaaaacaaatcgcagcggtaaaattcaaacagacccagaacatactcctccctcatcaagacttgtaaacatactcctctctcccgtcatatgattggtgcagccactgtccacaacccaacttgagccatcggaggagtatgcctataaaagaaatcaagcttgggatttaggaacccaaacttgtctaagtttgggtcccttgatgttagtcaccaaaccctttggcacccacacacaagtgcggtactcatcattgtaattcccattaaaataagcaaccactttgccctctgaatttttggaaattacatataaatcatagtaaagaccctctggccggaacttcctggcattatacccggaacttccagtcagccccttcggcctatcagaagcccggaacttcctggaacttcctgtcttacagggcaggaacttccggtcattttgcccggaacttccaggtgtctgaccagtgaggggacaagtcacctcacttgcttgtggagcttttccttctctcacaaacattaagcattctttcacatttaccatcacatgcttagacacaggacttccaccagaaaacccgagcccgtgtccatccttgttaggatgagcggtgatggtcttgtaaagggcatcttttgaatggtatgtcttcatgcatccatatttcaccaatgtgcccaaccttttattctctttcttaagagcttgcatagcatcaacattagtagcatgagagttcaaatcaatattgtaacacctagcacaaccattgctagtagatggattggaagaattagaaaccacatttggttgagaagtgttattccaaagagtgtcaaattgaacttcaagatctttatgacttttgtctaaactagcaaatttctcttgaagagtttcattggcatccctaaggctagctagagaaccattagccaaattaagctcattagctagttgttcatttttagcacattctttagctaggctctcctctaaggcaaggtttcttttcttctcaagaataagtaattcttcttgcctttcgagagattgttctttactatccaaagctctcattaacttagccaaatgttgcatagcgggtttgctaaagctcttaagcacatcatctaattcattatcactttcctcatcattagaatcaacatcaagagaggtgtgagagggcttttgagtcatcaccttacggccttgagccatgaaacaagagtagtggtaggagtcgtcgtcgtcatcactcaagttgttgaagagacactccttacttgaagaggatgacttgaaggcgacggtagcaacaccacattctccttcaaccttgtcttttggcttgggcttgggcttgacctcgagatcttcttcatctccggagtaccacacctccgccatgtgtgcctccgccacatgagcacgctccggcttcttcttgcctcccttagccttagctttatttgacttgggacaatcggcaatgaagtggccatattcgccacaattaaaccaagctctctttgattgcctctttcccttgtcatcatcatttctccctttgccatagccactcttgcgaataaagtgcttgaatctcttgacaataaaagccatctcttcatcttcactttcttcacaacttgactcttcttcttgttttgccttcaaagcaacttcttgatttttgatcatggcggcattcttcaccatttgcctcacttcatgagcttcctcttcttacatctcatgagacacaattcttccaagaatgtcacttggggtgagtctcttgaagtctttcctttctcgtatcattgatacaagagtgggttttcttggaccaaatgcacggagaagtctcttgaccacaaagtgatttgtcatgtcctcactcacaagtcatttaatcttgttgacaaggatcatcatcctatcatacatctcttgtggtgtctctttgtcatccatcacaaatcttccaagccttccttccaataattcaatcttggcctcacgaacggcgggtgatccctcatgaaccaattgcaaagtatcccatatctccttggcctcctcaagcccatcaaccttgttgaactcctccggactcaaggcggagagaatttgcattggaagcttgagcattgcggtggatgagttgctcttgctccaaagtgagcttcatgtcatcatggggtacatcaacacctgtacaaacaactttccaaatacttggatgcaaagagattagatgcaacttcatcttgtgcttccaagcggcgtaatgtgtcccatcaaattgaggagcacgcccggaaggcacggagacaaagttgtgagggggaatggtaagtttgctgtaatcaaaaggtatagtagctcccttgggtgatggagttcccttgctgcttgctccatcttcatttccattttccccgttctttccccctaagtccgacatcgtggatcactcaaagcggtgaagcttgaatcaaaagcaccttgctctgataccaattgaacgcgctgatgaagcctagagggggggtgaataggctgtccctaaaaacttaaaaacaaatcgcagcggtaaaattcaaatagacccggaacttcctggtaaggaactccggaacttccggtctcccaggcccagaacttccggtgttctaagacaggaacttccgggtaacagaacagagatgaaattcaaatttggaaacaggagactaagccaatcttcacaagatggtgcacaggtattctaagcagaggatatatcacagaatcatccacagaaacatcatagaaagagacgagagcgattttttcccgaagttcggatcttgcaatcctactctctgttgaggggctccaaagagctgggtttcgattaaccccttgcctcacttgtgcaaaaaccctagaagaaatccacagccttcaaccccaaacacctctacgcaaatttctagaattgagtgaccaccaagatccaactcaacctacttctagaaatccaccacaagtgtgggttgctctacttggaaagcctctagaatctcaacacaagaacttcactaacttacctcgttccctttcggaggagagaaaatccttcaaacttacccgggacatccacaatatgcaacggattctcgcaggcgacacctaaccgtcttggagatcatctccaagagtaataagcaccgagatgacagcccacaagatattccaagtgctcacccaagatcctagtcttcacacctctccaaatcttcttctctccctctcaatctctctatctcataagaattaggctctagattgagtgaagaaggtaagaaacacttgggagaggctagcaacagctctaggtttgaaaagtgaaagtggaatagctaaggaacgagctagaaacgagctgtatatatataactgctaggtgacgtcatctagccgttactcacaattttgaactggaaactagacaggaagttccggacctggaagacaggaacttctggactacacttaggaaaaactttttcacaagaccggaacttccggacctggaagacaggaagttccggacttgcacttttggacagatggagtatttgcaaaaatgactcctagggaaacttgacacttggttcacactaagagcacttgatatatctcagagcatcacctggaacccctcttaatagtacggtttttcctaaaaactcgatttcaaaagataaactatcctatgcacttctcgagttccggtccgctttgaatttgtactttttgggggtctccaagcatccatcttccacaccttagactaatgcacctgaaagttactcaatgaactcattagtcccttaaccacatttgtcattaatcaccaaaacccactagggggttaatgcactttcaagcaccacattatcagatcatggagtaattaggcttaaaagattcgtctcgcaatttatacgtaatctgtgtaattggttactttttttatttatatttaatactctatgtatgtgttcaaacattcgatgtgacagggtaaaaatttttgacatggatctgtttgcctaactcacactgaggcgcggcccaacaaaagaaaatagtagcccactaaccatttccaacaaaataataatgaaataatacggctcctgtctacgtctaatatctttagctaagatgatactctactacgtatcagagaaacaaaacaaaacttaattaattattaattaactgcagcacgtagcttcctgaacttacctaaattaatgttaacttctaatgccctaccctgaaaacatatttattccctgtatcccattatataagccaaagcccacgggtaagcctaacacggtctctaaaactaattttttttcttacaatttcttgtatatgaacaaaattataatcatataaaaataaattcaaatgtcagtttaatgatattattttcagcaaatataattcaatctattttgaatcaaatgttttaaagttaaatgcatgcgcactttatattatgggatgaaaataatattgtatttacataaatcactttccaattgatttgattgtataaatagaatacagagggacggcatcaggccgttgggaggtgacatggttcaccttaatgcaggaaattactattacctacacttacgaacataatacggtaggttatatacgataggatgcccgcatgcatttcctgagcttataataacacaacgacggcaccacatgagacaatcttattgcaatttagacaaccaagtcaaaatcaggtacaaccccattattcattacatgatcatgcaacacttcacgaaagttgtaatcgaattgagatggcagttaagctttcgaacgctaatacaactcggaaagtattcagtgcctacctgcaggcaacactgcatgaggtggtgctacattttctccaaagcacagaagtacattttaagcagaaaacaggggcttagatgcccttctccagcattgcccggactctggtagggagaccatatagcctgatgaacccttcagcatcagcctggttgtagatctccccattctcaaatgaggagatgtcttccctgtacaggctgtatgggctcttccgggacgcgacgtttacggagcccttgtacagcttgagagtcacggagccggttgttgtcgcggtaatgttctccatgaacgcatcaatggattgtcggagcgggtcgaaccaacggccagcgtagaccagctcggcgtacttgagggcaagcatgtccttccactgcattgtctccctgtccaaagtcaaggactcgagctcacggacagcagctgccatgatggtgccaccgggggtctcgtatacaccacgggacttcatgcctacgaggcggttttccaccatatcaatgcgcccaataccatgctttccaccgatttcattgagcttggcaaggagagatgctggtgagagatcttttccattgatggaaacaggaacacctgcaataataccaatctccaaatacctggatgtatgaagcttaggttagatactacagatgtgggccaagtaaaaaaaagtgtactagtgtgggcgaatgaaaaatatatcttagcaagcaagaagatgaaaaacagcacacgcaaaattgtagcagctaacaagaatttgcaaaacaaaatgactatggtatctgagcaagaatttgtgattctcttcagatagtccttgaaaattagctagtcagtactctacagtctcacacagaagttcaatcaatgcccacctaacttaactacgaacttcaagactgtatggcccttgagaattgagatagcccgtaccatgtaccattaagcgtgaaagcatactatattgaatcatgacagcaatttaagaacttcgcataaagagcatagagaatacttgtaaagtaccaaacatataagacatgattatcgcttactcaggttttgaaggtgcattttctggtgcaactgacatcatatacatatcttcctttggctcatttgctggatcttccaaaatgtcaccctgaaatgtttacataatgtaagtacttaactacaaaaagatgcagaagattgatcatgatatcaatacgatggtgtaattcattgatttgaaggtttggagcataagcaaaacataaacaattgtaagaaacgggtagaagaaaatatcaaatagaaaagatcttcagaaagactaggaaggaatgaagagtcaaaaagacagcagaaatacctcatggctaaggtgccacaaatttcgatcacggctgtatattgatttctttgtaacaggaattggcacattgtgtttctttgcatactcaatagcatcttcacgtcctgtgatatcccactccctccaaggtgccaccactttaagctcagggtttaaagcatagaatgtaagctcaaaacgaacctacagaaaaaggttagcatcagatgactgccatattaatattctaattaacatcagtatttacctgatcattgccttttccagtgcatccatgagcaactgcatctgcaccaacttcctttgcaacatcaaccattgcctgcaatggaggtatatggtgttttcaaacagaataaacaaatataaatgatttgcaatatttctgatgttacttcaagcacatcatttccatgtttttattattaaccatttgtgataattactcaattgtatattaaaggtagggtcctacaatccttatagatcctatctcacatataacaaagaaatttgacaggagaccattcaattcccatagaagcccaggaaaagttatcagcatagtgttatttattaacgctattactaaagttatcaggaaatttatcttttgccatagatttatcccactgtttctcatgttacttatgagcatgctcctgataaagctgggcaaaagatgtatttaaaatattacctttaaggaaaatatatattactaaagttctaggggattacagatagagcaactattcaccttggcaataacaggcctagccattgaagtccccagcagatactttctttcataaactgcaccagcacgcaagcaggggtaaatgtattcactaacgaactcttctttcaagtccttcacaacaagctggcttgcaccactagcttttgccttcttctctagcccttccaattcaatgtcaccctgcaaaggtatatgaatcgaagttatggttaactgaaaagaagtaagaaagtttcaaactataatgcaactttgtttgattattgtcaacaaaagaaatataccagtagaagacctaggaaccccccaaatcatgaaatttataaagcaaaaggtcatatggtaaaaaataatgtaacagccaaaagaataactaaagtactactctactaggtaacagagatactggtgagagcaagcagagaaaaacattatgaacgtcttcggtaatgcagcaggaagttgtggttcacatgacattacaaactaaaagaaaataatgcaggcttgataattacacgagtaatgaacaacatacctggccaacatcagcagtgaaacagacaacttcacaaccatagttctcccttcaatcaaacaagcaaatggcatagtttgcatgagtcaaattaatatagaacataggattgtacaaattggtattaaaacaagaagaatatatataccggagccatggaacaataactgatgtatccaaaccaccactgtaagctagaacaactttattcagtttgccacgcagtccacctttcttttgatcactactactagctgttgcggttgaaattccaccatgctcacttgcacttggcattgcacatcttatagctgcacattttgacaaaggattatcattcattgaacgcaacatgctaacaactatagacaaagatgaacagaattaacataggcataagccataaaattccctattgcaagcagtatgctatcataaaagttcatgtacaatcctgaaactagattaaaccaaacaagatgaaccaatctctttttaactgctcacagaaagatgtgtaaaactagattaagccaaacaagaggacatcaaattggctgtataagtgatttcatagtcatgtcctaacagctttttgtgtgtgtgcaattaagagcgtttgaaccaatgtggttaagtccaaggaagaaagaggaggttctctaaatcaattgattttctcattagcacatcacaagaactgatcgaaccagaaagcatagcttcacagatcacatgcttgtactaaacaggtccacattagtaacacaagtaattaatctagcgcgaacagatgtaaccaataacatgtcctacattgcacatacaggtacataacaagagacgatacatcatcatccacaagggcatgaacagtcatataccttggcttttgctccccttcccgctgagctgctgaacccgaacgatggagcctgcggcactgaacaacgccccagccttctcgtggtggtggaggagacccacccctgcacagccaaagccatccatcgatccaccgccgcaaaaaccaatcagaacgagtaaaaacaaaaaacccaacacatcgttccagtaaaagaagaagaagaagaagaagatctagctcaccggcgggggcggtggcggcgcccccaccgagggcgtgcgccatggtcgggggcggcggcgaagggaggggcgttcggagcgggaaggcggcgagggtttaagcgcggcgaggcgagaggggaggcggcggcggcggcggcggaggaggaggttggtgggggagtatttgtgtgtgggcgattgtggcttggtgatctgtgggtgggccgttgaaaaggtggtgggctacgactacgagtcggacttcttttttcttttcttttctttttcgaagtagaactaggatctactatcaggtttaccttttcattttcggtttatcaaaaaccagcaaaagaatagataaaaattggtgactttcgattaagacgatataaaaaccgagtaataccagtcagttttcccaaattgataagagcagctccagtgtgcacctaaaatcgattttaacatgaaaaaaccgaactatgcacactgtgggaagcgaaccgtatgtgtcagatgaaaaagcgacttcaaaacagaagtcgacattgatgataaaaaattacttgttgctacaggttgtgagggggaagggaaaggtgggattatttttttttttcatgggtcccacccaaaatcgattttaacgctgtaggggtcgaatcaaatgtttattcgacttctgtgaaccggacttaccgaaccaacactacaaatgccctaaccagcggtttcatgaaaaccgatcaatttttggattttgtgaaccctgactgactatgactactgcactagctagtagcctagtactgtattcggtttttttatactggcatgagaatttcggttttgcaagtgtattcggcgtggtattactattacatcacggtgcccgtggtttaaaccatgtcgattgattgaaattagttgtatacaaaatagagtttatgtctgtggtggaaatagaagacaaaaatatatactcctatatcgaatctaattctacaaggtaaaagtttttgtatactggcatcagaatttctgttttgcaagtgtattcggcatggtatttgatcatggtgtttacgtattatgatcggcgtagatttattaagattagttatatacaaaatacagtttgtgtctgtgatggaaatagaagtgaaaaaaatgtatataacgaatcaaatttcacctttacaatttattgacaaaacgtaagattacacctacctatctctatttctactattataaaaattgaaaaaaaaaattgtcggtattttggtacgtcatccgtgtatgagtcggttttttttatgttcgttcacttttgaaaatacagatctttatttgagtcgggttttaaatctgagtcatataagaaatctctttaaaaaaaacttgcatgctatcttgagatgatcagacttctaattgtagctcatagttttctagaaaaaaaatatatatccaagcgaattctcacagtgaaactattataaagattgaagatgtttttgctagtactttggtacatcattcgtgtatgagtcggtttttaagttcgttcgcttttagaaataaaaatatgtatttgagtcgggatttaagtccgttcgcttttggaaatataggagcagccgtataagaaatatctttaaaaaattaacttacatgctaacttgaaatgatcagactcctaaccgcagctcatgattttctagaaaaaaatatatatccaagcgaattctcatagtgaatttcaccttaactaaaccgtataataataaaattaaaatagcgttgctacacacgggtattttttctagtatgaagataaaaaccaagagttgtatatgaaatatgattatatgaaaatagaaaccatgagttatatacaaaatgcaattgtatccataaaaacataaactatcaggatgtgttcttcccccacctttcccaactcagctctctcgttttccacgctcacatttctcaaactgcaaaacgacatgtttttttgcaaaaatttcctatgtgaaagtcgtttttaaaatactattaatcttttttctttaaaaatgattaatacttaattaatcatgcgctaacgagtcgctccgttttaggtgccaaagggattagttcccatcccccactaacgaactcagcctaagagggtacatagctaccaggagacaggagttgtgaatcgcaagcgcaatctatggacatgcgatcgcgatctcggtcgaatctccaagggagggtacccaaccttggccgaatcgcaatccacagattgtgcccgtaccttggccgaatctccaagggagggtacctaaccttcccactagaggagctcgtgctccgacataggtcaatgggtgattagatggatcggaaagtgatgctaggttaggctgtgttcggtttcagggaatgggaactaatccctcccgcacggaaaatagagcgatctattagcgcgtgattaattaagtattagcttttttaaaaaaaatagattaatttgatttttttaagcaactttcgtatagaaacttttttgcaaaaaaacgcaccgttaagcagtttgaaaagcgtgcgtgcggaaaacgaggagaggggttgggaaaatgggtgccgaacacacccttagttaacttaaatgcgcttattcttcaccgaattatttggtacacgcttcgaaaaaatatattttctttaaaaaaatattttattatgatgtattgcttagaacacttatcttaaaatgttagttaagtttagttttttaaacaattaatttatttctataatccatggtgataatccatcaaataatctaaatcaaaatgtgtcttaaagcatgtttttttaacaaattgtgatggttattaaaagggtattaggagcttgttcctcgcaaacccggactccaaattaaaccggcgtatatattccccctcgatatttcacatgtaacttttcaatgaacaaacagcacaacagtatagaacttacaacaaacaacttgattatctacttccctcctatataccctatatatatatatcatctcaaaatgatttgatcaattccatccaaaagaatagcagccacccaaaaaaaccaccacttacaagtttcaagaaaaaaaaagctcggaaaaatatttccaagaacccaaaaaaaggagaaagaaaatgatttctcggacaagcatgatcttgtgatgatcaattcacattttgcgcaagaaagaagaagaagaagaagaagaagaagaagaagaagaagaagaagaagaagaagaagaagaagaagaagaagaagatttcgcaatggagctctgatctgcatcggttggtagctcgctcgatcgatcgatcatgaggaggcgatcttgtcgagggtgtcggcgacggccttcatcctggggcggaggtcggcgtcgagctcggtgcaggcaaccgcgagggggaacgccgtcaccacctccttcttcggcagcggcggcgcgtcccggaccatcgccgggtccacaatatccaacaccggccgcgcctcctactggaacccgcaccgcacccaccggaccacctgcggcaccactggagccaccgacgctggcgctgtgcccgtgctcgccgctccctgaccggtccgtcgtcgccgccgacgacgacaacggcgccgagaacgacgccgatgtcgacggcgacgcgtggtcgccggggccgcgccccgtcaggagctccatcagcaccacgccgaacgagacacgtcccacttctgcgccgggcgcgcccccgccgtccgcgcctcgggcgcgcggtacccgccgccgcggtgatccgccgccacggacgacgccggcttcgccgcgtacggtatggcgccgccgagcaggccgcccgacgacggcgccgccgggggcgcgtcgacgacgtcgtcggcgcatccggcgacggcgaggaggcgggcgaggccgaagtcggcgacgcgcggggtgaagtcggcgtcgaggaggatgttggacggcttgacctcgccgtggacgaaccgccgcgggctgcactcgtggaggtacgcgaggccgcgcgccgcgcccctcgcgatcttcagccgcgttgaccacgacaggggtgtttgacccggacgacctggggaaaagtcaacgagtacatgagtcaacgatcaatttgcatatggggatttttttatactggtttttacactttttttttactactgtgttagaagattaaagtggcatacaacatactccatctgttttatattataagtcgtattagtcttttttctaatcaattttttttaaatttgatattgaaaaaatatagtagaattttaacataaaacaaacacattattataatatatccaatacagatataatgaaactaattttgtattttttgcgttcacaaaagaaactaattttgtattatagatgtttaatttttctataaatttaattaaacataaaaatatttgactagaaataagttgcatgaaacggaaggagttccatagaaatttcactcgattttaagccgacaaaactgcacatggcctctcaggtcagcaaatttgttacttatgtccccataaaaaaaatactactacctccatctaatatatatatatatatatatatatatatatatatatatatatatatatatatatatatatatatatatatatatatataagtaactaaccaacgttataaaaaaacatagcaagtacaaaatactatgaacagctaagagtaatataacatgcaccaaattttaactaggacaataaacaggataacaatctaaacaagaatcatcattattttctaccagccacatgattacccaaatacaatttgcaacgacgcatgtgcaaagccggacggcagcttagccttagctcacaataagatcccaatactcacgtgcactcaaatcctcaagcagcatatggaaatggaattatggatcgcccccacgtttattagctctccagctaagtgcccagaattttaatgaccgattaactagcagagcaatgtgtctgcaggaccagatcaagaaatgccttgaagtttcaggctttcagcagacacatgatggagtggcaagtgcaatggcagggcagcactgcactcctgcctggtgactgttcttgttccccccagacagaagcaacccattgtcactgtgtttgattggattcaacatgtcccaggccccagacagaggagacataagagtactaaccattaaccgtaggaggtggatcctctgcagttgtgcgactctacaagagtattaaaagtctctggtgtatgaatctggaggaaaatgaggcccacatataagtggttctcacggttcagataatattatagaggaactggtcgctaactgtaaaaaatatgactacaaccgtgatccctcccattcaggtttttttttttttaaggaaaggcaagaggttttgccttatatatttatagagcagaaatcctcctgccaattaggttgaaccagataaaactagatagcaactcacttagatcaatgcatttgtttctatgttactcctacatagataaatagaatgaagtgacatgtatacacacatagtgataaaaatatttttttatggtgatacttgtgtaatatactgaaaattttctggctttctatgctaactaaattagtagacaccaaacagtttgttgttagcagctcctagagaatttcttaattttctcttccatcattaaaggctgtcaacctttgtcctttcaagcctaaaaccacaacacctgccaaaacaccagcctcaccagccagttctacattgtcattgagcacaacagaaaaggcactctgattatgcaattatcacctcatttttcactttttagtctttttgcctttggctcccagggacagctttaatggtagtctctaatgatagattagtgaccaggagatgcatgctgttagggcatgacagtgacaaaggtttcaggcctgaaaaggtctttctgtctgtcttcccctgtttattctggaggggctggaaaggctccttctatttctcagccttttaattcactttggtttgtcagcattgtgcttatgtaaagacagtaagacagacaactttggagcttgatatgatttgatgtaaagattcttctaaacattaaactttcacaaagaagggtactctttcaccctctttttcccctctcatgctatgaaacagtactacagagcataaatgtgtgacttggttccatatattttaatgcacctagcttgtcgaatgatgcttagtgataattattttttattcaaagagaagaagtaaagtatattcctggtctatgcgcaccaactttatgcaggttacagctgctcctcatgctacttccatcacattggattttttggagttaaaatcaattcattgttctaactgtctaatctctaattgttttatctatggttgacaagccggggaaaaatgaactaagcagtaaaaatagtttatgataaaaacgtttatgttagtgtttttagctgtttaaaaatcaatgccagaaaataaaatacaaagaaaacacctcaaaaccaactcaaaattttaagttctaaaattcaaaataaattttggttgaaaaatgataaggcaataggtagacgacgagatgctatcgtacacattaaagcatatcacattctcaagcttaataaggaggatggattcattcctccaaaataattggaccacgccgtccagtctacaatggatagcagcaatcctccaaccaaacaacccggtaaataaactgcccgtccttctctatcaatttactctttcagttttaaactgaacggggtgtgcaagtgcaacgtacctagaagatgagaagaggttggtacttcatatttatctaaggtgttaacttacttcattggtcaaactgtttgactcagtgaatctccaactaacttgacaaaataattttgccattaattttcttgagaatatggtaagcttataagtaaattgtacatccttctctatcgtattaatcttttagctttaaactagacggtgtatgcaattcaaaaggtcagaagagatcgatactttggctgtctaaggtgttaacttactttcactaatcaaactgtttgactcaatgaatctccacttaactcaacgaaaaaaaagccattaattttcccaagaacatagcaagaatagtaggaaggccaaaaatgagaaggtcgaaaaaccgtccgctgatcgaaaatagctgtttacgcaaaaccattaattgaaccaataaaatccaggcgaatttcattgaaaatttgaaattcagtttgattatttgaatttgactggtttacctagccgagaggctgacatcggttttacgaaccctcggttttgcgaagcctggataggactaaggacaattcttccgagtgatatgcccatggacgcagggtgtggtccagccagggagacaagccggtgtgcctttcttctgccattgtttggaaccttgtaggaggaccaaggaccagtctcgctccagattttgtctgaaagcatttgccttttggtaattcctccccatgattggagatgagatcgatccatccatttcatttcatgtatgtaagactaaattattctgtgctggagttgtactccttgacacgcttccgttgcacggactcctttctgacttacaagttgcttgctgtctgttattgtacagcacacttagccctacttggattggggaattttttatccaattttacttctaggattttagcaagtcttaatggatttaccaagttaggactcattcgactttgatgattttcaatgcattattgtaagaattgaatccttaggattttttttctatattcatcgttcgttttacaggaatatatcataccaaattcctaaggattatagtcttgcaagctaatttcataggattcttagtataaggtgagacctcttgaagaaatttctaagaaatagagtgcataagacatcctaatcttttacttttcctattactttgatttgaaaatactactaaccaaataagcccttagttctcctagttttcgcagaatttacaaatcaaactgtgcctgcggacgtgctgccaaacagaacgcattaagtacatgtggctacatacgagtatacgacatctcaattaaagaactccaaaacaaaacaaaaataaagcacgcagtagacaaccagaacgctacataaaacaaaaccgactattgatagttactaatgtacttctactatacacgtagtagtattatcaagaactgtgaggtgtgtaatcgacaaaagaaaaaaaaataaaaagggtatgtgatggcgacattttcctaagccaatgttcctagattttattgatagtgtcacaaactatttgactgtctaatcaggcagataaacccacattttcctaatcaaaatgttttggctctcgggtgatctcgtcgaatgcaaatcaatcatggtactgcaactaccatgccactccgatagcaacgttccaaaataagtacactgtatgcaacaactaacgcaagacaatgttccatccaatctaataaaaccaacgtcaaaatctcgacaaaattttgtcaaaaaagagaaaaaccaacaattctcgattcttactaaaattaaagacgcccccagtttcgcttaccactatataaacaacttaaaaaataatatataaataaaatctttacatatttttttattatcggcgtaaaaacaaatactcaaaaataaactacataaaaattttaaaatttaagttttcggagtggcttatgaatatccaagagtgttagccatcaagagtgttagccatcgatatgctctgtttaatactctatccgttttatattataagttgttttgacttttttttaagtttaatcaaacttatagaaaaaaaatacaataatatttccatacaaaacatatattaaaaatatattcaaaattgtatttaatgaaaccaattttgtgttttagatgtttttaagtttttttttcaaactttcaaaattaaaggactttgaaaaaaaaaagaaaaacaaaggaggggtagtagtacggagtaaattagtttagcagtaagtgtcatcagagagagtgtttaccacgcatcgcggcggcgaggttgccgttgccgacgaagtcggtgacgacgagcttctcgtcggcggaccagtagtacgcgcgcagccgcaccacgttggggtggcgcgcccgccccacagcccgcgcctccgccgcgaactccttgcaccgctccccgcctccaccgccgccgcccagccgccgcaccgccaccggcgtcgcgccgttgccgaccaccaccttgtacacgatccccttccctcccttccccagcacgtacgccgacgaccggagcagctcgtccagctccaccctgaaccccctgtcgatcgccaccagctccccctcgccgtacttccctccgccgccgccgttctccgacgccgacgagtcgtcggtgtcggtgtcggagtcgacgccccggtgaccccatatgcagcggcagagcccgtggcggctttcgttctcgtcaccggcggcgacggtggaggagcggccttgtttcttgcgatccttgaccttccagtagacgtagactaggatgacgccgacgagggcgacgccggcggcgtcggcgatggagatgagggcgatcaggctggtcctgatcggttggtggtgttccgatgccgccgcggcggcggcggaagccgacgatggggtggtcgtggtcgtcgtggtcgtcggtgccggtggcgactgcgtcggcggcgggacggcgcggcaggggacctggagagggaagccgcagaggccggggttgttgaggaaggaggttgggccctggctggcgagcgagcccgtctgcgggatggcgccggagaggttgttgaagcggaggtcgagcgtgacggtcgccggcagccgccccagctccggcgggcgacgccggagaaccggttgtgcgacaggttgagcgtgccggcgagcctcgggagctcgccgaggtcggccgggatggagccattgaacccgttcgacgaaatgtccagctgctggaggctggccatctcggcccagatccccgccggcacctcgccggagaacgagttcccggcgaggatgagccgctgcaggctccggcagttccggaggtcgccggggagccccccggacagcgcgttcctcgacacgtcgaggttctgcagccgcgggatgtcgcagagcgcggcggggagggcgccggtgagccggttcccgtagaggaacagcgagtgcagcgacgacgcgttcgacagcgccgccgggacgccgccggcgagccggttgtcgtgcaggttcagccgccggaggaacagcagcgagccgagctccgacgggatgtacccggacaggttcttcccggcgagcgccaccccgaccacccgccgccgcggctcgccgcccgccgccgtcacgttggagcacgtcaccccgggccaccggcaggggtcggggtcggactccgaccacgacgacagcaccgacagcgggtcgtcggtgaccgccgccttgagcgccagcagcgcgaggccgtcggcggtgagcgcgacgacggcggacggcggcggcagcgcgaggaggaggaggaggagtagaatcgcggtgggtagcgtcgtcatcaaactcaccccaattaatttttcctcctcttcttctaatcttcttgcttactttgcttgagctgagctgagactcagaatgaaatgagctgagctgagctgcctagtgattgggttagtgaacagtgtgtgagagggagggagagaggctaacactaacactagtaacagactagcactaactgaaacatggagtacttaaatggaagagtagaggaaggggaggagaggttggggaaggttataagaagcagatctgctgatgttggcagctagcttaggttgccatgtgaggcatctgatggttttatggaattcagggtggactctagatcaatgacaatatatttgtcaacaatttttaagtgttttatctggcttagggaaattgtcaaaacattaggtgagaaatacaattacttattctatgtgttatcagggccgtctgtttttcatcggacgactagtcatatgtatcctttttttactcatggtttactattttgatttcgggagattaattataattgttgttcagtcctctcaaatggggaatatcagaggaaatcttcatttttttcctttacttttttttcaaacctttatcatcaattcttttggtcagggtgagcaatttaaatgagaaaaaaagataactaagaaaattcttccttaaatttggatgtcccctaattttttcccttcgattctaaagattttttcttttaaattcaagattgtttttgggaaacattcgccacccataaaaaaaatattcctcgaacaaaaatccacctttactttatttttaacactgatggcgcgcgagtgacaaacatcaccttgaaagcgagtttgagcccttgaaagtggccaccttggatattgaaaatgtagtgaggcgtgcgtgcatgctagtatagtagtgatggatgatgatcctctcccctttgccatgctagtgaggaagtggttatgtgtggagttgcataatagtgggggtcttcattaaataggggccccccaattgtgtcaatgcaactcaattgttagtagagggagaggctacctagagagagaaaaccaaagatattgtgtgtgcctatgaggggagtagaagggaagcaaaggaatgtgttgagttcaagtgttgtgcattgcatacaagtaccactactgcattgaatagtagaggatatgttgacagatagattggggggaatgatggaaggacgttgcggagttccaaaggctggatggatagatggccgttttctcatcatcatggctttggttggtgaagcatgcgtttgctagcttcactttggccgtgcactttgccggcgcctgagtaaacacgcacattgatcagagattcagagctaagctgtgccactgatcatttcagagcacaaggaaaagattagtgtgcatggatgcaggtagtgattgtggttgggtgttaattatgctgtcaatggcatgcttgggttgggttgggttagcaacaggcattgttgctagatcatgtctgtgcctggacttggggtgtgatttgatcgatcttagtgatgcagattatgtctttacagtacatggggcatgattggtgtacatgtggagtctttgcttactttctggtcttttgattaacctgtgtctcaatttgtttggtaaacttggctgctagttgcattgctatttggcagggttgtcctaagtgaaagttgagtgattgattaattgcaattggtaagtagctaagctaggtgtgcagtgagatatcacaggtcagtttattttcatcatgtgctagtttcatgggagatggtaattggtaagtgcaggctgttattcagatgatcctatggacttttaatactgttgtttagctgcctacactatagttataatgtgctaccaacaagcaacaactcttgtcccttgtccatcaaatggaaatatgtaatagtagacaattgtgctttctacagtttgcagtgacaggcttgacataggctgtgtttagttcagcgcaaagtttagattttggttgaaatttgagatgatgtgactgaaaagttgtgtgtatgacaggttgatgtgatgaaaaaggactgaagtttggatccaaactttggatctaaacatagccatagtgattacaaaataagtagctaagactgtgtttagttcagtgcaaagttttgattttggttgaaattgaaaatgatgtgactgaaaagttgtgtgtgtatgacaggttgatgtgatggaaaaggactgaagtttggatccaaactttggatctaaacacagcctaagtcatgcatactgaatttttcgcatctttggtcctcatgcgttcagaactgcaactctggtagaatctgcagagtttttctgctgttttcttgcagtatttgggtgagaaaaaatccagaatattttattttgtcgtatagaatggcagcaatgtacaaagtgtttccactttttaagggaatagttccatcgcctgctgcagactggtcattgtcgttcttgacttcttgatgcttattattacttctttgtccatagtttctggtttctgaacaatccaccagtggagatggagtgcacagccatgacaaagacaatcttcagatatcatcagtaactgaaagattaatgcaggtatagctgctacagacaagtagtttcactttcaggaagtcactataaaaatgattattgttcaatacagaagattcttggaaggttacaaatgcttccgtgattatcagtaaacatacattgtatgtacatagcgagttaatgtggtttatttctgtccattacagtccagtagcggtactcacttgcatgtatctctatccctagtgccctgattactgatagattccatttctctttactatgtctagttcacaagtgatagtgtgcatccaaaatttattccctgcaatgttaaagttaaggatgtgtttggttgagtggatcagggttgatgaaatatggccgtcaagtattttatgctgtttggttcacgggtgagatggatggagcagccacccgaagaataatcctctaagatattggatgggtgtatccagccaatttggccggatgagaccatccatctgtgctagcagagatcattagcaactactaattagtgattatcattttaagattaggattgattaggaataattagtatattttgttgcgtttgattagtaataagcaagcataaccttatgaactagtgtaagaaaaaaactcagtttgggatcgagaatttaagatgaatatacactcccactttgtgattgagaagttatgtgggcttatactacaaagagccagggccgtcgatgaggacgtgccaaatgagcgaccgaacaggatcccaaaaattagggggcctaaattttttatattttaatctatgccaatgtatttcattttttacaaagtctcactcttactcatttgttgatttggctagaacgggtttgtttattctttagctccgataagtattcgatggcaatcaaaaccaaatcaaagtgctatagctcatgacgatgatataaacgtgcattctaggtattaaatattccatttttctatttaataaaattaaatcactacatcatgacataatatttttgtaacattcattttaaaaatcttctttcgacttaaatagagctccactactaatttatttttgtctctttatttttgtggggctcaaaattgtgttttgtaccggagcctgaaattcccatatacggcccagtaaagagtccagagaaagcttatctgggccttcacgttgcttaggccagggaaggatctgcgctccgtccccacaaatttaggaataagtgcactttcgctcccttaactagtgactgaatataattcgtatcattcaaccgcaataccagatatctcgatcccctaactattaaaaccagtgcagtttgactcccttgatggttttggatgatggtttctctacgtggcatcttcgtgatacccctgacatcttttaaggcggtagttaggatatttatggcgtatcttactgaggaaggtacaaccagatgaatatctctgtgttacttccctggtaagcttccatgctcttccttcgaggataaggaggggcgatttctaccgggggcgaaggcagcccgggccctggccatgccgaggccgtggttgtcttcaccacgtaacttgagaagacgtccttgttaaggggtagtagaggtaaaccgagagagagagagagaaccgctaacttgcctggacagattcagctcgtgcccgggctcccggggtgcccgggcccaagttagtccgggacccagagtttgtggctatctcagagctattcccccaactccccaggatgcaaacttgggggcctaggcagcccccgagcaacggtagacggtcccaggctcccaagaccagggcctatgatcgcgtccttttggtttagctccctcttcagaaatgctttggtgtttggttaattattttgacggggaaatggggaccccattcccatttcatcgacagctatatttttggattaaaatataccgagttatgactaatttccaactaattgaaatttcggaaatatccgatacagtaccgaaaatgataaattgaaccctgcttcttcatcgaagaagctccatctatacaacgaaccctactcatttgtgcattgaagacgcaacactctagatagaaaagatgagaccgcgagaacgtccggtggtcttccgctggaaaagttgtttttccaaccctctttcatatatgtaatactccctccgtttcgaaatgtttaacgccgttgattttttaaatacatgtttgaccgttcgtcttattcaaaaattttttaagtaattattaattcttttcctatcatttgattcattgttaaatatatttttatgtaggcatataattttacatatttcacaaaagtttttgaataagacgaacggccaaacatatgctaaaaagtcaacggtatcaaacatttcgaaatggtgggagtactaattaagctcagtgctatgtaacctaaacgcttcacatcaatggaagtattccggtgggaagcttcgcattcacccttttagaaaaaaaaactagacagcatgtacgtggaatccacattagcaaacaaatttgtgaaaatgttgaatatcccatttgaatctcgacaagcttgaaagcagtgcaccataaccatctacaaccacccacttctttacatcaatatgtgatatgtaaaattgatgataaaatgctaaagtttgataaacatattaatgcaaagattaatgctaaattttaataaagattttactgcaatatttgggctacagttggatatagataacaaataggtgcacattgcaaatgatgtcgtatttattagatttagatgttaattgcatatattcgatcttacatagaggttggaatgttgaaaaatacattccatcttgtcacatatatgccgccaaatgcaattcctcttatactatcattcactatgtcgtcgtgagtgtgtttggcaagccttctgcacaaacatggtagcatctgatgctgatagcctgataccatctctcgagcccttctgaacaaatcaaaccaactgaaaagaaaaggcaaccaaacgctttgcaggaacaacattgataaccaaagatgctacataataattctcataggattaaaaagaaaagtagaagttatgtccatttaagcactaccggatagaaacaagaaccttacccctaaaaaaaagtcaaatggagggattgaccagctaagttctctttctgtctacaaatagatatatattataatgattgcaatcaattcacgaaatcttaaaccactaacatatgcaaaaatactgacattgatatattttcataactaaaggcaatgagaaattgagagatcatgtaatcaaatgtttccaagttcccacaaagaaatattttgtttagatccctgaccaatttccatcaatatggatgtgttgtatcttggagttcattaaggctatgcgcatgagaaagggatggcaaggctcatctctgtgtggcttcatcaatgatggaaagaattgtacatgttaaattgatttgcagtgttgtagcaaaagattgttagcatgcttatgcaaagaaaaaaaaggaatccacatcagatgtaccaaagcaagaagttaattttactgggaaactaccatctgcagtttacatggactccaatatcatcctcaaatccctaccggacatatgcatttaacataactcaaaaaacaagataattgcagaagtccacaaccaacaatagggacgcagactaaacattcctcttagtatcgttgcaagtatacttgtcaaatatcaaaagcgagaaacaaacccgagtagaaatcaaccagttacaaataaatttgtgcctctacagacctgacaatctggaccaccgatccaccgaaggctacaacatgggatgctgacttcatgaagttcatagaagagtgtccacgtcaagtttattggcattggtcacacaacaacataacaaaacactgtacgccaatctaatagctcaggttcagactttagacgaaaagttaatttgctatatcatggtaactttgacgtaggttttgattttgagtagagcaagtacagataagccataagtctcccaaacattaaatgaaatcataagtaacgaaatatagcattaagggtgatatgcaatcaggaaaaatcaattatatgaattaggaaagatctgcacaagtctacaaagctaatcagatttactgtatatcatacataactgatcatgttggcagaaaaatgatggtcagagcaacaatacataaagaagctttacctggtagcaattttgcctagacaccattgaacatcattaaaacaagtttgaggtcctctgcaactgtatatttaagaagaattttcatctgcactgcaaaaagccacaaacccatatatgagtatcacaatcttttttaaaacaaatattgacctaagaaggactaaacttcactgcacaattttttaaacaataggcctcagatatctgttatatatgggttgctttgaccaaatttgaaagcgatatttatatatgggaaacaaaacattaggatcacactctatttttatgtagaacaaattgcatgacttgaaaaatttaggaggacatttaccgagtaataaaaggctagtacctatgctgtcgggtattgactgagctgcaaccatcacctacgactccacatggttgtgcacaatccaggaggtactctaaaagaaccattttactccattcgtcccataatataagggattttgagtttttgcttgcactgtttgaccactcatcttattcaaaaaattttggaattattatttatttttttgtgatttactttattattcaaagtactttaagcacaacttttcattttttatatttacacaaattttttgaataagacgagtggtcaaacaattcaaacaaaaactcaaaatcccttatactagtagggtgcccatgcgttgcaacggagaaaaatcacaccaagtgaaattatgttaaataatcattgagtgtaaatcggatgtaacaaaaacattaatatagaactaataataagtatgtcacatatttataattttcacatctttatagtgttcacatgcttaggtttccagcctcgttatcaaatgagcaatattaagaaatgtattttgttcgcagagagcctgttttaatctattttcatgcaagcattactgggagtttttgtccttcgacatttgcaatgcttttggattggcttcgaatattattcttcgtccttagtattttcagtatttccagtttgcacaaattactgaacaagtgcaaaatattttttcatatcattcacacaaggaaaacagggaaaatagtttgtttaccttcgattatgttgagaaggatctgaagacgtcaactggaaacaacaggatatgggcaccgaatttctgctacttaccttcatgaaagtacctacgtagtgaaaaatcgcaaatcaggcttacatcataaagattccattttttcgctagtcgattccagataataacacataagctataacatgagtgagtttcacactattcatcatattgcagtatatttattaagatttcttgttgatccttttaatatagcttaattcatcaatcattcatagtcaaatagtgtcttatcacacaatcttgacattatttgcttcttttgaaaagaaattttggtttgacaaacttaaatactgtcatgtcaaattcccacaaccttaattggatgctctcgtcaatgaccttgacctcaagaccctggatttccataggacagatcaatatgaacccttactattgagaaac

SEQ ID NO: 25239 - DNA, 7148 bp, Oryza sativa
ccaccattccaggtgctgttctgataatagctattgctagttccatatcctggagcagtctgatgaccaccagcattgtaatatgtgttacttgtgggaccaacgtaagactctgaattctgaaatgaagtaagaggctgatgagctgcacctgaatgttgatttgttcctccttgctggacagaagaaccatttgtagtttgtgggtaactataataatagtttgcatattctgcagcagtgtacccatgttgaagtgaacttgagtaaggcatgtgagaatgagtcgcattttctgtgcccatagttggctgagcattatgaggtgcactgcttgccacactctgattgtctcccgaaaccgaaacatccctttgtggatcatagtaaactgtatcttggctttgattgttcactggatagctccacgggactgtagctgccccagttgaagaggaccatgaatgatgccctaaagctaaaggtggataagtagatggatttgtctgccccacaatgctgacctgccattagcaaataaaggggtcatgaactcatgatcatttatataatggcataatgcacatagcaacttagttacaaaagccatgaccaaaagattcatcctcactgcagctttaaccatttcagtaattcattggcaaaatgctttaagtcagtactatattgcaactagaatgattcgtacaactaggcttccatacaaccatagattctcagaattaacatgtagttctacgcatagcaaagacgttcaaatccgatcaaacttctgctctaatttttctttgcaaaaattcaacgaagccaccttgcatgaatagtttagttcccttggctaaattttacttctaccaatcacccacatcctcaaattagcttaagtttggtacagtaattagcataatatcaaattcgttgcatcctaaatagacactaaataaacgatcacatattcaaaaaaaaaacaaattcaaaaatcaatagaacatcagacgaggcgcgtcatctacctcggcaggagcggcatcggatccagcagccaccaccccggcgccgtggctcgccatcattcctccccctcccggagctccaaccctagcgaaccggtcaaccgcccgccgccacgccaacgcaacgcaacgcacaaccgaaccgagctagcgacctcgattcgtcgagagcgaggcgagaagccgatcgatcggggggagagcagccgcacgcgaacgaatcgaaacccttaggcaaaggcgcggtggattcagggaggattggaatcgcgcgtgaggtttttttttttgtgtgtgtgtgtgtgggaagatgcgggaagcgagaggagaggcggagatgttgccagctacggaaaggaggacgattttttttcgcctttttgattcctttttttaccgcgtcgcgtcgctttgcggtttggtcgggtggtgtcgtcactagtgaggaggaggcggcggaggagagagaaggggacggtgagatgcgttcatgggccgttagatttgagcccatgggccataaatgattggtgggcccagcccatttggacccaacttctccacaaaaaaaaacggctgttctttttgtttatgttttgaagctattccattaatctctgccactaatgttgatatgatttcaagtgaattcctgtgactctgagcaatgctatgccattttcagaaattgccattgagagtgatgtgcaagagccaactgccaagtgcagcgtcagtgcgtcacactcactcactgttgttaaaattttcctgcggaggtctgttgaaactaaagctcagatgaaatttcctgaaactatccggatttcaggctaattcaactgctagaaccaactgaaacaaaagcacaaatgaatttgctgaaggaatacaaatgcaactgcagtaacagaaatatacaaacaaaagcacagatgaatttgctgaaggaacccaaaggctactgcagtaacagaaatatgaagtccgaaatattaaacgaattggatctatcgtcaaattaaagcgactcagacaccgtttgacattatgcaaattcgctgttcttattcttggtcaacgatggtcaaatcaatactactccctccattccaaattgatctacatataatttttttgaggttattcctaaatgatctacatatttgtgttcattcattaggtctattcgttatttgtgcattggagtaaatagacattgatacatgcatccatgcacacaagcatttataacccacatgcaatattttaatttgctattggctagaaaatagtggggatggtgcatgcattgagtttattgctagagtaaatatagaatgagagagttattagctttttttttgtcttggtgtacctatggaatatgtagattaatttggaatggggggagtatatcgaactgcaatgtagctagatatcaaccacttgttggaattaatgaatgggccttagcccactcgaaaattaattctttggaaaatcacaaaagcccgcctcatgggatggcatgcatgtggagtttagtaccacattgcttattctaggagatggggacctccttaaaagggaggatgccctcctagctacttgaagcatgtgtggtggagagaagagaggagaacacacgcgcgtgctcgctcgcctcgcctgacagggcagggcaggcggcgcgcgtgcacgacgtacgcgtcgaatggtccgccaaaattggttcctcaccttgcgctccttttgcagttttgttttgctgcaaattcggattcgtttttgttttggaaacgttccgaaaaatctggtgcatgcaaacggcgtggagtccggataagttacgcgtggagtgaagatcgtgcgggcgccctgatcaagcgacccttctctatataaaccgacccgccgtcttctcgcaacacacgtgttttgccgtaaattcggattcgtttttgttttggaaacgttccgaaaaatccggtgcgtgcaaacggcgtggagtccgaataagttacgcgtggagtgaagatcgtgcgggcgccctaatcaagcaacccttctctatataaaccgacccgccgtcttcacgcaacacacgcgaaatcaatctagggtttgcctcctactctgtactacaccgtcgctcgtagactactccatcccgctcgccggcgtgcaccggcgattgggagacgtggagtccggataagttacgcgtggagtgaagatcgtgcgggcgccctgatcaagcgactcttctctatataaaccgacccgccgtcttcacgcaacacacgcgttttgctgcaaattcggattcatttttgttttggaaacgttccgaaaaatccggtgcgtgcaaacggcgtggagtccggataagttacgcgtggagtgaagatcatgcgggcgccctgatcaagcgactcttctctatataaaccgactcgccgtcttcacgcaacacacgcgaaatcaatctagggtttgcctcctactctatactgcgccgtcgctcatagactactccatcccgctcgccagcgtgcaccggcgattgggagagcaggtctccggaacctctgccttcgacgtcctgcaccgggagaaggcggcaataaggtttttgggaagcgtttcgcgcgactgctccctgttcgttcgcgacggctcgccttcctcttcgctcacgtgcttcgtgccttcgtagacgcctgcgaaaagtttcgaccgagcagccggtctttccaccacctcggtacgtgttcaatatgttgcgtatatttgatctgttcatgttatactgtatagtttccatgtgtagatctaatgatgcgttcatgctaattttcatctataatgtcatgatttatttatggaataaattaaatcattatatgcctataatctcaacaccactaacctatatcaacctcaccctaaataacccaattcgctttaccccaaaccccaaaggcctattaaaatattcgtgccaccaccagggaccaaccaccaatttgcacattcaacaaaaggacagatccataacattggccctgaaacatgtttcaattcaaatcccaggtgcaaacatcatctgcttcacagtttcatgattcaggtaaaccctacaaaactaaacggcgaactgaacaaggtggattccacggccagacaacatgggagagatgggggatggaggcacgatcgatcagccgccgaagccgtagagggtgcggccctggcgcttgagcgcgtagacgacgtccatggcggtgacggtcttgcggcgggcgtgctcggtgtaggtgacggcgtcgcggatgacgttctcgaggaagatcttgagcacgccgcgggtctcctcgtagatgagcccggagatgcgcttcacgccgcccctcctcgccagcctccggatcgccggcttggtgatcccctggatgttgtcgcggagcaccttccggtgacgcttggcgccgcccttgccgagccccttgcctcccttgccgcgccccgacatggccgccgacgacgacgattccggtggctcgccgcacgagagagagagagagagagagaggaacgagaggaaatggaggaggagaagaagcggtggtgattggagtgggatttgggggaagaaaggggagggggttttaaaaggggacgagaggatggagtggggaggtggctgccgttggatgggtagggagtggacggttgggatctggatggcgagaggagacgcgaatcgctgacgtggcgtgaggcgcggatcggtgatttggcgggacaggtgcgaaatttcgtacgggaggcgccagttttatttttcaggctgccgcgtggcgcggtatttggagtttcgaagtttgcaccggaaggccatttttggcacagctctagcttcagcccagtcaaacagtttcagctccaccaaaactgggagtggagctgggtgaagctctctcacaaaataaactagagttgtggactccactccaaatccacctcctggagttaaatttaggagtttgagctgtaccaaacaggcccgaaatttcgtactccctccgtatactccaccgacttggatcaaagtcaaattgctttaagtttaacaaagtttataaaaaaagagtaacattttcaatccaagacaaatttattatgaaaatatatttaattattgatttgattaaattaatttagtattataaacattcctatatttatctataaacttagtcaaacttgaagcagttttactttgaccaaaatcaaaatgtcttataacctgaagtaaccatttatatccctttagaattcatcccaaaatataacaatttttccacctattttttcttaactaatcataatattttaccatttaaattcttcacctattttctcttttcaagcaaacacgttcatctcgtatttaattacacctactttcttaatactcctgtctaattctaaaaagatgaaccagtcgtaattatagctcattttcaaaatgtacgatgtcgttaattttttgcacaatatatgaccattcgttttattcaaaaatttaatataaatatgtaaaaagtataagttaagattatttttttaattgatattaaaacaagtcggaacaaaataaatgatatccatataatttttttagtacaaatggttaaaatttatgaaaaagtcaatggcgtcatacattttaaaatggatgaagtacatgaaaaaaaaaggtgttgtgttgttttactcaacaaagtaactttctgttcagttgagggttaagataaagaatattttcccactgcgaggaaaaagataaaagatatttgctctcttgccacaattcacatttcacctggctacttatataagcaagatatattttactcgtggaatgacagttgatttagggttctttcagtttggagggaaatcgattacttagaattaattactattagtgtcattcggttcataataatgtaggtataggaaagctaaaggaaaatttcctttggtacgagttgtaatgagaaaacatagaaaaaaatttatccacacaaacatcttggaaaatttctatgaattgaagtgtgtatgtatttatattcctccattcttcctatttatatgtgtttaaattcctccaaaacaaacaagcccttataaagaaatctcgaaatgcttgttcactttctaggagtacagtgcaagttaatttcgtgcaagcccatctctgcacacatacgagctatgcgaccgtatagatccctaaaattaggggcccaaaatatgtgtttcaatttaaatcaaaatattccgatatatttaggattgtgtattcctttttttttcaaatttatctatttctctccactaaataggattaaccgagttgtttttctcaactccggtaagtgttcaataataatcatgggctacatcaaaggaaagaactatatttagcgacgacgatatgaacgtgcgttctaattctaaacaataacgattccattttttcatggaaaaagtacgaattaccccctgaaccataaaaccggacattcttcacccccaactaggcaaaccggacgaattacccccctcgactgaatccgcaggtggttttggtctacgtggcgtacacgtggcagtccagtcagcaatttttttttaaaaaaattgggggaccctcctgtcagtgtcatacctctccttcctctctctatcttcactctctctctctctctcacgggcatcacaagggccaaaggtgggcggtggcgtgagggcggtggatggaggcgcgcaggggcgggcggcgagcggcggcgcggggacgtgcggcgctggcggaggctgactagctactgatttctaggcgaggtcggcgccgccgaggacgagcggcacgccggcgaccgcggaggcgagggcggtgacagggcgactgcagtgggcggggccatgccgcctcccgatcgcccgccacgctagcctcgcccacccagctgcgccgccccctcgtgctgccgtccacggccatccccgcgcgccccacagcgtgcgacgggc

SEQ ID NO: 25240 - DNA, 7628 bp, Oryza sativa
ccgacgcggaggccgtctcggcggcaccttcctcggtagccacgaccgccgccgtggcggccgacatggcgaagctcccctccatcgtggcggccgacgcgacgaagctcccatccctcgccgccgcctcacctcatatcccgccaccgctccgtgtcgccccttgcgccgcccttcctcactgccgcgctcgcctcgccacagccgctgccgccgccagatgcagacggcgacgcgctggtgcacggggatggcggctgacacggcgaagctcccctccttcctcgccgccgcctcgcctcatcccctgccaccgccgccgccgccgctccgtgtcgccacctgcgccgcccttcctcgctgctgcctcgcctcctccgccgcctgccgccgtggtgccgtgcgcgttcagagagtgagaggagagagagaggaagtgtgagagagagaggagagagagagaggggggaatagtgttataggggtatgacaggtgggtcccacatttttttaataactaaaatgccgtctggactgccacgcgtatgcgacgtagaccaaaaccaccgcggattggatcgagggggtaattcgtccggtttgcatagttcggggtaaagaatatccggttttatggttcaggggtgtaattcggacgaccgtgatagttagggaggggtaatccgtactttttccttttttcatttagttagaaaaactaaattgctacaatgatttttcagttgtttggtcgaatcaccatatatatgtaggtgggcggcggaccaagcggttatgattgccgtgaccagtgaggcgtcctccccgcagctctctggtgggtgcggcctccgttcgtctgagtgacgatggcacaatggtggggtgacaagggcttagtgtctcggcagctgtggttgccctcctcggtggagtagaagagccttgcacgtcccagtgtggatctgcaacggaaaccaaatgagccagtggtcaccggagaggaggaagaagctcaatctagactggtgcattttttttcgatgtttcaaccaatgtatctttgatgtttctttgggttggatcgaaatgttgcattggatagtttgatattgtttcatcgatctgtgcatatcccttgatattttaacggttgaagcttgatgttttgtttgttggatcgaattgtttcaatcatgattcacctatgtttcagcatttaatagattgaaacattttttttatttaacggtgaaacattgttcgactaagagtgacaagacacttgatttttgatgaaaaatcagatgcccgatttgtagtctcctccacaggactcttctctaaagtcaagactatatgtgaaaagagtactttgtgaacaagcacacgcacgtccgcctcatcgtttcgcttattcgaataataatttatgaataagacttttatatacgtgttcttagcaatctaaaagcaaagactgaaaaataaacttcgatataaaaaaacccaaaatcaactccaaatttaagattgaaattttaatttttgggtgataagcataagcataagcgaaaagataaggccgatcaatcacgcaaaataaccccccatgttaattttcgagttttcttctccaaaaaatcttctgcattccctttcttagttactgattttgtgctttagttttaaacacatgatgatctcatcaagagtatatttcatgacatgcacctatatgagatatgtagaacacatttttctctgacttttgcatgttttgaatctactttccactttttggctagtttaagccaataagcccaatagaaagtttacacattatttttcttttatgaaattattatttttattttgcttgaaaattttccacataaagtttctctgtcgaaagtttacaggtagaaagttcacatatgtaaaatttctatatataaagtttttaggaataaatgtctatatttggccaccgagacacgtatgtgggctaggggcctctaatcaggaaaggaaaaaaagtttaaatgggttaagaacaagtggggccatttgcattgaacccgtggactttgagatagatgggctcgacaatctggatgaaacttttcccaaaaattaacaattatttggttatgttgctcaacttgagaacatcagcaagcagcaaaggtcgaattcaacatgaataaattggttttcaactaaattgtttgtttcaatttgaatttcaaataaatggtacatatgtcactcttaacgaccaaatttggtaatatcagtatcggagatgaagattagattgaagcggggtcgaagatgaagattgtcgcggaaacagagtaaaaatcggctgaagtccggatcggctacgattggatcggctgagttggagtcagatttggttaggtgatgcagccgattccaacaatacgacttggtgtacgacatcgggttgggttgaggtgcttcaagataattgccacgcatggatagagtcctgggaaggcaattgtatctattagttaggatattttatgtaatttccttatagatatgcttgggcaaaagtctgccgtaaagacttgtggtatcttagagtttgttagagataatagtcgtgtccggtatggacatatcttgtaattctcgggtataaatagaccccgagccctatgtaattaaaaacacacacacgttcaatacaatttcggcgcatcgccacctttttgctttagttttatttcgacgagttcttactttcgggttgagctgtatcgtttcgatcttcaacaagaggtaaaacttgttatgatggcttgtgttatcgggattagtgcttccatctttatgatactctaatcttgtttacgtaattcgtcgagttatcatatatcgtacataatctctggcaatatcactatctaacctacaatcggctaacatctgctagtagagggcagccgattaggttagattttgatgttgatttagattatataagatatccaccactctatgaaacttccagcggcttgattgtctagatattgttcttcttttcatacttaatgctgcatcagttgagtttgatctattaagtcgtgtttagaatatcaatctctagcctgccttctggttgccgattagggtagtatcggagtttcagccgatcttatctgatttaaccatattcgctctatatgcttcagtgacatgttaaatccgccctttatgtcaagatcttattgcatttaagtatattaagcttttgtttgatatattatacttgttttaatatcctgatatagagtagtatcgaagtattagccgatacatgctagatctatatgatcggctatgctataaacatatatagtcctgttattaatatatatttcgatccaagtgatttatattgtcttggcatggcgaccgatctatcccaatcacttgatttaaatatatatcgatataagaactatatattggtaatatctacagccgatcgagtaggtttaagtctttattatctatttatagtcgccgatcgattcacatatgacatcggctcaaagataaatgatatgtcatcgacacttagccgatcggctatcatttatagatttaaccgcgatctctctgtttctatttcttgttgattgcaggatcaattcaattggcacgctaacacacccgaaggcgagctttgaacctgtactctcccaggcctcgtgtttgacgtcaacagtcgcggtaaacaaaatgatggtaatcctgttgctcatactactatcgtactaactgaatagagacattccatttttgcaatagagaagcgaccatggacattgaagctatcggggaacgaggagggaacaagcccgatcaaccgccgaagtcatagatggtgcggccctgaagcttgagcgcatatacgacatccatggccatgacagtcttgcggtgagcatgctcggtgtaggtaatggcatcgcagatgacattcttgaggaagatctcgagcacgccacgagtctctttgtagatcaaccctgagatgcgcttcacgccacccttccttgcaaggcgtcggatcaccggcttggcgatgccttggatgtagccgcgaaagacaatccgatggcgcctagcaccacttgtaccgcgcccagaaatggctaccgactagtggagcgcgagaagtgctagtggaattggaagagaagtggcactggtggtggtgcccagagtgagatttcaaagagagacgacgaggggttttatagaggataaaggtaggagtcaggcgatatttgccgttagatgtgaagaaaatgggcggatgggatcaggattacgggagaggtgccacagatcgctgatgtggcatgagatttggatttttttacttggcgggatagatgtaaaatttcatacacgaggcgccatttttattttccgacagtggtgcatggttttttccaatttggagtttgattgggggtcgagataaaaggaataattaaattcttggtacaaaagccacatttcacctagttttgaaagtaaattctattttacatcttcaactataggccaagttcatcatctaaagaagctataggctgagttttaaagttgctcttgagtgcaagcgaaccgacccatgaacccatatatttgtaatctataagtgggttgctcatttatttgtactgtaagtgagttacccacttataagtaagtggtacatattagtgggtagcccacttatagtgctatataagtagatttgtggattgtcccgtttgcacccttacttccggctatgtcttcttcgttttttctgcatgaatctcccttcctccggtgatgcagctgaggatttgtattttgttttctacttgaccattgtttcctccacgagtttctgtggtagtttaaggcaagattaatgctagcaatttagtggtcaagttagcatcttatgaacccattacgcatgcaaattcaaaacggctggcaacaaattataagcccaagatttgcacgtgtatagtagatttgcatgtgataaattgggtgtatccaattgatgatcagagtgtacaaagccatacgttttaaaccatttagcatgttcgttattatcacaacaaaaaacatttacttgttgaagccccaccccccaatttacattgtccacggcctctgagaaacgtcaaaaaaaataactcaggtatacaactccttccacatcaaaccatctctggtttaatcacctgatccttcaaattaagcgtttaacatttgatcttcttctcgcttccacaataatatcatttgacaaagtttcccttattattgctcctctgcatcttcttcctcctcttcctccccttcctcttcttcgttgtcgttgtcgtcgtcgtcgtcgtccgaggaagacgacgacgagctatcagagtgatctgattttggtgcaggggaggcagatggagctggggctgggacgctggcagctggtggatccggtggcagtgaggtcaggaagcccagcgtcatgacaacgtcggccatcaacggccgcacggagtcttcctcctgcaagcacatcgcggccatggcgaccacctggttcaatgcctttgctgcgtactcgctcttgatgagtggatccaccagctcgtgatatctcttctggtctttaaacatcggcattgcctgaaaaatatgcaatgcagatcgcaattcacaaagatgccattagcaaactgaatcataatgctattgctataatgctattgcatctttcataatttctttgggagaaatgttgcattatttctgttcaaaatgcaaaggtttttaaattcagatttcggcatgcagaatgcagaatcgatggtatatctgcattgcactattgcatcgaccaaattggctgaaaataactgagctaaacatcacaatttccatggcgaacttacccaggcgaccacgttctgctcctccgtgggcttgtcggggtcgatggctctcctgccggagatgagctgcaccagcacgacgccgaagctgtagacgtcggacttcatggtggcctggccgctgcggtcgtactccggcgcgcagcagccgaacgagcccatcatcggagccggcgcgttgccgcccacctggccgagctgcgcgagcccgaagtcggacagcttcggcgtgagggcgtcgtcgagcaggacgttggacgccttgaagtcgccgtacaccaccggcgggctcgccttctcgtgcaggtactccagcccctgcgctgcgccgtacgccaccttcatcctcgtgcaccagtccatcggcttcttgtccgccggcaaatctgccgacgacgacgatgcaacaataacagaacaatggacaatctcattatcgtcgtcttagagtattcgttcgcgttgcggcgtgtggtgggtgtgcgtaccgaacaagtgttcttccaagttgccggcggacatgaactcgtagacgaggagccgctggtcgccgtcggcgcagtagccgatgatgtcgacgaggttgtcgtggtggagccggctgagcttcgagacctcgtccaggaactcattgttgccttggaagccatgcctgtccagctgcttgatgaccacggtctgatcatgcacaaaaaaacaaagaaaaaacataattagttcttgtttatgcgaagtgatcactgcgctgctcgatgaaatagatgtgagattgttggtgagcacgtacctgcccagtcttctccagttgacccttgtagacccggaagaagccgccttctccgatgaggttgtacggcgtgaagtggtcggtggccgcggcgagctcgcggaacgcgaacgcctgcccggcgatggcgagccccgccgaggcgtcctcggatggcttgggggcctgatctgcatggagagaccgcgcgcgcgcattagccaattggaagccatggtcaatgtgggatcatcgaactagccaagaaatcggatcgaggaagctatcactcaccgggcctgggcggcgtcatgggcgcggccgcgggcgcgggcggcgtcatctgcgacgcgggcgccgcatccgcgtcgtcgaaccgcgccgtgtcggcactcaggctcttcttctttccgccgccgaagcacgggaagcagctcatcttcgcgccccctccctgcctccccgtggcggccaccaccaccacccctgtccgccgccgccgccgccgccgccagccaaagaagaaaaagaaagacgcacggaccgaccaccgaggagcagccgcgccgcgccgatcacacaaccatcgcgcgcgagcccgcccgtctcaccacctccgccgcggcgcgcccacctcgtggcacgccatccgcgcacacacgcacgctgtcgtcctggccccccacgcgcgcacccgatccgcccgcgcgtccgcccgcgggaagagagaagggggcgatcgatcgatcgatcgcgccggggcgcgcgcgcgcgtggagggggggaaggagagggcgatggggggttgggggagatggaaggtgggggaggagggtgggagattgggggag

SEQ ID NO: 25241 - DNA, 19464 bp, Oryza sativa
gggcggggggacgtgcggaccacgtatttgaagggagtggtcgacgacgaccgtcgtggaggggtcgctcccccgtttcggccgttgcagagcagagctttgtttccagcgcatttactccctccgttctagcagccccaattttttttgtttattcatatattatttgaaattgctcattactaacaaataaaaaagagtataatatataccggttcttaaatttgagaggagatatcgattagatccataaacttgtaaagtgtacattcaagtttatttaagcgtaaattatactggcaatgcttaaacttgtaagcagaaaagcaggttttacataggtccacgaaccgtatattgaggtctctaaacttggtttattctattatcacggtccaaaatcttatttgatcgtggtcttgtctacgtggcatgtcatgtagacgacgacatgacatgttattatttttttccctcccttcttcctttttcatttctctcttcttcgaccttttccttcaacaacagcgatgcttggcgacgacggcggccggcgcgggaaagcttgaggtggctccagtggaggaagaagataaaagaagatgaggaaaaagaagataaggaccgccagtgtattctactctttaattaaccacagtaagtccaaacttcatttgactgaagatgaccgccaacgagacgctccacgtatgccgcaattttgcatccaatagcgataattttacatccgtccccttcctcatccaatactaccctaaatcaccccctcttccccaaatacatcaaatctagatgtatgctagagcgcaagaaagaatagtggtacttagatacacaagcgtcgattcatcttctcccccaaagttgaggtccatcgcggctgtcgtgtcaacagtggagccgcaccacacacctcctatcgaatgccaccactcgcgcggcccaaaatggcgcctgaataaccccgcaacaccgatgatcgtcggtgttacctactcccttaccattctctctcgaaactattgtattgggaaagaatcagagtgatttgggtgttttttaaggggattcgggcggggtagtactgaatttaccatcaactatgacgcagagagggcgggatgcaaaattgttgcctacgtggagcttttatatacgtttacttaacaataaaaaattattagagtaaaacttttatatacctgtacttaacaagttaaaaggttgttaaaagcaaatacagtaaagaaaactaggatgagaaaaatcaaatttaaaattaagttctaaaatttaaatttttttataagaataactgaaataatggggtgtggagttaaaaaatttaatctaaggacatcttttaacagttcttacttacacaccaccattcctattttgatcaatttttcttcatgtgcttttaatggattctaggaacacaccggtgtgttcggaacgcctggttcccaacactaagagcccgcacaaaaaccgaagcagcgattagcgggtgattaattaagtatttactattttttttcaaaaatagattaatttaattttttaagcaactttcgtatagaaactttttaaaaaaaacacatcatttagcagtatgaaaaacgtacgcgtgaaaaacaagggagatggtttaggaagaggtgctgccgaacacagccttagagtaggtacaataagtcactttagttggcgatagtgcatgcatgctaatgtgcttagttggcaaagaaattgggagagaaaaggtgtgagtgggtgactaaataatcgccggctgcacacatgctccaacacatttttcatggggctctcgatggtcagctcccttccatggttttccaaattgccggtgcggtaaccatgaaaaaccgtgtaaaatttattaaaaatttaaattattttttaaattcatttaaatttaaggaggttaccgcgatttttctattaccgtaccccgtggtaagaacagtaagtcgaatgaaccttgtcccttcccgagaagaactagtggacggaataatttgaagtgaagaagaaagagaatgactggattaaaaaataaagaatgcatgcataaaaatttatgtgtaggtgatctagtagttaactattgtatttatactactcttattaattatttttgttggtgatgtgaatattgtaggtgatctaatagttaactattgtatgtatactactcttattaattatttttgttggtgatgtgaatatttttatagctaacaacatgctgtattattagacttgctcttaggccatttctaacccaaaatactagacatagtttccataaactccactagacactacttttccaatgcaaacaccactgtcactattccatacttaaatttaatgctacttatctcacatgatgtcttggatgttatgtagaaaacatgtctcatgcaagacatagttttcttctttttcctcatttattcacttgccatatcattttctatcttagatggcaacttatttaatactatggatatcattctagtcattgggttaagaatgctcttactgacagagtactttgttattccactgttccagtgacagccaatcaggcaatcaccaatattaattcattgatatcgttcgtccattcaatcattcatcaaatgcagactgcttgattcgttgcaatcgtccattcaatcattccaatgcatactgcttagtgcgtgcatagcacggctgcatccatccagtttccagactttttttttctcaaaacttaattattttcttaagatccagttctcgttttatatcaagctatctttgcacgtcgacctcacgatctttacgggcacaaatgcatcagatattcagatctttaacaatcggtaaacttgtgaagataaccgaaaaaacataaacggaagcagaaaccggcacaaatcgtagtcgtgtaagccacggggagaggaggagaacccgaggccgccgcgaaagacggcagccgggatcacccacaactcgagccccccatggcaaaatcactctacgcccccagaacaaggccgtcaagagtggattcgttctcttgcagccgaaagaagaggcgaccaaacaagcacacacaacaaaaagaaaaggagagattgttccataagtaagaacaaaaaatattctgagaagaagatgcagatttcccttctgatgatgatgagcgagatggatgcaaagcagtaagcaagcgagtgacgaaagtgagtgtgtggatatggcgagatgcagcacgagctgttccgcggatgggaacggcaggatgaggcggcggcagcggcggcgttgcgggctagggatttcgtggggaggtctgcggcgtttataacggcgagatggggagggttttagcaaggacgtatgggccgggcccagggcgttctgttcggcctcactgtcgtactgggctttccacaaaggaataagttcatttaaggtcccttaacttgtcaacgaatttgattttcgtccttcaaccgaaaaaccagatacaacgggtccctcaactatcaaaaccagtgtagatgaggtccctcggcggtttggatggcggttttggctgacgtggcgcttatgtggctaatttgactcggtcttaatctgacgtagtattgacgtggcgtttacatggcaatttgatccgaaaaataataaatcgacccacatgtcagtttcaccaaaagaatgaattaaaaaatggtggggcccacatggccccacatatcattgtcacccctcctcttcttcctcctctctcaccgtctctccactctcctccctccaggcgccacggggccacggggaggtccggcggcggcggccagcgacgcgggagaagggcagtgggcagggcatcggcggcgggagcgctgggtcttcgctcacgacgtcggcgcggaccctgcgcgggggctcgtggaggagatcggggccgcggcgccgcccgtctccgacgagctagagctcgtgcgagcgcggtgccgggagctgcacgactgccgacgagaagcagaggaggtttgaggtgtacaggagcaacgttgagcttgttaagaagttcaactccatgtgcaatggctataagctggctgacaagaagtacgttcgccgacctgacgaacaaggagttcagagccaagatgctggggttcagacctcatgccgcaattcctcagagcaatgcctggagagagcagtgatgatattctgccgaagagcatagatcggaggaagaaaggagcagtggtggaagtgaagtaccaagaagattgtggtgtgtgagcaatagcatagtaaataaagattcaaacctgtaaaaatgttggagattaatcgatggaaatctgggtgttgtgtggatgcaggttcttgctgggcgttctctgccgtggcggcgatagaggggatcaacaagaacggcgagctggtgtcgctgtcggagcaggagctcgtagactgcgacgacgaggccgtggggtgcggcggcgggtacatgagctgttcgagttcatcgtcggcaaccacggcctcaccagtcaccacggaggcgagctagccgtaccacaccgtgaacggcgcgtgccaggcggcgaagctgaaccagagcgcggtcagcatcgcgggctaccggaacgtgacaccagcagcgagcccgacctggcgagggctgtggcggcgcagccggtgttcgtcatcgtcgacgccggcaacttcatgttccagctctacggcagcggtgtctacacggggccgtgcaccgccgtccgccgacgtcaaccacggcgtcaccgtggtgggctacggcgagtcccccaacactcccgccactgacgccccgcccttcccccgcgtcgtcggccgccgccgccggacctccccgtgaccccgtggcgctggagagaggagaggggagagatggggagagaggaggggtgagaatgctacccaccattttttaattcattcttttggtgaaactgacatgtgggtcccatgagatttattatttttcggatcgaattgccacgtaagcgccacgttaatgctacgtcagatgaagaccgagtcaaattagccacgtaagcgccacgtcagccaaaaccgccatccaaaccgccgagggacctcatctgcactggttttgatagttgggggacccattgtatctagttttcggttgaaggatgaaaatcggattcgttgacaagttaagggacctcagatgaacttattccttccacaaacttcattggcaatttttggtcctgcctgcaaatctccaatctgcggccccatttggtacagcttcaactcccaactccaatttatctagagcccaaactgtgtcaaacagtccagatccttcattttttggagcggagttggtggagcttctccacaaaattgtgctaaggggtggagctgggtttttgctgctccaccgctccactccaccccaaaagacccactaccttttaatttttagtgtatttacaccaaaatgccactgaactaccccttccaaccctatctcctccagttctctctcctcctctgtcttcctcggtagacacaagcggtcggcagcggcgggcggatggcgcggcggcgagggccacggacagcggcggcagcaggcacgcgagcggtggcgcggggtcgacgacgcacgtgcggtggcggcagcggcgccgacaagcaaaccgccggcggcagggcgggcggcgacagcgacgcctgccagctgttcgacaaaatgccaacaaaggacttggtggagtggagctaaccaatctagccaaacactttctattctacttcagctcctataggagccagctctaactggagttggagtttagagttaagagttggagtttggagccctaccaaacgggacctgcgactcacgcgcttctatcaatgcttccctcccctcccccatttttttatgaaacctaagccaaccgagctggttttatattcagaaaagtaagcactgtataggggtcaccaacggtgacaggagaagaacaaggggaggtcagcacaaagggaaaaaaatacagcttaagggagtaaactaaggtgctattctcgtgaggatttttgcaccacatactgaccatacatgatttttttccaggatttttgccactagctgagggatttggagctctgtgtctttgaagactcacctatttctctcgcaccagatttcccagcagaagagcatgtgtagcgattgcatccctttcgtgtgaaacttgctttgctgctgtgttgttcttgattctcaccaatcgattagcctttcttccgggttatgaaccgggaaagattgatcgtggaccattcttgccgtcgctttgtcccaaatctcccgcgtgaatggacagtctttaaataagtgttgcgccgtcttcaaattcctgtaacagaattgacagaaattgttgtttggccactgctgaagttgcaagcgatcggctgtccatattttgttttgtaggagtagccatgcaaagtttttgcatttggatggcacccatgtcttccatatgaaggtggcagcccttaagtcttctctgccggcaaattgagccaaataagctgattttgctgtgtgtttgccggtatttgttcatctctaggtgatggtgtccttgatttcttccactaggtttatctcccaggtgagattgaacaccatgaagtacgtgttccaacttccaacttccgacctcctagtagttgagcaccaactttcgttcgaagggtagcttcgtggcatgcttcatccacaacaaccagaacctatggtttgattttgtatactacttcctccgtttcacaatgtaagtcattctagcatttcccacattcatattgatgttaatgaatctagatagatatatacgtatagattcattaacatcaatatgaatgtggaaaatgttaaaatgacttacattgtgaaacggagggagtaagttttatggttaatgttagatactaccgcgagaagatgcaacaaaacaaagcaagaataagagaaaaatatcataggggtggatccactcgcaaaagacctcatgagctgagcaccagcttcagtcgaaagggtagccttgcgacagtcttcgtccacaacggcctggaccggagcaagagcaccacccaagacgtggggtgttcttctcttttcacaagcacggagtgacaagaatcacctagaaatcaaacccatgccttgaggtcttgggcacaacttggtaggcaacgggccattaatctaccagtacgtcggcggggaaatgtgaggtcgatagtatctagcattgtcaccatacacgctattataatatcgatatacgtagaaattaatgtattccaagtgaatttagtaaacttttagttatgtgtcaccaagattttattcaacatcaaccataaaatcaggtttcattgaaaattccttaacaaaggagaggatggatggctaattttcttaaaacacaaaagctttacgcgtcaatatattatagaagctatgaaaattcatttacaagatcgcaccatgctagcagcaggaactagggagtgggaaggttacaacgacagaaaactaagtgagacatacgccaggaagatacaaaagatagggaggggagaaggcaactacggggtggtagatactcgcaacagagctccagcgccgggctctgatcagactcaccagaggtgcgtctcctacaagattccatcgaccaactggggataggccgatagggtaagcgtttctctctttccacaggcaccaggacacaaacaacacaaaatgagtcgaggtcaggcgatgtgtaattgggcggagtttagttccaaactttttttttaaacttccaacttttccatcacatcaaaactttcttacacacataaactttcaacttttctgtcacatcgtttcaatttcaaccaaacttccaattttggcgtgaactaaacacatcctggtcacgcatcgtcaaacgctagatcaccatattcttttcaaaagaatcagcaagaatatatagaacacaaatgtggaaattgatacattcatatataccaccacacacagattgatgacatatagttacatgctcgatctgtacataaatgaaactcaaagccccaaacagtcacacgctaagcatacacgtagtaacacgacacaatcttctcctcagtacgaaaacaacagaaatcacacaagaatccaagagaaaacatgtacacttgagtactgaggagaagatttgtgttcggcgccacaacccttcaggctaccaaccagccgcttctcaacatcgcagcaaccggattcacgttcggctgctggctaatcaaaaccttgggctcggaggccgcgagcgtcgcggcgtcgacctctcggccttcgccttgctcggcgacgggacgctgctcagcctgtccgcggagcccagggaaaggcgcctgttgatcaccgacggtgaggtcacctgatggtgatcgggcgccgtcctctcggcggtgacggggacctcgatcgccgccggccgagccgccttggccttcacggacttggtcgtctgcatgtagctcggcgtcagcggcgccgcgtcgtctctcgccgggccgccgcctcctcctccgaggctcagcctcctcggcagctccccggaccgcaggctcgtcgtgcgccgcagcgagaggaggacgacgccgcccttctcgccgtggaccgggctgacgctccccgccgcgcgccgctcgcagctccgcggccgctccggctgcaggctcgtcgtgcggcgcaggccggtcgtcgccgtcgccgacctccggaacgggctggcgcccgggctcgacggcggcaccgccgacgtcctccacggcgaccgcggcgtgggtgtcgacggcgacgggcagctcggcgggcgggtgaacctggccaacgccggcgtcgacgtgggtatctgcaccgacatgggcacccgcctcccgctgccgccgcctttcaccgccgcggctgcacggccgctgttcgccggcgtggtctggctctcccacggcctcgccgccgccatccatcgctccgcccagctccatccccagttggggttgccggtgtccatgaacattggaggcggcgaggctcgcgcagatgaaggtttcctgttactccactgctcgcagaaaccatacaaagttcagaaaaaagaaaaaacgagcaagaaacaggcgatcggatgtactccgtagcacggatataaccatgtcacctgatgagaaaatgcgtatgccaacgccctttgccgccttaaagcggcttcttgcttcatcgtcagcacggtctcaatctgctccttggactgatgtccatggtcccagctttcaccaatctgccaagacattagcattgccagttttctttactgatttgttacaacggcaaaagtatgagttttaaggatacggatttttcatccctcgaagagatatcccctcgttatttacatatcatctaaatagttagtattaaaatattttttaaaaataataatatagattaatatgaaatgtcactttacaaacatgcacaaccaaattcgatttttacaagttacaataaaaagaacaaattaaactgaaaataattatcttacattcgtatctatatttgtagaagttaagttttaactcatgtttgtggagtaatatatttcatattaatttatcttgtcatttttaaagtctttttgataactatttaagtgacatgtacgaattgagcggatatcttgtgacgaaatgactttcctcgttataaggtctgaagatgcaaatgacaacagcatgaaacgatgcgatgagtgacaggagcaagtgatcatcaatgcattattgcacctttattctgtcaaggctctgtttaacgtggacctggcttttcagggccttcttgtcctcctccgtcttcacccgcctggagtgtatctgggtctggaccctcgtcatcgtttgcatgcagtacaaggcttcgtaggtctggcgcttcacggcgagcccctccagcagcagcatcaaccgatccaatcccctcgcccgttgcgatctccttccctgccatcgagtgttaaaatgttcccaaatcaaaccatcacgagccatgaaaccatttgagatcggcaaaaaaaaatgatgaaacgaacagcagaagagagggtcaattaccaggtagaccctgcatgctttctgaatcttgacggcggcgagctcctcggcggaacgcgccggagctcttggcgcggtggtcgtggggcgggtcaccgccgtggccgtggccgtcttctgtgcggcggcggcggcggcgtccgaggatttcgcctccttgatcccgtcatcccgctgccgatcaggcggcgcagcttgtggaggaggaggatgatgatggtgaggttgctgccgagccgacggagaggtcaccggcggcgacgacgtggacgcgctcgacttgctgaattgcagtatcttcttcagggtcgacctcttgcccttctcacgttcgaaaacatccgccgatgatcagtcaagttcatgcagaattgcgcatcggcgatcgaagaagatttgatggtgagaagtagtgcgatttaacttttttttttctctgtgacatttcgttaccttcttttcgttctcgtggctgtcattctccgacgtgctcagggctctctgcacggcgtcgaaccacttcccctttttccccatctctcctcttctcggggctaaattaacgctggcaacacgagttcaggggttgtaaaagaaggtgaatttttctcaccgttggcgccgccgggatggacacgcagttattccggcgatcaacctcgacgacggcgacttatccgccaagccgtgggccccacatgacagccacctccgaatggcgcctgtccctacattccagtatgtccacaccaccccctcgccgcgataaacgcgcgcgcacgttttttttttaactccggctcgagaagtctagtactagatcctctccgacatccgtggccccacatgtcagttccccgtgccaccgtatgggcccgtggcccatgggcccaaccggcccggcctctcggtccatttgctctcgtctgcctctccgaccacgaccagagctcgcctcgccctcgccgattaccagttcaccacgcccgcgcgcacacggagaccgaggccgcgaaaaccctagcgccttcgtctacctccagctcgtcgcgcgcggcggatggtgatgagctcgcgctccctcagggctcgcgactagggttctcttctcactccatcgctagcggcggctcagattgggaggtattccggtgtttttttggtgctaaattttgccccccgtattggtgttttgcaggtgacgcgacgctgcgattgaggtcggcgccggtggccgtggatcgcggcgcgatggagctggagggggatccgaggctggtcggcgttgcgttgggggagtacttgacggatggggaggaggtgatggtggtgggaggggcgggggaggtggccgtggcggcccgtgtggtgaaggtggatggggggaaggttgtggtggccatggatgaggatgccgctgcaggaggtggcgtcggagtcggagtggtgagcgatttgctgtacgcgacgggatcggcggcagtgggtgaaggatacgggggtgagtgtactgacaacatgcaggagctgctggatggaggtggtgcagaggagaggatgttgggagtggaactcggtggctttcgtggtgaggcagggtggacgcttatgccggtaggagatgctgctatagagacttcagaggaaatgtctgatcctgtcacactgcaatactctgaaacaggtaaagctttgctccaatttggtcactgctctgatcaattgggatgctctgccggttgattctgacatgttgttatcatcacctcgcatggcgtcactgaatagtataattgcagggctcacaggggatgatcagcgtgccaaataccgcctccctcctcttgacggatatggttttcgagcatctggtcttgtgtggagtaaattgaaaggtcatccttggtggcctggtgagatatttgatacttcagatgcatctgagttggcactgaaacaccagaagaagaagggcagtcatttggtagcatatttcggtagcaatacttttgcatggtgtgatgaatcccagttgaagcctttcatgtcaaactattctcaaatggcgaatcagagcaattctgatgccttcattagttcagttaaccttgctcttgaagaaatctcaaggcggatattgtcagggatgtgttgcttttgtcttccagaagatctctctgacaattgcatgtcttacatggttgagaattctgggctcagggatggagttacttgctctaaagttacacggtcagagatcttggaatgtttcaatgcagaaaattttctaagttatctcaggtcattggctctgttccctggtcaaggaggtgagctgctggatttagtgatagcatgctctcaacttacatctttctttcaatctaagggatgccatgaacttgcatcatttggaagtggcagtgagttggttgatgatggcatggactcttcttccaccaagaatgtcttgttgccagaagctgtcacctatgaacagaaacctagtgaaggtaagcccaaaagacgtaggataaaaacttgtgttaaaaaacctcagaatgatttagagttgacagaggaaaatcccatatccagtttgaacaatgagtgcacttttgttgattgcatgggcttgaacatcattgggaaagttaaagggaagagaagtgaaaagaggagaaaatatgtgccttctcctgaggtacatacaactgatcatgggcaggacgactcctggtctggattctgtttaaacaatgatccaactgataccctcggggaagcaagtgccaaaatgaggccaagacgtaagcagagatcatcgaaagaaacatgtgcaccttcatcagatctctcttcccatgtaccacctctgcaacttggattgcttggtcctaagaaacagatacaactgatagaaagataaattatccatgccgatgaacagagaattgatgagatcatgccctccgcacttgttttgagttttggcagatcagctgctcttccctcaaaattggatcttattaggttgttcagtcgctatggacctctgaaagaaaatgagactgaagttcaccagaacacgaatactgttaaagttgccttcaagagacgttttgatgctgcaaacgctttcagtgttgttggcaagtatagctattttggaccttcgctttgtagttttcggcttgtaaatttgccattttccctatccaagttaagccctgaagatcctggcacggaggttcctggtaagcatctgttagttgcattcacaattcaatgagcaaaaatataagtcttacggtaccttatgatatgtgtttcttgtagcttgtagggagtctggagtggatattgtgcatgttggcatcatcagcaaagttgataaagctcaaaatctgtagagaaagcatcagcgtttgatatggtcgatccagcagggcgagctaacaaaattgtaggtgagggcacggctgaagaatcagatgagaaaatcagttagcttttcttccattaaaacttgtttatattcaggtttgtctgctagatgaaagtgttgtctcatccgggtgatgcattttgtatagaaaacgggaatccgacactagtattaaaatgttagtcttcagtaactagagcatgtatatagtcatgctttttctgtacaaacttaaggtaaaccactgtccgtttatggcaattagatatccttctgaccatattaagattaaatcaagtaggggaacccttggttgtttacactattcatgatcagctttgggagcttttgggcaagctactgagatgtaacttgtgttacttgtcgtctatgataagagaatgcactgtctaattcctcgttgatgccggaagctaattgtgtttgcaccactgtgggtctgtggcatgaggtatatgaacttaggacggttccattttgaaccctctcatcccttcagccctggaatctgtgtgctactaactgatttgcagccttgcagatgagtgaagtgttggttgagctcatttatcgtaaatttctattctattggagagagatcacaaatttctcttatccattttttttcctaatgtcatttgtgatattgattctcgatgttagctcattttatcctcttttttttggtcattcatcaatgtcttttatacaactataaacgcaaatgttctgtgaagaatcaagaattcatggcgcgtgatcttgatcgagatggagaaaatgagagattgatcgacgatgtaaaggaagacaactgctagaaatcaagcaaaacataagcgatcttgggcttcgttggctatctacgctacgcaattccgtatgatcataagaccatttctgactcgtatgcacattgcctttgacgctgaagtagcgtgctaacagccacgacgcgggtgaaagagagaaacaaactttccctttttctgaggatagagaaacgaattctgtggaactatttttcaccactttaaccagaatttttttataactttcaatataattttttgaactttttaatcgaaattgaaatttcacaaaactttaggtacttcgacaaattattgtaaaactataggtttagcgcaaaatttctcacgaaactacatattttaagatggtgtcataaaaataaagattaagtagttaatttatcataaaactacaatgtttatagctctaacataacggcggtgtaaggaatttaaaccatagaatgtgtaattttgtgataacttcaatatgagatttgtagtttttgtgatatttaaccttaaatatgtagttttgtgataaatttgtcataaaatctatagtttggtgatagattgatcaaaagaacagtggttttacgaaatttactcatcaaaaaataactcccactacaaagtttttgattactttcaatacaattttttataactttctccagattttttttacaactttgataatacaaactttttttttactttcaatacattttctaataacctttctctgtgaagaatcacattgaaaaataaaaaaatctataaaaaataatgtttgcataaaaggacctcgtgcaggcttagggtttaagaatgtttttttttttggttggctccaatgttaagatcatgaggagagagatgagtaaaacttataaatagattaaaaaaacaaaaaaaatcaaacaaacatgtaaagctgagatgcacaaaccatagtttttatgcctcttttatactttcatacagggttttcttagcaaagtgttaaactgaatgaatcttgttaccgttatcttattaatctcaagtgctacaataggcataccgagttaacaaaagctctctttccaatatagtcaaacaaacaaagttgtaattatatatactaaacaacttaaaattttacaaactatttatttaactggctaaaaacgcttctcataaaactcgccaataaaaaagataaatcatttataattgcacggtgtgtacgacactacctctaactcataattttataccataactatcaatagttaaaacaatatattttataccgtaccttaccagtaaaattgtatactcggagcattagtctattaaatataggaaatcactatcttatggatatgattttaatacaaacattcatgtagtagaaatatcacttttttgagggatcgaaactcgcagcccttgagaaaacaattaattgtgtaattgtcataaacaaaaaatcatacaacactcatcaaatacactatatcataaattatgatataggagtagtactactttgttttccttctggatcaactggttccatcccatcttggcatctttccttccattgcctctctccacggtctcacctcaccgtgcaggttgctgtgcaccccccaaacgcaaacgcgatagagacgctcacgactgcacttcctgcaggctgcactgcactcgcacacacctccaccctcctcctcccctcccccctgttcactcccgcatccaattcccccccatctctctctctctctctctctctcatccatcgccccgaagtcctcctcctcctcctcctcgaggacctcgacaccttcctagctcaccgcgcgcgcgcctcgccctcctacgcaggtaaacccccccgccccctcgagctcgccatcccgcgctgatctgcggcctagggtttcagatcgagggggggaaattccgcgccgctgaccttctcccgcctcgatccctgcagattccttcgccggtgggggtggggggagaacggcggcggcgttgttgcgatgagctcgacccacgtggctgtcgaggccccggatccggggggagacgggggcctcggcgaggcgaggctggtggatgctgatgctgctgctgcaccggcggcgggggatgcggaggggagattgggtggtggtggtggtggcagctcggcccccgccgctgcgggggacgctgatgtgacgatgacggaggccgtggaggaggaggtggaggtggaggttgcgggtgatgccgaggcggaggctgcggtggtggcgggggatgcggcgggtgatccgttgtatgggacggagtcggctggtatggttgtggatgagcccgttgacgccgccgagggaggggtagatgggggagatggtggcgaggaggggttggaagcggaggctagggttttgcagggtgaggctgcgacggagcccgttccggcaggaggagatgttgccattgcttctgaagtggcggcggaagcacatgattctgctactcctgagcatgccgaggccggtaagcggaccgatgacagtttgatgtactgtctcttactcctttcgcgtcgctgaataatggttactacatttcagaatccaatgatctcgaagaaaaccatgttgatagaggaaaagataatggcgtggcggtggcgcactgtgacgacgaaatgcagaataatgtggaggggagctccgagatccaagaagatgatggagctcccacacttgagcagcaggatgatgagtctgaaatgcccctgccttctagtgtgtcgaattttgaattatgcgctagatacagccttcctcctcttgataaaggagaatttcgagtttctgaccttgtctggggtaaagtaaaaagccatccttggtggcctggtgagatttttgacccttcagatgcgtctgagttggcattgaagcaccagaagaagggcagccatttgatagcatatttcggtgacaatacttttgcatggtgcgatgaatcccaattgaagccttttgtatcaaattattcacaaatggagaaacagagcagttcagatgcctttgttagttcagttaactatgcccttgaagaactctcaaggcggatattgtcagggatgagctgttcttgtttaccggaagagctatctgacaatgggatgtcctatatggtcgagaatgctgggctcaaggatggagttacttgctctgcagttaaccggtctgagattttgtcatgttgcagcccagaaaatcttcttaattatgttaagtctttggctctgttccctggccaaggtggtgacttgctggaattagtgatagcttgctctcaacttacatctttttatcgatctaagggatgccctgaacttgcatcattccaaacaggcagtgcatgggttgagaatggtgtggacccttcttccatcaaggatgatgtggttgatgaagttgtcactaatgaagagcctcctgctaatgataagcccaaaagaggcagggggcgacctcgtaagcagaaacctcaggatggtctagagctgacagagaaaaagtcaacatccaatctttctactgataatgcctatgatcatcctgcggaaaggcagatggatatggagtttgatgaatttgacggtttacagagcaagaagaaaagaagccttgactcgtttgaagatcctgagaccaaggcggcagctccatcttttggtagttctttcaagatcggggaatgtattcggcgagctgcaagccagctgacaggatcttcatctattgtcaagtcccagaatgaacaggtgcctcataagaacatcgctgaaacagaaaatggagattttgatgtctctagtgatgatgctatcaatgagcttagtgtggagaagcgtgcaaaaaggagacggatgcataggcaccacagtgcagaccccaaggaattgttatcacagctgtgctcagtggctgtggagccaacgcacggatatagtttctctgcaatggtaattaattacttcagtgattataggaactatgttgtttctactactactgaagcaaatatcgttgagaaaactactgcaaaaaaggggagaaagcggaaggttatgccttctcctgaggtggagacaactgatcacatgcaggattcctactggtctggcttgagtttgcataatcacccaattcatgatctcagaagagcgagtactagcacaaggccaaggcgcagaaggagatcattgcgggaaacatatttccatgcacaacaaaatctacagcatggactattgagtcctaagaaacagatacaagtgatagagagatcaattatccatgttgatgaaaagatggttgatgaggtcaagcccactgcacttgttttgagctttggtaggtcaagtgctcttccttctgaaactgatctggttaagatgtttggtcgctatggtccactgaaagaatctgagattgaagttcatgccagctcgaatactgttaaagtagtcttcaagaaacgtgctgatgctgaaagggctttcagttttgctggcaagtttagtacatttggtccttcgctccgcagttaccgtcttgtgaatatgccattttttctcagctcacaaaccaataatacagaggcacactctgagtaccatggtctggagattccaggtaaacaatccttctattactttttgtaagctagtgtaaaagttggttaacattttagaaaatatttgcatgtttaataataccacagggcatttttttttttgcaggtcccaagtga

SEQ ID NO: 25242 - DNA, 6100 bp, Oryza sativa
gaagtacaggttgaggagactactacaactgagaaattgtagaggataaagaactagctgaggagacgacagaaggtgaaactacagctgaagtacaggttgcggagactacttcaactgagaaaattgtagaggataaagaactagctgaggagacaacagaaggtgaagctacagctgaagtacacattgaagaaacttcaacaactgaaagaactgtagaggataaagtggtacctgaggagacaacggaaggtgaagctactgctgaagtactcgaggaatgtacagccattgagaaaattgtagaggataataccatagctgaggagattacagaaggtgaaactgtagctgaagtacatgttgaggtagctacagcaattgataaagctgtagaggaaaacacactagctgaggagacagctaaaggtgaaactacacctgaagtacacgttgaggaaactacaacagcagaggaatctgtgggggacaaagcagtagatgagacaacaaaaggtgaaactacagctgaagtatatgctgaagaatcaaccgagaaaactgtagaggataccacagttgaggcaccagatgagaaaactaaaacagccaatgatcctgtagaggatgccaccgttgaagagccagataagaaaaccgcagccaatgatcctgcagaggatgccacagtcgaagagccagataagaaaaccgcagccaatgatcatgtagaggatgctacccttgaagagccagataagaaaactgcagccaatgatcatgtagaggatgtgactgttgaagagccagataagaaaaccgcagccaatgatcctgtagaggaagtcatccctgaagagacagataagaacaccacaaccaatgatccagtagaggatgtgactattgaagagccagatatgaaaaccgaagccaatgatcctgtagaggaagccaccgttgaagagccagctgtggaagctgggacaattgaagagattgctacggctgaagcacgagatgagaaaaccatgataaccgaggaaactgcacaggatcccatggttgaagatgagaaaaccatgacaaccgaggaaaccgtacaggagcccatggttgaagatgagaaaaccgtgacaacggaggaaactgtacaggatcccatggttgtagatgacaaaaccatgacaaccgagaaaactgtacaggattccatggttgaagaaggtggtacgaatatcgcagctgctgaggaaactgtagagcatgctgctgctactgctgaggctttggctggacaagcaagttcaaccgagcagaacgggtagcataagctggattcttgtaggttttggatgatattgcggcagtcggctcaactgattcatccaatctggatgtcgtgtggaatcaactctagcaacatagcgatattagtttctagtaactacggcgtatttgctgccttctatataaaccttacatgtagttgtcttgggagcagcagcagtgtgtcacgaatagaagagtttcttcagaaacggtggtgcgacagccagtggaccagctactggattagcatccgaattaagccatgttctttcctactacattttaagggcctttgggccaatctaccggggactcatgattcttgtaccaatcttccattttgtaaactggctgtgttctgtaggttatttctcctttattccatcatagtagctcatatttttcaggctgattctacatttctggttgcaacttatctaatctcatcatgaaatgtacattttttttccctagctgcttgattacttgtttatctgtgctagaaaggttgatgagtggtaataatgtccatttccgcttttccttgtcttaagtaattatgtttgtctaaattgcaaccagttgtactttgatggttcagatagtcagtaaacgttatttttctgtaacttctatcgagttgggctgaatcctaacaggcatccagatttttcagccctgtttggtattttatcccctgcgctgcaatagcatatataagtccaggcaaatttttctaacgcaaaatagcgcccacccaattggcgaacatcaaggtgctcacaaaagcttgatcacggctagattggatgaaattagctcttttttatttctttttttaattggaaatgaagcatgctcacaaaagcttgatccgatcttatcacggctagattggatgaaattagctcttttttatttctttttttaattggaaatgaagcatgctcacaaaagcttgatccgatcttatcacggctaaattggatgaaattagctcctttttatttctttttttaattggaaatgaagcagccaagttttgataaagcaaccttcagttagcaacttggcgtaggtaacataaactgagcacgtccccccaaaaaacaagtactccaatagataaagccaacatcgttcacatttcacggtaaatgtgatacgccaacagcatcgcactcttgtttggacttcaagagcgaccacacatgggagggagagaatgggaatcagagtaaaattgctaccattacagagagcatctatttctcaatagtacaacacgctagttcaggacgaaatacaacatgaatatttatgcctcccaatacagattatatggaaccgaatgacagccaaagaccaattgttaaattatcctgaatatacatacaacaacagagctagaccacgaaccgaaactatcctcacggggagtaatttacatctgagaagcagccttggctcgacgcttccaagcagcatcagttcctggttgacaaacatgggacctagaggtggtagcaagttacttccttcactgctcaccatgaggtgtaggtatatatattagctaacgactgcagcaccaaataaaatccacctgcgctattagcaaatgtgtcggcacatgaaccattcccgtacaagatatcaaaaattcgaaatagcatatggttcttcgacggattaggtatacctagcaacagttgcatgaaaaggtcctatcttcagtttgagacatccccattatggtactgggcaaggcaaaagaaagaaaaaaacatcagcaaacgtatcgagatcagatgagattatgcaagtggcaatatcttatgccagaaatattgaaaagtgaactcttacactcaaacagtaactttgtgcatgtttcagtttttttaatggattttgcccagatctaaccaaaacaaaaaaaggaagggaaacaagctctggctggatgcattctgctgaaggaaatgcacctagatttatggatttatcattcatttactgttcatacacaaaatatccagtaattctttgatctcagtaactagacaatgaatcaacctaaaagggacagtccaacaacatactctctgtaccaaaaaaaacaacttgctttgaatctggacaaacatttgtctagattcattgcaaggaattgattttttttggtacaggggaagtagaggatggagaggccaatcatgtttactactccaggaacttccaaacagtagaagtctcctaacactgaagaaacaaaaggacggcacaataaggagattaaaagttatcttctcatgtgtctctttaaaatgaccagtggcagtagaatggtagcaggatggcactactagatatttaccagagaatctcacgttcatgttattattagaacaaatataggcataataaagctgataaatctaaactaaacgtactacatggccagtaaaaatatcctaaaacaaagaggaaaaaaatcaaacacaactgtgaatcaactagctaatggaactccccgaagtctaaaccacaatattgtcttgtatgctcccaagacatgacggtatattcagcaaaatactttgacaacgatcaaccatgtgtatatgcatactgccagtaattccaaacaattgaagataaatcacctgaggttgcatataacccattccttgattgtatgctgcttgttggcccatctataaagaataaaaatagtgtaagttcacatcctgttggacaggaacaagaaaacaaacaagcagacactaaccccttgggcacttgaactgcttcctccatgagaaccaagtacatcctttttcacagagccatcaccagcctttgcagttaatttactatcaccctatgttttaatgatgataaaagagctgagcaatactcaacacatctcagattttgtgtaggcatgatagtacaatcatgaatcataatagaattcttggtcttaaccatagtaaaagagtgctctgcttgctgtatggtgcagaatcatgattcatcttgtctttttacctattgattttcaaaggcatgtagcatgcaattttttggcccatatagaattgatacagggaaacttgataaaaaatttgtttcactcaagactatacgaagcatcatagtacatccaattgacaagaacaaggtatatatacgatctaaaactgatggaattattggatcccatgaagagaattctatatgccttcaaaatttggacatagctagctgcacaggtgagctaagctcatgatgcagacaggattgtatagatcaataattcattttcaaggctgattttatttatgaactttatatatcttgaacatttgcatcttagtgtctatgaaatatgaatgcctcttagtgtctatgaaatatgaacacaaagaaaagcatggatttgtaggaggcactcatcatcaagcaaaaaaatcagtagcctatggaacatgataacaaaatagttaaataccacgtacctccatctgcaaccagcacagccattcaccaaacaaaaacaaacaagagaagccatattagattgataaaggagacttaacaaacgaaaatgacaggcatacacaaagtattaatgttttaactccaggctacactaaaaaaaatgttgtagagaatttggtctttttttaaagctacactatgatatgtcgtgtaagtaggaagttttatcttcaggtaagtaaactttcagtgtaaaggtgatctttttataggatctctggttgattcaaaacattttactgtatttgcattggatcttataaaatttaagattgacggtaaacatggtaaatgaattaaatagcattttagtagctcaacgattcataaaaatttggacttggtacaaggttagtaggttactgcaaatgatcactgctgtgttttcaggtccaagcaacagctttcaattaattaattaatgtactaacaccatattccaaccattcctttcacggtataaaattggaatcataaagcaagatttgctgacaagaatctttcttccaaagcaacatgagctaaagaaattagctcataccacaaacattacaagttatccatccgtcctcaagttgaacaaattactagagtatactccctaataatattaaggttaccaagcaagttattagtaattcagacacacctcgaaaaagcaaactagcgatgtccctacctaactcgcaaagcaataactaaacctttttaaatcaacagagaatcaccccaattccaaacatccacatcagtacgcacctctctgtacttctgcaggtagaccttgaggggctcgatgtagtcctcgaagcccagcgtggccatcgcccacagcaagtcgtcgccgttgatggtcttgcgcttctccctctggcatttatcgctcgccctgtaatgttgccccaccacaacaaaaacccagtcacatctcatcgccgccaacgacaagtcaaacaacgagctcaaagctcaaaactcaaaagaagacagagcagagcagagcagagcacaagaggggggaggacgagggcgacgactcactcgctggtgatgaaggagatgaactcggagacgcactcctgcacggtctccttggcgtccttggcgatcttcccgttggccgggatggccttcttcatgatgcggctgatgttggcgatggggaggaacctgtcctgctccctcacccccccac

SEQ ID NO: 25243 - DNA, 7898 bp, Oryza sativa
tcctccccccgggctccccggcccatcagccatcccacctcccccctcctgcaccaccaccacccaaacccaaaccctagatccatcagtccccgcatcccaaaaccctagaaatgggattcgagcgaaggagagagaggcgtaggcgtaccttatatagaagcgcgggcgcgcgcggagagggcgccacgtggagaggagagagaggggggttgggcgcgaggtggtgaagcgaggaggagagagagagagagagagggggagaggagagagagaggaagcgggggtgggaacggagcggaggtgaggcggagaggcgagagggggagatcggacgctggagaagagaaggcggctgaggcgggcgcgattgaaggggtcggggtatcagggccgttcgtggaggggtatatatagggcggacgcgggcgccgccgcgtggggggtacgggtgagggtttggctgactgggtttgcctggccggtgcacggtggaccgggtgtaggggtctaggggaggagatttctttttttcttttttgctttttgggtttttcttttgcctttttgtagccttttgttttaggttttttttagaaaaaaaaagttttggattgaggtgagtttgtcgtttggtgagagtgcacacaacgtgggggttttacagttttacatcacaaatagaatgtgagatttgccataaaaaacatttatgatttgctttttttttcccgcttcttcctctgatacacgaggcatttgattttatgccgttcttaatatacgagtgaacatttgttatatatcaccattcatcagtggagggtaattagccgggaatattagaagctaccgctgctatacgtgacgctgacctcaattatttttgactggatggagtattttattaaaggttttacattgccataggttgtaaagcagtgtcattgtaacaacaattaaatagctacttcaagcgttaaattttgttttaaaatatagctacttcatcacttgttatattatctcaaccaattacaaccatatttcgtatagatttttcacataatttttcatctaaactaatcacaattatcactcgtttaatttcatttcgcttcttagtttctgtaaaaagttctacaagtacttgtatttttaagcaaagtgaataagttaagtaatacctattgaatacatacatggataattggatatgcttgtaaatcgatcggcagtgatgacaagtccagaactaaggtatgcgcatctaagccatttaattatattataggtcagcttttactaaaacgactagaagactgtgatagtcctatgaaaatatcaatactgaacgataggacgacaagatatttacaaaaggcagacatgactaacgtgtttttctgagggaacaaacagatggtatctgaacagacagctttatgtcaagatgttccaagcaaacaacattatctttttggacagaattactattacaattataactaacaaagtatttgaggaccgaaaacttttcttcagaaatgattatcatctcttgcaccgttgcacgtgttctaccctttcactttgcgtcccgtatgtgtaaagtcaactgcggatcgcaagatgttgcagctaaataacaaccttatcatcctcatcctcggacacaattacaattaaataagatcggcaagatcaagctgcctgatactgcaagtgattgtgcaagtgagaattttcttttaggttttaaggcttatggacaaagcaacaacatgaggggagtagtatactagtagttagtatagcatatcatcatctccaggacctatacttaaccggcatatattcgacagatgcgcatgattgccttccgctatttaaccgggacagacagacacaggactcccatcgcatctggaagcgaaccgtgtcgccattttctagcgacttcggccgtccagcgaagcaaaacttttggcgtcaacgcgaagctttgcggaaacacacaatgacacaaacacaacagcagctcaaaagtgaatgcagacacaacctcatgctgaagccaacatgaccacgaacacgtacatgcgaaatgtgtccccacaaaggcaaggcatgaccttatcgaaaactttaaccctgcctatatcaaaattttcgttgctaccgattttttgattgggtagagaaccaacccaagcatagagcgacctgttgttgaaaaagaaatttacatcgtaagaattgatccgtcgtgaaatctctgcaccacgagcagacagtcctgaaactgagagctggtaacaaatgcttccaaacgtattaggcaatataagctccaataggcgaacagaacgatggatagtaatagtattgaagattttcaccagccacgtatatttacaccaaaagagaaggtttgcatcaacagcagcgagctaagctgagagtcgccatgttcgcgactacttgagcacacctacaggcaactaccactatgtacagagaaggaagggcatgcgccacctcagttttttccctttcctaacatcagctccacccgaatcatatgtcttggtaagttaagcagtgaaccacccacatttacaccatgttttcctacgtgatacttacaaaacacacatttctactgcgtgtgatggcatgcgcagctagatgctatcagtttcaagtcaagataagtggaaggacccctgaccttccgtaatcgcgtagagtagtttctccctcatcttgtcctgcagattgcgtataacaatttggtgtcaatgcaaatagtactggaaatcaagaactaatcacggaataatatctttaactactttaaaatctcagtcgttctccctccccttccaaaaaaacggctctagaaaagcccatgaaagaaaggcataaacaaaactgaattacttttttatcttcggatatgttgcacgcacaggcatgtaactagtctccaaaatatgcaagtgtggttttgagattttgacttaaacctaggcaaaaccgtcaattcgttctagttatagtttagtagatgatgtctcatacggtgacataaatgagggattgatttaatttatgaaaattccagaatataccagtggactgttaaaaagctaatcagaacagtagtatgttacagaccttggaagaataggggggtaactttagataattagcacaagtcatcacactcggaaggtcatcatcagcctcgttgctgttatgctgctgattatattacaaaatattagggaagatagtaagaaaaaacaaatcctaaaagaagtatataatgaaaacagacctttcggacaaccgtcaacttcggatttagcgcagctaacccacccggtgggagtcgaggtgaacctgttataaattgcaagaaagctctgcgttgatggccttcaaactcctgtataacctccaacaactgcaatgtatttggcatgtaaagaaaagagcctttactaccatttcagaataaaatatttaaccgtctaaatatatgaatactgaagaacttacattaatgacaggagggctgctggaagtgtagccatgatcaaactttatatgatccacaagtttcgcaaactgttcacaaacaaggatcagcaagggcggtagaatgaacacagaagtaacaacaaactccacaaaagaaaggcgcttacatcccacgtatcttgttcaccgcagagtaatcgctccagctcatcctctgagaagacctggagcatgcttaatggaaatacctgcatttcccaatgtcagtttcacaataaaatggattcctaaaggacaaatgccaacaacacagctttcctcctaattataaattgagacggagggaacggcacctaaaccctcaacatatctgaatctgttcaaatgaattgaatggcgatgaaaaattctaagatagcgattcgccctacctccctgcccatttccatactagcatatcatattgctaatgaaaaccaccatgaaacatacctcattgaatcctgacttaaaagcttccagctgtcttgcaattccacttctaattgttgcatcaacaacaaaagaaacatactgttctaaattgtcagcacttacctgaaagcaacatgaacaattaagtaagagtctaatcagctaagaaactgaaagcattgaagtgtatgctcatatgcgcttacattatccaagctattttctaaagaaagaacatattctggatatcctggaagagcgaactcaatagcaagatcctcaatcctgcaacctcgataagacaaatcagatgtactcttgcagtccccacttgaacttgattctaaatattttctccgagcagcaagtgctttaaactccataagggtcattgctagttcaggatcaaatgagtgaatgtcatatatattaagttcctaagaaagaaaaaggttatttagagacttggaaagtatgaaagcatagcaaacttcatccagggattcagtccaaaatacctgtcctagtataagcctgtaaaatgctttagaaaatggaatgtcgagaattctgttgtctttaactgcctttgcaacgacctgaccaaggaggtggaactgtttattcacttctgagaaggaagaacaatccacatgggtggaccatggtttaggaaaaagtccattaggggcaaccacaaatacagaaccaccatgaacattatccaggccagcttcgccggagagctcccctctccacatgcctaaaccagacttctgaaactcatgacttatcaatgtatagaattccatcgtaggacccaagcctgtgcctacttcctcttcatattctacttcaagcattgcattactccgagcatgtgattgcatcactttagcagcagaaacaagtatattgtcgcgatcaactttgaactttttccgtgagaaggaaggcaccctttctgtcattacaccactgccacttgtatccatcatattcccatgttgtggggtcaaagaaccaaatgctgtcagctggaaatacttccatcttgcctcaaaagaaaacaagaagggacatgcagacatcagttcagtgcaccataaaggcaggcaacgagaccttaaaaccaagggatcatgcatctgttgctccagtttatctgtcaatttagcactgacaaactcctgctgtggaactacagaaacatcaactttcagatcatcaaggtcagttatgcttccatgtacaaaagcacggtttctctcatcagagacgaggtgaaaagagtatcggttcaacccctctagaacttttagcataaacaatatgtcatatgatggacttgatctgtcaagtttgcaaggaagtttgccaagcaacaggctagtgaagaaagggagcgtctgacaaatatatccagctttatcgggatgtgctggtgttgttgcacaagatgaatacttaagaggatcatcaatttctgggtttgtagccgttctatatgttacatcatgcacaatgcgccaaaactggttgtccaatattatgtcagaacctgcattaatctgatcctgcaggattgattgatacagagtaacagattggtcaagctcttttcctttcaagctaaataacaattttggttgcgcagcatgatcacttgtgtttgtctcttgttggcctgcacctgcacatgcattgcagtattgaagtttccagaataagaggaagtatgcaaacaagagtttaaacataagtgtttcacgatcgccagactacgcttactgtactactcctgtacttaccagatgacgaaggccctttatttgagcctggttctacagatggactttgatttcctattataacaccctgaaaaagagaaccattttagtcttaaaagacaggatggccatcgaagtaatttacaacgctgtcttttgtcagatatagcatagcaactgctctttttggtacagaacatgttgctctggaacagcaactaaattaatttgaccaaagatgtttctgaaatattttttttggatacatgaaaacataacaggtaattttagtacaaaaagtatacatcattagactcttttaacgtctttattaaaaactagcacggtggcccgcgcagattgcgcggctagcatcattatattttctctcatataatagcatatatgttttctcattatattattaaaatatattacaatgacaacataattttaaattttgcaataacttttcaaaactactaatgtgtaataactactctagtctcctcttctaatattccctattttttaattctgaatttcagctatttctaaattgtatttctatatgtactctgctttttttttctgagattaatgtgagaatttctaggccatgagagcgaacgtggaggctcctttttattccgaatttagttggttttaaattccaatatgaactatatactctacttctaaaattccttattttttaattccaaatttctatttttttcttaattgtatttctatatggactctatactctacttctaatatttcttatttttaattccgaatttcggttatttcctaattgtatttctatatggactctatactctacttctaatattccttatttttaattccgaatttcagctatttcctaattgtatttctatatggactctagtctcctcttttaatattccttattttttaattccgaatttcaattatttctaaattgtatttctatatggactctaagtctcctcttctaatattccttattttttaattccgaatttcagctatttctaaattgtatttctataaggactctagtctcctcttttaatattccttattttttaattccgaatttcagctatttctaaattgtatttctatatggactctgctttttctttttctccgattaatgtgagaatttctaggacgtgagaacgaacgtggaggctcctttttttcccaaattttagttagttttaaattcctatatggactctatactctacttctaatatttcttactttttaattccgaatttcttttttttttcttaattgtatttctatatggactctatactctacttctaatattccttatttttaattcagaatttctattatttcctaattgtatttctatatggactctatactctacttctaatattccttatttttaattccgaatttctattatttcctaattgtatttctatatggactctatactcctcttctaatatttcttattttttaattccgaatttcaactatttctaaagtgtatttctatatggactctgcattttctttttctccgattaatgtgagaatttctaggtcataagagcgaacgtggaggctcctttttttttccgaattttagttagttttaaattcctatatggactctatactctacttctaatatttcttattttttaatttcgaatttctttttttttcttaattgtatttctatatggactctatactctacttctaatattccttatttttaattcagaatttctattatttcctaattgtatttctatatggactctatactctacttctaatattccttatttttaattccgaatttctattatttcctaattgtatttctatatggactctatactcctcctctaatattccttatttttaaattccgaatttcaactatttctaaagtgtatttctatatggactctagtctcctcttctaatattccttatttttttaattccgaatttcagctatttctaaattgtatttctatatggactctgttttttctttttctccga

SEQ ID NO: 25244 - DNA, 3347 bp, Oryza sativa
tggtggaggggatgattcgggtgaggaatatctttcctggaggtcatcttcaagatatttgttttcagaagcagtaccattggccgatgattcaggcttctgattgcttgtgcctgtacaaattttgggccacaagaactcttcaatagtgtgcaacaaggaagagatctccaaattaacaacattatcatagctcgacaagttggtttgatcttcatccttcttaaatcgaactcggatacatggagtaatcgttgagtgcctagtagggatatctgaaatattgttcctcggcttgaaattatggctcattatcactgggaagttgtcaagagaagtaagagcattctgcagtttccttactaacagtgtcaagagcatatcaccccagccctgctccattcttgaaaaagatatctgagtaaatgactgaaacctttttagcacggcaagaaaatgttcagtattgtaatcatttgggattctctccaattggaggtacttgccattggagagatagttagacaaggatttgatcaatccactctcaagaaattcaaaggtagtcattgtttctcccccatgaagctccatcatcacctcacttaaaatgtcagtcaagtgctcttcattttgtatattgtctcggtttaatgacttatcagcagaatcgttcagaactgcgcagcaagttttgagcttttgcaaaatctctgtcaaacccatctcagagttcactgcttcggtagtgaaataggttgtcttcacatgccttgcgaaagtaaaaaggttgccctttccaatcatgcaagtccttgtttcagcagcatcagatctgggataatcaaatgcatagcagaaacatgtaggcttatttcttatgataggctgattctctgattgttgtgcttcatctgagagattagtagactttgaacaatcttcttgcataagaagagcctcaactgcatagacaacaccttccttgataaaggatccaaggtaagcatcaggaagcttttgcatgagaatttcgataagctttagtgatgagaatagcacatgatgatccttccgagacaataaaccagccaagaaactgccacagagatcacaaaaataaatctatccgtctaaaatcggcaattttagcacaacaaaaatgcaattgatcttgcttatggctatcatgtaaaaaatagaatcttgccttggtatgttcgcatccttgagcaactcttgaagcatttcaggtttactgaaataacagatgttttttacaattgaagcacatccatagcaaatgtatgaatttgcaccagagttgactgcctgcacgaaacaacatactcatttccatatttcagataacaatcattattatgacttcttgtgattgctatcaacggaccttgatcaagacaggaagaatctccatagagaactgacacaaaaaccttggttcatctacaattattttttcttttgcaagtaccatctgggtatcttcaacatctcttgctgcagaaggaataagttggtttgctaatttcaaagcttcattgacctgagatcagcacaattaagtttatctcaaatcatgtacattttacgaatggccctcgtatataatcaaatgaagtaaattagggtggtgcatacatggagtgacttgttatgcacaccaatgcaacttattagattcaagttctaatgtaacaaggtaaattagagtggtgcatacatgacaagtaacttgttatgcacattagtgtgtagcagggacaaacatgtgtcagaggtcagatatcagcaacctaaggtagaatggcgctaagcacaaagtgatacagtgcactaattgggtgatgaataggtcacatcagagcttataaggaattaaaaagactaatcaatccatcttgtcatggtgtagtgatgcccataaaagccgttacatcttgaacaaaccaaatataatatatactaattaagtctacagataagggtataatcaactgataataaaaaattgcactaaattgcaaccaaactcaattgatatcctactgctgctgccaccttctagtcttaaatgtctggaagtaagaaaaccaacctggttgctttggttttccaaaggcaggtaaggcatgccatgtgagagatctgaagtaaccagaattctgcttatggtgttaccaacattcagctcaaagagagacttcacagccacaagtgaattgcaggctagcttggcgagaagcccaatcaagttctgcaatcaaaacaaacaacaatcaatttcctcaacacactcgggtacatgcatagaagtttaactgcaagcatacactgcatgttgatgggctaagagaagttagcccgccagtattgatcagaggcaggactttctctatcacaccctggtgacagaacatgtcgagaagctccactgaactactaaatgaatccacgatgtttatcaagcaacttgcaaccttctccactacctgcaatgttacatcactttaaacataagcacaagttgcatacatacccctaaacaagctcagtttgaagaatgaacaatggtaccatcttgtcctcagactgcagtagattacacaacactggcacagaatccatcacaaattgggagcaatctttggggaccttcttacaggcattcgcagcagctgagaccgcaaccctctgaacaatacaagtaagaatccaattggtggatgtagtaattcgtcagcaaaatatggaaatcgcttgcgatgctaacctggatacttgcagagaagaagtcaatgtacgtgagcacagcagtgatcatgccagcctgcaagcacggcgtcggctgcctctgcgatatcttctcgaatgcttgcaagcactgcgcgtgacacgatcgcatacaacacgtcaggccaatgtgatcgttcgatcgggtcgtcagagccgctcggttacctgctcagcgacatcaaggtactcgatggcgaggagacgggagcagagcagggggagcaggccgtggcggacgacggcgtcggcggcgcgcggcatcgcgtcgcagaggtacgtgatggcgcgcacggagagcagcatcacgtcggggctcgccgccgccgccggcgcgccatcggcgccgcccccgaccagccgcaccagcgcccgcgccgcggcgtccgtcgggaagtatcccccgacgtcctccccgcaaaggagagcgcctcgcagagctccgtcagcgccgccaccaccgccccctcctccgcgccgtccgccgccaccgccgccaccatccgctggaacctccctcccccgccgcacct

SEQ ID NO: 25245 - DNA, 2793 bp, Oryza sativa
atatatacacggaggcgtgcgtgggtgggtttagttcctagcggtctagccaccccacccctcctcctccgcgatcggttttgaaaattgcggggatttcaaccgattttggtggaaatttccccgtgtttcgattcgattctactacgggttcggctccaccgccatactgtgtgttgtgttgtggtgtggtttcgctcgcagcgtgtgggtgggtggggttgggttgtttcggctttttggggcggcgcgcgtcgacgtgttgcgctcgtgtttgctttgggtatggtgtggtttgtggcggattggtacgctgcgggtgattatgctgattaggagggtgattggcctaggttgtgtttgttttgttctttacttccagcaaaaagatgacatgctgactatgatagtaggatctcacaaggcatctatttggttagttgtgtaggtttttgtgaaaagggagacggcgacaattaatcttttgtcaatgaaaggaataattgggcttctttgctaaggaagtaatcctttgttagggaaggattgaacttcattattaaggaaaaaaatcctttgttacaagttcagatacatgcagttgccataaaaaacgattcatcgggaataggacacatacgattatttgaaattacgcgataaatttaatgttcacgaatatttatatttatctttacctacttaaaatattgataatagtacttctttcctttggttgtgttagttgtcatttgttctccaatgatctggtttagtttcctatttagatatattcattgtttgactctacgaaaagtttttcctctttccttgagctgatttaggagggtgcctttggttggttttttgaccctgcttttggctttaaaagggctcaaaagccatagctgcatctacccaaaagctgcttttgctctagtacaaattgaaagcacctccaccccttactttcagctgcttttgggtcaaatatttatccgcctgccactggttacgtggagaaaataacgtttagcctcgttctattccgcatcgcgtccgctctgtcgcccccttcggcatcgcgtccgctgccactcgctacccgtcgtcgaggtcctccagacctgcccgagccagctaccggaccttcgttgccccaactccggcgagtccaggaccattgcggcgcgagattcttcacctcccctccccgtggcggcgtggctcccccatccccttggtcccatggccggtgacggggcgggagggcgtgggaccaggagcgcgatctccaccgcccatctctgcgcccctcctccattgctggctgcaagcgggagctcccgagcgcctgagcggaggaatagggtccccgacagaggaacagccgagaccaagcaggattcgtgtcccgcggtcaagggcgcgggtgggattcttcctcgacggccgcgggcgcggacgcagctcttgccccggtggctgatagccaaggccgcgtgtgggattcgtccccgggtggccatggcaacctcgcgtccatggtgcttgcctcctgttccctcgtcccgtgctgccttcatggccggccacgcgagcctaggatgtcctgcaactggctggcgagcccaagccggcgtgccccgatagtgagtccccatgcgaaccgtgtgaggaagaagatgaatgcagtgaggctgacaggcagggtccagccgtaagtgagagaagtattttccaaaagccacagttgatcaaccaaacgggcttttgtcttcctcgtagctgcttttccaaagctacttttgcaaaagccaaagcccacgtctgcttttccataagctactgcccaaccaaacacacccttactccttccgcgcacggaatatggaggagtaggcgtgcgcggaaggagcaagggtgtgtttgctacaattcttgggttttttggtctttttttaatctttcatcccccacgtgatcaacacaaacgaaacacgcgattatagtgagattaattaagtattagcctaaaaaacttgaaaattgaattagtatgattttttaaagcaactttcatatagaaaacttttgtaaaaaaatacaccgtttaagagtttgaaaagcgtacgtgcggaaaacgagggaagtgagttgggaaagaggggaaaagaacacaaccctagtgtgcctcctattctccatcctccttcctctatacccctccttgtccgcccccttatccccacatgtacaaataattgaagtatgcacgattatttaaaaaatatacggtcagttttgacgttcacaacatgctgtctttatcgttatatagtttaaaatttaataacatttatgtcttttttgatttgtatatgttatctttcgttatccattagttaaagttttgtttcctattcgactttattcatcgttgttgtttcatatttccttaaaacgatttcatcctcttgcatgcctgatttttagtacccaattattttacttcttagttatcgcctttttctcgttcattatactcgagcatagtcaacagcaatcttacatgccccatcttctccacctcccctccccgaactcctccttgtccgctcccttttcttcctctcctagatgaggagcatcaatgttatatatgttgtacttgttagcacaccttttaccgtcatgatatgggctattttagtcggacaaatcgttgaaatttaaaacccatattgacagtatacttaaaaaagtataaatgattaaaatataattttaaac

SEQ ID NO: 25246 - DNA, 12513 bp, Oryza sativa
cagttagatagcatagagacatggactagttgtaaaaaaggaggaaaaaaacattttgagccaagtccatgcatctctcttggtcttggagcacatgaacagctgattatttttttatctgtgtgttagcatagattgtgttcgaatgaaaaaaacaaaaaagacaggtaaagcgagatgagccactaattattttaaacctagaaataaattaatatattttttctataacttttttttaaaaacataccgtttagagcacccgtaatggtaaagtaatgtgccatatataaaacatttacatctcagcaatagactacattaatagtaaaccactttaatggtatatctacatgggtatctatagctctctaatctattgcctcgtttttctctatagactatctccaggttagtagatagctttgctctctctcttcatttaatctcttccaaatagaaaaatatgctgacatagatcttttgtagagagtctatagataatcattgcgggtgcccttatcagtttggaaattgtgtgcgtgtaaaacgagagaaaattcatctctttcttgctcagtacaacgcagcctcaagtaggaaggaaaaaaaccatcacgatttacgaaatacagtattgaagacctgctgtgaattgtgaatttgtgattgggctcgaacgcgggccggagaggggagagctcctcgccgctgacatgtgggccatagtaaaaagtgggacccacatgtcaggtctgcttccgcccgctgagcttcacgccgtcctcgctcgccgcgctaaaaatttcgctccgcccgccccccaactctcctctcccgccgccgccgccgctgccgcgcaactcgccggagagagaagggagcggcccatttctcaggcgaacatgtacgacgatggtcctcgcaagggaaaacccggcggcctctccatggacgccgccaccgccgcggggctcgcggcggtctggccggagtacttcccggaggagagcgagttcgccgcggacggccgcagcgcgcgcctcgccgccgacctggtcgacctcttctcctcccccgacgcgagcgacctcctctcgcgagtaagcggtggctcccctcccccatttcattcctctgcggcgttgcccttcgagctctcctcacggcggaccggcggtgcccatgctagggttccgcgcttgtggtatggtccgattgttgagatcggttcatgcgtgatcggtgttacaacttagaatatatcagtggtggcatttctcgataatgtctacgattttagcggatggacgctccaatcgttaattgaaatgttctggaaatcgcaactaaagtgagtactgtgagcaattcataaatgtttttctaaggaatcttcgcaagtgtttactttgtcttaaacaagagcaagtgtttaagcttgtaaaggttcctgttatagtgttattacctatttaatttagctcgttcagggagcttgcaactcgatgttaatgggcgtttagtttctactctcttaatgccttaattgcgaatgcatgaatttcatatgaattaggaaacaattcaatcattgcaagaatcttaaaatgcgaatttgtaatttactctctttggttaatgtggttactagtagttaccacttacaacttcatggcttcatgcacaggtcgaagatgatggtgatatcctctcccttccagttgatttccagcagctatcgaatttgacctggattactgaagctctccaggaaaatccaaaagaagccttgctttccatgggagctgcagttcatctggttgatgtttctattcatgttttcctagaattaatgagcctgttacttttgtagtgctttcatgtttggtccactatacctgatatgtcagttcttgatattttcttcagattgtgtgtgctagcagggacttgcagttgggcgacatcaacaaaatcaatatcaggctttacaaccacaccaagactattgccttgaagaatttaaaagcggcgtatattagtaaatgtcattctgccttttatcatcgcgtgctaaagtttgtgcacatataaatcaaagtactaatttgtagattcacttggcagagaaacttgtgacagtgcgtggaacagtcttaaaagtaagtacggtgaagcctctagtgctgcagctgaatttccaatgcatgaaatgcgctacaaaattccctcgtgtgttctgtgatgggaagttttcacctccagtatcgtgcagtattcagggatgcaagagcagaacattcataccaatgagatctactgcaaagttgatggattttcagaaaataaggcaagtgataaataaactactacattatcctttatttatggtactaaagcttttctcatattgtttccaaatcaggatacaagagcttgctagtggtgaaagccatgaagaaggcagagtgccacgaactatagagtgtgagcttacagaggatcttgtagattgttgcatccctggagagactgtaacagttactggaatcgtcaaagtactgaacaactacatggatgttggaggaggtacaatttttgagaaattaatatttctttgcattacttctttttctaaaccttgtggatttactggctcacacacaggcttcaaattttgcgttttcattggcaatcattggcaaaaaatgtttatctataaatgcctcagatttgttcacaacacctatagaggcacatatgctgtcagcatcttgttttatttgatcattaatctgattggatgttaatgttctgattagagagccttggccatctaccatgtgacattacgattttttttttctagatggagcagttgaaaagaaaatagcatttgagcaaagcaagaaaatagctttctatttttttgtttcttccagaccatatatcctaaatctgatatatagaaatcagaatcaccagatcaactcatggactactgagcataaacagttcattagaagcattattatagtccatgttaactatagggaaacctatctaatgctgtatttggcagcatgagggtatctattttacctctcccccactttacattcttagaacttgcaagatcatttggtctttgttagatatatgcatgctttctatgagctccttgaatttaagaatcaagaaattatttataggataatggagaacaaattagttatgatgtacagccttactattgtttgacccttacccgctgatgccatatatgcagataaactcttatttgatctgagcttccccccttctaatttcttaattttacacaatatttcatttgtatcttcagggaaatccaaaagcaggaaccaaggtttatactacctgtacctggaagcaatttcagtaagaaactcaaaggtccatgctgcttcaggaaattcagatgctgctagtggatctttcggttttcaagcttttactgaaaaggatcttgaattcatctccaaatttaaggaagaacacggtgctgatgtttttcgtcaaattcttcactccttttgcccctctatctatggacatgaacttgtaaaaggtattggtattatacttatcttccatctactatttaatgtggttaaagatttaaatttaattcactctgagctgacccaataacggaatgaaatattttggtgaaacctaccgctccccttaatttctgtttacacgaaatgagataacaattcctttttttctttttattcaattagttctggaccgctgcagcattttctgcccaaatgatcttctataggaactctcttgtgctgcatgaaaaaaatgagaatgtatctcccaagctcctaaactgtgatttttgcaaaaactttctatatataaattgcttagaatacttttcaaaaacaacttttgcactttgtaataattaattcattcgtttgtacccttgaatattatcataaaatcagataatctatcatctattcatctattcagaacaatcaaactgggggtggtgaaattgactaagctactggtagttcccgttctctgagatatgtgtgttctccttttcaactagagcatacagcacccattctactacactactgtttacaaacatgccagcccttcttggtccttttcctgctttgcattttattgctagatacaactaaatgaatatttccaatttttcagctggtatcacccttgcgcttttcggtggtgtgcagaagcactccattgatcaaaacaaggtcccagtgagaggagacattcatgctgttgttgttggtaatccttcacttatagagggtctaagcttcttggtaagaattttcttagcatttctcacagtgcaattaaaactcttgctcaatgcaattctaggtgatcctggactaggcaagagtcaactgctacaggctgcagcagctgtttctccacggggtatatatgtttgtgggaatacaacaacaaatgctggtctaactgttgctgtggttaaagattctatgtcaaatgattatgcatttgaggctggtaagcatatgagattgtcctttgtcccttccctagactgttgtttaagttctgttacctaactggctgtctgtcctggtgggtttttgtcttaaaacctgtgagtggaacaaaataagtactcccgttgttccaaaatataaggatttctagaactcaaaacattgtactccctccgtcccataatataagggatggtatgtccagattcatcgtattaggatgtgtcacatccacccaaaatcctttatattacgggacggagggagtaccagatataagcatttctgggcactgattccaacgcacagaaatccatatattttcagccaatcagttgtttcatgttcgagaggggaatctaagcaattcaaaatttgacaactgagatgactaaaagggaatcttttcccttaacttcattatttgctaaaaaaaacctagaaatgcttatattctggaacggagggagtaggatgcaagtgggtctggtagtattttttttcttgactaatttaatggcacatacataaagtggcctatcaaataattttgaccctttggtttacaggtgccatggtccttgctgaccgtggaatatgctgtatcgatgagttcgataaaatgtcagcagagcatcaggttttaaccttgtataagcttcactctgaaatgttaattagaaagccctaacctgccacatcatgtttctaatgaatttgagttcataggctttactggaagccatggagcagcaatgtgtatctgtggcaaaggctggccttgtggcaagtttatcagcccgtacttctgtgctagcggctgctaatcctgttggtggtcattacgagtgggtccttgtgtactgcctgtcattcttgatccatcatttccgttcatattttccttttcaattgatattgattatagtttgattgtggaccatccagtccattcacacatagccagagataattaagcaccaatgcattcagcaaggtgaccgggaggaatagagatgggtccataaagttagcaagaaatagcagcatacggattgagtccagttattttgatagtcagcacaagatcttgatagagtttgtttcgtatgacttcatattcatataaagggttacatcgtgcatccctgtgatgtaagctagtacatcgggtgttaaacacttcagaaaagagagtgaagggctgaaggcgacggtttggatggaggccgcttgcttgggttgataggaactaaactactttcaacgtgagccatgggtcatggcagatttcttgtactgctagtatgttcaattgctgtagtatagttgggaagtgttggctactggtgtttttgctgcaagtgaataagacaaacacatagtataaaaaaccggaccgggggtcgacccgctctggccgtcggttcaccggtcgaaccgccggtttatttatttattaatattatatttgatttgcattaatttaatatagaaccatcacaaattggtggaaatttgcataaataaaccagtatatctattattacatagtcacaacataaaaaaataaatgtggtgtggtaacataataaattcatcatgtcatattgccataggaaaaataaaaactggttcgatacttaaaaacccgccaccggttcaaggaaaaaccgcccggttcaccggttttttaccggttcgattgcatgggtggtcttttagcagaaccgaaccaccaaggtggccggtttcggttttttctggttcaaccgccggtccgatccagttttttgtactatggacaaacctgcaagtaataccattctccattcatctcaaattatttagagtacattttgcaaagctaacatttatgtgaaactatcatagccctacgtatttaagtttgagtttttcttttttggcataactacatatttaggagcaaaaatattcacaaacctatgaaacattgtatcataaccttgcttacaactcgggttcactcttcagtgacgaaagctaaatatgtcctgttacctagggtggatgggggcacatcatattagccacctggaatagcttgttggttggggtgcgtatcagcactaagggcattatttgaggaggtaaaggagtcgatgggagggaaatgatgcgtggatgctcatgatcttgaatctttaattgtcagcggcgcagagctgcagcagaagtcacagtttcttgcgaaagcagttttgtatgattgttctggattctagaatgctaaggctctaatttgatggagttgtagttctttgagaattttttgcttctaaatatgttggttggtgacgtgacattcaaacttgtttgttgtgatggtttttgtgcaaaatttgtaattatgcagaaaatataaattatttatggtgtcatgtcttcattttattgatgcacccatactatttgtttgttcgatatgatattttgtgtgttttcaattgagatgcttccctgctagatattaaatttgcgtgttactgccaacttaacagttaagtacctttttgtagccgagcaaaaacagtgaatgagaatttaaagatgagtgccgccctcctctctcggtttgacttggttttcattttacttgacaagccagatgaattgctggataagagagtatcagatcacataattgcagtaagtgaatgttaaccatgtttcctgttctcatctgttaagtatatatgactgatatgggatatgctcacatgatgcaatatatctgtatttagcaagaaaggatatgtatttagggaaacatgcatagttaaataactaaacaattttactatttccgataagcagctccactccaatgatggaggccctttcacagccaacaagaggataagaacaggtattttcttggtttattcaaaactgatttatagtgccttcttttcggttgccaatcattgttggttttcataactaaaaacttatccatcattgttgatttgggccttctttcagtgcctcaatttaatgccagtacagagtttggtgtcggtagaacttcattagcttcaaggctgagattgcaccctgagaaagacaaggatttctgtccattacctggaccattacttcgcaagtatatatcttatgcaagaagccatgttaacccccgaatctcgtaagttcctctttcactcataaaatgtcataaatgcaaactgttggctatccctatcctttttgcctgtagtgcttcccctaaccttactatttttcctctttaagcatgccgtcgccagcagctgacagtctgcaaaagttctatttggatttgagaaaacaaagtgattctgctgatggtacgcccatcacagcccggcaactggaaagccttgtaaggttggcagaagctcgtgcgcgggtggatctaagagaagaagtgactttagaagatgctaaggtgaaataacttaaatacttgagtgctgaaaaggttgctaagtctctaatctctgttgctgggtaaacctgacttcttatattattaaatcaaacttaaaaaacaacaagttgtgccatttcacccacacttgtgcaaattatgttcacattgcagatcttttttgtttgtttgtttgtttcctaattcttcctactatagttctaaatttgaaaatctcacatttgcaccacctgattagtaacttcttccagccaaaggcagatagaaatccagtgataacacaattgaacaactcagcagcattaaagctgaatgatatttttaaattgttcattttttttacatgacaggaggtcatagacataatgacggaatccttatatgacaagtgtgttgatgagcacggtgttgtggactttgctcgaagtggtgggatgagcaatcaaaagcaatcaaagaaatttctccgcgccttaaacgagcagtgtgatttgcagaaaaaggattgcttttcaatgaatgtaagtgtcatggcaattatgcttcaaatgtcttttttgctgaagatttcttgtttcagttgtcgaattatacaacatcacaccagtcaaatcaattaaaatggaaaaatggacacaattcttattctgctctaattgaagaatattttcctttgctactttttgagcatttttgttcttttggtgtgtggtttgtccagtgaaagaagatatgcagctttcttgatttgtttacagtatttagtcacaaacaaagcattgtaattagtaggtgcctttttttttttaatctttgatcgttccatcatgttctatccctttcctattgccaggagatgtacaacttagctgatcgtatcagcttgcaagttgcaaatttagatgctattgtggaaagtttgaacaatgctggctatatcactaaaaagggatcatcaatgtatcaggtatcgtcttgttttcaataagctctagcattactcttgctgtcagaacaatactagctggcctcctggcatcatgctgattatcgttttgacttgtagaatccgtggtaaccctcacggaaaacgtgacatatgctctttcctctttttttttttttttctgttaacaggtagtgacttcgtcataccaggggagccaagctacatggtcaagacgatgagttttgttgcatcctagatgatcagtaagtttgttggcgaggactgtgctggttctgttattagtcgatattatactacgggtgcaatcctatgcctccttgttaacgctgggattattcccagttactctgaatcaacatgattgactgatagcttccctttgcttgctgaaccagctgatccaggaggttagtgtctgattctattccgagagccatagaacggggtgatgctgcttcttaaggctgcaaggtgattaaagatgtctggctgcccactcactgtaatgtgcaaaacagcaattttgtatagaacttcatatttgctaatcatccatattgttataacctgtcgcccagatttgtcagttttaggtgatgctaatattttcgttctgatagtatatggtagtataattgggtaagcaatgtttgagctgcggtggcttacccgtcgcggcggaccggtctatgcctcgatcgccggtggcgggggattgggctgcgcgtggagggagcggtacgtggtaatggcccatatgtaagtggcacaactgtaaactgcacaaactcaggggatcaatttccgtaggtgggtggagcacccgcgcggcgcggcgatatgggcggcgcggtgcccgcaacggcggctgcgtgtgacctgtcgtagctgtgcgccgcagcaaaagccgatggcgatgatctctagcagccgcggcgacgacggctcggctcggatgacaccggcccacgggctgcgcttgaggggggaagagagaaaaaggtccattatccatcgcagcaggccataatatgaggcctcatctagttgggccgacgacggcaaggggatgcaaggcctacgacgcgcgcggcgccggcggtcagcacagccatgggccgccgtccaatcaagccctaaacctggaaattctgagagatatttaactatttaccactcttatgataattaagagtttatgactggatttacatgtcatacacgtgactcagtgagtggcaaataattaaacttgacatcttaaaagtggcaaatagttaaatgtcccaaattctaaagctcacaggtaggcaccagaaaggaaaaagaacggttggaaaaatagagtttcataaataaattgccaaccacaaagacaagtatattacggtcatgtttacgttataaactaatataatttgtaattattaatataaattaaaagtagtaagtaactaatttaaatatttcataatgatcttatagcatcaatggctgacaacacatataagggtcgttatggttaatttctttttattccaatgggttacgcttatttctttaaaaaatattaatgaaaaaagtactatttccgttccatttctgaaaacatgaaatcaaaacgttaagtacaaaacggaaacgatagccggtacagtcaagaagtcccgtaccgttttaaccctactcatcggacactgactgagattaagtccgacgaccaccacgtgcacagcgcctaataaaaccatttgatcgaggaaagcgtgtgatgacttggaacggactcaacggagagacgatggatgcaagtcaatttggggaaacggagttatataacgaatgccgtgcttaattagttcggcttaatttgcacgagaaagcggctaagctcaagtgtttcggttagctagctgtatcgcatgccctacgagaaatttaattgcttctcggacttttcaaggggagcaacaagacacggtcatttttttttagttcagttggcatatcacgtgcttcattgcccatttttggttgatggtttcccttctcgacgaagcagattataggtgtaatggttcataatctctggctgaaaaccgccaattatcggtcctatcggtccgatattagagagtggtcccaaattattattttttgtaggggatatcccaaattatttttgatcaaatttgatatagtgtgcgttcttttctacattttcatttatgaaccttgtagcattttcaacaaaattttgacgatttcatttatttgaaacagaaaatatttatgaattttcaactttcaaccgagattcaagtttgaaattctgagcaattcgtctgaattctgggggacgaaaatcaactaaattattggtgacttttggactatcggaagtggtcaaaacttgagccgaaaacgatactgtagtgtttacctgttcaatattttaccataactgagcttgcctagcttgtatggtaaaacctgcaaaggaaagttcatttttttttcagcgcagacaattgacagattaccctggccttgctgtgttgcacttataatgcagctacaggtaaggttcagaaaatccatgaaataaaacttgaccagaaatttcaattccacaacatcaaaaagcagagttctaacacagtttacacacaaatgcttaactgaattgacaagtagaaaaccaaacatagtacatgggaggtagtacacaaggaaggaatgaccaggcctaatacttgctgatccatccaacaacttatacaatccattatctaagaaaacaacttatacaatcaaacataaacaccaaaagacaccaagccaagaactagaagacaacattaacaaccttaacaagcaagtaagctacaggaggttcttacttaaaaaccttaacaacctcctgaacctgaaaggctaagacgacttaaccacacgaaatcaacgagaagtatggatggattagtgcttactctaatatggcagctaatccaaccaagacaggggcgagaggaagagatcaacaagagattttaactgattataagagctcttcgtaattattttaactttgctcctgaaaaattctgctgcgagcataaaaggagcccatagtagcagcagaaattggaggagcggatggcttcagcttctagttcagttgtcggtgtcgtcggagacaggaacgccgccgccgccgttcctgtcgttgcggccgcggccggcgatgacgccggagaacgcggcgacgatgtccttgatgatctgctccttgatctgccccctgcgcggaggcgggagcagcgccgcccgcgccgccctgccgccgccgccgccgccggcgcggtctcccgccgcgggaggcatggccggagccggagcctgagccgggtagctctcggtggccatcgtcgccggcgatctggtcggtggtcggagatcgggaggggggggggagg

SEQ ID NO: 25247 - DNA, 17912 bp, Oryza sativa
  unsure (1)..(17912): unsure at all n locations
ctctgcccgcatcccgggttcggttcggccggcggcggccattggcaattccgccggcttccgtcttgccaacaggccgcgctggcttgctgccgccctcgcctgccacccgcccatcgcggctctgcccgccgcctgcgctcgcctgccgccgcccgccgccgctcgcctgccgcgcggacccaccgccgcgctcgcctgccgcccgtccatcgccgcttcgcccaccggccgccagcctcacccactgaagaagagaaagagaagagataaaatagaagaggaggagaagaaacgaaaagaaaaaaaagatgtgcaactgatatgtgggcctcacgtactttttttaatttttcttgctgactaggatgccacgttagcgaaaccaccctcatatactgccatggaaccttctttgaacggtttatgtaagtttaggggtacacatttctggttttgtggttaagtgaccttaaaaaatctcgctgttaagttgagggacctccggtgaacttattccacagtctttctcttgtttttgccggctgtttttccgaatattcagttcctcctttaaataagaccaaagtaccctatctcacccactcaagcatcattttttttaagcaccattctactttccatacttctaaaaataaaattacatagaactgtctcccatttgaaacgggataccttaataaccatatatatgaacatcttgtccacaccattacatcacctatttgatgttattcttatccttcctctccccccctctctctctcttgtcctcatggctcaacagccgagagcgccatgcaaccatcggttcgtgtgatcaatgatgattagctccgtgttgccatggaaggccgactccactcaaggtggagggattgcggggctgatttttgaggcttctctagttcgcagtagttttggttgccaactgtgattcacggcaagcttcttctattgagcatctttcccatccttgagaaggtaccatgaggtacaaggtaccaatctaatttaaccgttgatttaacaggggtatgattgggggctaaaaaaaattaggtctctcttccacgtcgtcgtcgcccatcgagggtcgtcgggcatcgaggccggcgccgtcgtcgtcgcccattgagcccgccgccgccgtcgggcatcgaccgccgccgtcgtcgcccatcgaggctgctgccgccgtcggccatcgacccccgccgccatcgcgcatccagccgccaccgtctcgcatcgagccctccgtcgtcgtcgcccatcgaggttgccgttgccgtcacgcgtcacgcatccagccgctgtcatcgcccatcgaggttgccgccaccgtcacgcgtcacgcatccaaccgccaccgtcatgcatctagccctccgcggccgccactgctgtcgccgtcgcgcatcgtggccgccgccgccgccgcgcatcgaggctgccaccaccgccgctgccgctgccgccgccgtcgcgcatcgaggccgccgccgtcggccatcgagcccgccgcgcatcgagcccaccgagccgccatcacgcctttcgccggtctcgccgcaaatctggccgccgctgccgctgccaccgccgtcggccatcgagcccaccgagccgccgtcacgcctttcgccggtctcgccgcaaatccacaatcttcccgatttttcccctcgtgaaacagtaaaggacagaaatacccttccaccaatggtactgcttgaaagagaaggtgcagtaccatgaggtacggatgatttctgactgttggataatgctagatcaacggtcaggatttggtactgcacaacctcaaggacagtaaaaaaactcctaatagtatcatgatgctcaagtgcatcatattggtgataccatgatacttaggtattaggcctaacgtctagcgatatcacactaatacctacttagtaccatggcctggtctggtaccccaaatactcggtacttggaccctgataccaaggcttggtaccttggtacgagacactcggtaggtactggatctggtatctctatgtatcaagttcgataccctaggtacttggtaccaaatcgtggagagggggcatgtgccgttgcttctcccttcctctcctcgatgcctccctctttctttgctattgctatggctgagtgagggagctaagagggagcgcctctacttcattgtgttttgtacgtgggagctcgagtcggagaggaaaggaaacagttcatcacttctttctatatagttggtacccactacaagtattaacactataaagaagcatccaggttaagccacatcatcgataaccaatagccatccgatcgaatacatctttgtttgtttagctggcatgcacagccatgcaggccttaagtaagcaaactgccatgggtaattaagcacatcaatagatgacacacttaagtgctcctggtcatgcatatgtcccttgatcatattaagccattactatgtcccttgactatctactactcaaatgccaactttacactttattattttagaatgtttacttttgatatttcaattatgtttgtaagcacatatttacaaagttgtttatcatcattataaaatctcgtagcaacgcgcggggtataaaactagttaaatatattcggacggtatcccgtgttgtaggttgtagctgtactctgttataaaaatcaaactgagattagaaaaaaatcataatgatttgtgttaacagtatccttgctgctcccttgacctcgaaaaaaaaaattctcacagtggaaaaatcgatcatcgtgaacccaccatctaataatcgttgcagcaaagaataacctaattaaaattccaataggacaacgctttatatcaatgtctagacaaactatctaggtctcactactagttctccctccattccaaattccaaattgatctatatatatttcataggtacactaagataaaaaaaagctaataactattttatactatatttactctagcaacaaactcaatacatgcgccatccccactatttcctagccaataacaaatcaagatattgcatgtgggttataaatacttgtgatgcatgcatcaatgtccatttacttcaacgcacaaataacgaatagacctaatgaataaacacaaatatatagatcatttaaaaataacatatatatatatatatatatatatatatatatatatatatatatatataaatttggaatgaagggagtatttattatcggtaattttctatccaattcatctcaaaataaataaatctaaataaatgtagtaatgctcacactgtattcacgtgcactgatgcacagtgcggttccacgtaatggacacgcactcgctgatcatgcgccaaaaaaaagcaaaggtggcttatacacgatgactcgctgtcgaatatatgtttccgcctttgcactgtacgttcaatcgatatagatgcttctgtggcacacaagtttcatataaccaaggttgcgcagttgcgctagcttttctctccgctggaaattaagacgcatttgcagaattgaatactgggaatttctttctttctttctttttttttaaagaaaatctcttttcacaaatcacaagatgagcagagaaaggttgaaaggagagtagctctcattgagcacaataatacagaccatgcagcatggaagtttatattgcatatacacagcttctcttcttagggtcattttagttcacgaaaagaaaatttttagatgtcacatcagatgtttggccggatggcggaaggagttttcggacacgaatgaaaaaaaacactaattttataactcgtctggaaaccatgagacgaatattttgagcttaattaatccatcatagcacatgtgtgggttactgtagcacttatggctaattatagactaattaggctcaaaagattcgtctcacgatttcctccctaattgtgcaattagtttttttaaatctatatttaatgctctgtacatgtgtccaaagattcgatgtgatgattttgggaaaaaaatttagagaactaaaccaggccttacttgtatttatacatctctaatacatttatatacacatatcgaacttggcagacggatccatttcccttgtcttcattcaagccaagaaatgaacagctgctctgtatagtagcagagagtagagacagacatgatggagaatcaaaatagcatatgcatctatttgcacagtaccagagcattagagaagaacacaaactaaggaagtatatgtagtgcaactgcaagaacacacatctagttattattgtagcttgcttctctcctgatgaagctgttgcgatgatctgcagcctgggccgagttggagtcgtcatcagcagcagcgttgttggccatgaggttgctgatgctcctcacgatcctgcgcttgacctgccccctcttcagcggtggcctcttctccttcgccatgttggcgccgccgccgctcaagtagttgccgtagtagctgtactccatcaccctgcaaggctgcgacttaacacacactgatctctctctagcttcttcttcttgcctctgtcactgtgtgtgagtgatttgttctgttggggatggggagatgtgaggtatttataggcaaatgaatagcagcctcatctctgcctgcagggtctcgtgccacctcgtgtgaacgcacgcgaacgtaagtgacaaattaaagggaacttatgcggttaacctcatgttaagggcgatgtggacgtcagacgtgagaatcagtgactggtatcgttgaagcagggcatggtttagacgcacgagggtcagaatgccagattaattggctagtcagcacaaggaacccatgaaagccactcttaccaattttaaggcagtttctaaaacaaaaattttcacactttcacattgaatatttaaatacatgtatgaagtattaaatgtgaataaaaaaaaccaattacacagattgtgtgtaaattgcgagatgaatcttttaagcctaattgcgccatgatttgacaatgtggtgttacagtaaacatctgctaatgacggattaattaggcttaataaattcatatcgcattttcctggcggaatctgtaatttattttgttattagactacgtttaatacttcaaatgtgtgttcgtatatccggtgtgacaatcaaacccaaaaattttcccaactaaacaaggcctaagtggaagagtctcacttcgctaactaaacaaggcctaagtggaagagtctcacttcgctgttctctactgatagtagaaaacaatgtcaaccattaatcttatttgatcgaagggtcatattcatttctattaccaccacacttaatagtagtagaaacgtcatgggctattattgtccaagaaaaaatattaacggtctgatgaatggatacaaaactttttttttcacgatggatagataaaatctgaaataccagcattacttctaatcactaagttagtaaagcactgatatgaccttataaattatagcaattttaggtccttaaggaagaaggtaccatgaggtaccactttttccactgtaaatttggtacctcttgttacttaggtactatgaggtaccagattttacactatttttttaattacctcatggtacctcctcaagaaccgtagaattgctctataaattaacaactcagatcaattctgctaatagtatgatattactagtagagagtgtcgtagcgttgctcttagtggaaggtttcgttcatgagcttaactacggtgctctctactaatagtaaaaagtgatatgaacggttgatctcatttgatcgaaaagtttagatctgtatgtactaccacccccagttaacgatagtagaaatgtggaggaacattattgtaaaaattttgtgtgaagggatataatcgtcatttagcagagactaaacctttttttctcttactcttttttggctttttcaatgaaatatgagtgatgccagtggaatggatgacaactataggattaaattactattttacccttaataatgaacggttcatattattatatattaccagtagagagcatcggagcatcgcacttcattttatgttttcaagagtgttacataaggcaacaagaaatttaattgtttgttaaaatagcccacacgatgtattgtttcattttttttgttgttgtttcagagacaacacatgcagagacagatcacattagaaatagtatatacaaaatgaaactcatttcatctccttctttattaattacttgtcacatcaccaaaaatattggcatgcaaccccatttaatgagaatggaacttctattgagagtggcccctatcgtttatcgactataagtcaaaatttagtttgaaagttgattttagggattttaatcttaatctattatttaacacctacttttaaactacataaatggaagtgtttttccataaattattatttcaaggacctataaatcttttattggtatggcttatcagctcagctatatagctcaactaatcagagatgctaactagtgttccaaaggaaacctaaattttgcccttgatggtttgtcattttcgttctgattatgatctatgggcatcatgcacctttcaaagtttcacgcaaatcaatggactttccagcttgagtagattttcagtttgggtcttgctcgattaatccttaaaaaaaattagatggaactaagaaggattaattttacctcttaatttcttttatttttttcttcaattctcttataaaatggattaacctaacaagaaaaaggagaactagttaccctcgttttcttactgaactgtcagatgaatgtgcagttgtgcttgtgcacagtcacctgatcagctatggctgtagataacttcaagcatttcgtgtagctttgcactggacctcagagaaaaagaagacgtgctagctatctttgcactcctatcacaactttacactaccactccatgttttttttttacactttaaatttgtatcaactcgatgcattgacaaaaaagaaaccttaccgctcaagttgtacactgtgtacacataagccgaatatttacgatatccaaatggatcaggatctgatgccaaagtggcgaaaaagggtaagatatatatacctgcgctttcacatttttctgacgcatctgaaagatatttaaaaagatctgtacacagtacgcggagaaagtgcaggtatatatctgacactttcgcattttcggcacagcacagcatgatgctataatcacgtatccgaggtagtatgtttacatagatatttccaattcgacagaaatttggatgcaaattaatcaagactctgcaaattagttgagcggagaaaatatagaaaaataaatgaaacaaccaaaatgatcattttagtgtataacttttatattgctactcttaattagctgctaaaaagccaaggttaaaaaataaaaacaatgaaaagaactagattaatttaaaattaattttaaaattcaaatattgaatgtacgtagctgattaacgaaaactgaagaagacgagatttttttgtaactaatttatttcaagagttcgtaactacctacaaactttgtcaagtagggtaaaaccattttagtcagttagctagaccttattggaaaaagtacacctaaggtccctcaacttgtcggcgagttacaaaatcgtccctaaaccgatatataacatatctcaacttacaaaaccgtttgctttaggtccttcggtgattttgatcccggttttgtctgatatggcggctgagtcagagtgggcctcacatgtcagtatgccacgtcatcacctcctctctctctctctctcacttttctcctctgttggctggccgacgtgtcggaggaggtcgttgggcgaagacgggcgacggctggggaagaccggaggcgcacggccggccgacggacgctcgtcgccgtcatcgccgtggccgctggacgccggcgccgacgtggaagcggtccccgagctcactggcttggaccccagcggtggtgaggtgagcgaggatgcgcggggtggtgggggcggcctcggatgcagaggcgacggaggcggcgggcggcggtcgacgtcgaccatctggaggcggaggcgcgccggtgcctctcttggatctcggccaccacgctggagcagatgaggctgggagcggaggaggcccgcgggcaccgggcggtgtgtcgtcggcgcgtcgccgccctcaccaacgacgtggagagcgcgattccagagagagagagagagagagatgtgggcggtggccaacgacgcggcgctccaagtagatcgtgaggtcgaagcagccggggctgccctggatcgaggcgctacagatccatcgtcggcggaacgaacgagcaacagtagagggagcagtcaatcagtcatcacttccctcccttgagtattaggagtggttctcagtttctcgctcgattcacttgcacactctttcactccactgctccagtccagtgtgttcacatgctctgccccaacgcaattcaagcaagcagatgagatcgatgatgcgtctcatgatttgctgcctcctggtctctgcgggggtcgggggaatcacaggcgagggcaactcggaagtggtgctcctcctgcagcgcgtgaagccggtgctgcggagggaaggcgggaacgcgcagctggccacctggaccgcctccaccccgctctgcctgtggcgtggcctccgccaaatcccaggaggccgttgtacatcccctatcgtcgtccctgctgctgcatcccagtcgcctcggcttgaggatgtccttccccttcatcatgttacagagccggtggccggcagagtagaagagcggcggtggcgaagacgggctgaggccgggggagaccggaggccggcgccgccgccctccccttctcccacgtcgccggtgacctcctccggaccctgcgagaacagaaaagtgagtgagagagagagagagggaggggaggaagggaaaggaggggaggggaaagagatgattatgtggcaccctgatatgtggggcccacgtgggtcctatgttgactcaactgccacgttggataaagcggggtcaaaaaccattgaaggacctaaaacgaacggttttataagttgagggacgttgtatatctgattttgtggttgggggatattttggtaacccgatgataagttgagggaccttgggtgtacttttttcgaccttatttagatatatggtccacattggcatggagtggtagactagtgttttggtctatctgaataaggtatatgctggtgcaaattattgttattctttgatgtagtattgggagaatactggtacacgggcgtctgattagacaagaaagaatcaggacactgctactcctatatctgcgaataaaatttaaaaatatatctttttttcgtattttccgtttatatatacaggcgaaaaagaattgtatgaatatacctcttccgcggaacgggccgcgggaccgccactcgccgcgcgctcccgtggcttggccgcgcgggaccgccgcttgccgtgcgctcccgcgttgccgttgcgcgcgaccgtttcggtcggcagcggcatgcatgcatcattgcgtcattgctcatgcatgcatcattgcgtcattggtcagctcggctggatgcatgcacggctccgcagggcaggtacgcgggaccgctcggtcccgcagtgcagccgcgcgggaccggcgctcccggagcgtccgcggacaacttttttcacggtcgcgcgtccccgccgtgcgggaccgtgacgtcgcgcgcgggagcgacggttccgcacggccgttccgcgggagcgagtggctccgcctcggtcccgcaccttcatagaggtatattttcgcaattctttcccatacatatatataaacgcaaaacgttgaaaaaaaggtatatattcaatttttattcctacatctgcatatatggtaggctatactacttagctttttctccctccctcctcctcaccttaaatattttttttctaactacttatccgatctacgattcgatcacaccattgtatttgacgtaattaaatctttgtaacaagatatcacatggttatattctaatgaaaaatgtatattttaaaccgttagaactcaataatttatctgcgatagcgacatgtttcaacgtgcgttccattgtgtttcataaatttcacataactacctccctctattctctctcctgcttctctctccattttatccatccatgcatgcatttaacgagctttaaaatgattttttttctaaactacttatccaacttataatttgagcgtatcattgtatttgttgtaattaaaatgaagatttgcatgattatattttgatgaaagaaaaacacatgtttcagaacattaaaactcattgttcgtttcatatgtgatagcaacatgtttcaatacatgttatcaccgtgtttcacaaaatttttaagtgtttcaattgctgatttgtctgtttcaccatatacaattttaatgttttactcgttggtcaattaaaatatttgaccctgatttttttttagaaatcggatgccaaattgtagattcttccgtagtattgcattgtgctttgtgtgttggaattttagttatagagatcattctattcaccgaagactctactcttatttaggtttagagattctagatttatagaaatagggtcagaatctaaaaaagcaggatatcgggctccgagcttgattagcttcatgatctagagaaaagaaaaatctaaattatttaagaaagttcactacgccagaaccctacatctgtgacggcataccagtgacgggcctatgaattggtaacagatgaccgtcacctttgacgggtcgctaggtttgctgtcatcgatggggcatccggccgtggcccgtcacaggtatcccctcacctgtgacgggccagaaggaaaagccgtcacaggtgaggaagtgacgggttttcctcccaactcgtcactggtatcccctcacctgtgacgggccgtggcattatgagccgtcacaggtggtggtccgccacctgtgacggatttgttttacggcccgtcacaggtaggtcaatacctttgacgggcaactggtcatacctttgacgggtttttttaatctaacctgtttgaggtgtgttgggtctataaatactccccaaaccgccaactactttctatcccgaccagttcactgttcacaaatcggttgggagggcaaggggggcgattttttgctaaaattcaaggtaaaaaacacattattctccattccttctcaatatatcgatcatcatatatttttcttcgtatgttgttgatttctgatggatcgtagatggatgtactatgcgcatcgttcgtctaccgagtatagagagggggtcactgaatttgtcacatttgcggataatgacagaaaaagtaggatgagcatgcacatgttgtgtccatgtagggactataagaatgaacagatgatcgaagatagcgatgaagtgcatgcttatttaataatgaatggattcatgaagaaatatacctactggaccaagcatggagagcaagaggcgcctgatgtcgcagctgatgaagtgttggatcaggatgtagagaacaccgccgcagctcgagaaggcatgttcgtaccttctcctttaggtggagagaccatagatttggacactcaatgtctatctacaatgttgcatgacattaaagacgcagaggacaacgacagagattttgagaagattgtcagatgcccttgtatgatggatgtttagtaagttggtggaagattgtcagatgcccttgtatgatggatgcaagtcgaagcacagcaagttgtcatgcgtgttggaactcatgaagcttaaggctagtaatggctggtcgggcaagagttttacagaacttcttaagctgttaaaggacctgttgccagaggggaacaatttaccggatacgacatatgaagcaaagcaagtattatgtccgttgggtctggaggtcagaagaattcatgcatgtccgaacaactgcattttgtattacaaggaatacgctgacttggatatctgccctgtctgtggggcatcaagatacaaacgagcaaagagtgaaggtgaagaaagtaagtcaaagaggggaggcccagcaaaggtggtgtggtatctcccaattgcggagcgcatgaagagaatgtttgcgaataaggaacaagctaagctagtgcgctggcatgccgaagaatggaaagtcgatggtatgctgaggcacccagcagattcagtacagtggaggacaatcgataggatttaccagaaattctcaaatgacccaagaaacatgcgtttcgcaatgtgtaaggacgtcattaatccatttggtgatttgagcagtcgtcatagtacatggccagttctgcttgttaactataaccttcctccctggttgtgcttcaaaagaaagtatattatgcttgccatgctcattcaaggattgagacaacctggcaaggatatcgatgtgttccttgaaccgataatcgatgacttcgaaaggctatggaatgagggcacacggnnacatgggacgcataagcacaagagtatttcaacctccatgcgatgctgttttgtaccatcaacgattatccggcccttggcaacttttctggccaaactgtgaaagggaaatggacgtgttcggagtgtatggaggaaacaagaagcaaatggttgaagcatacacacaagacggtctagatgggtcacaggagatttctcccaaggtatcacccgtataggaatatgaaaaagaatttcaatggacacagatacagccggacccccggcagagctaacagggacagaggtgcacaacttagtgatgggaataaccaacgagtttggaaaaaagaggaaagttggaaagacaaaagagaagagcacgtcgaaggaaaaaacaaaagacaaaagagatgagcatgtggaaaaacaaaagacaaaagagatgagcatgtggaaaaagaagtcaatattttggagactaccatactggaaggatcttaaagttcgccactgcatagatttgatgcatgtcgagtagaatgtatgcgagagtttaatgggattactgcttaacccaggtactacaaaggatggtctcaacacctgacgagatcttgaagaaatgggtgttcgctcggaactacatcccataaccacaaaatccggcagggtttatcttcctccagcctgctacactctcttgaaagaagagaagattgatttgctaacatgtttgagtggtataaaggttccatctggttacttatcaagaatcagtaggctcgtttcactgcaagatcttaagttggtaggaatgaagtcgcatgattgccacgttcttataacacaactgttgcccgttgcactaaggaatattttgcctcctaaggtgcgacacacgatccagcggttgtgttccttcttccatgcaattggccagaagatcattgatcccgagggactagatgaactacaggcagaacttgtgagaaccctatgtcatcttgagatgtactttcctccaactttctttgacataatggagcatcttcccgtgcaccttgtgaggcaaacaaagtgctgtggtccagcattcatgacgcagatgtatccttgcgaaaggtacctagggatccttaagggttatgtatggaaccgttcacaccctgaggggagtatcatcgagagttacaccaccgaagaggtcatcgatttttgtgtggactacatgtcagaaacatcttcaattggattaccacgatctcatcacgaagggaggcttgatagtgttggtactattggaaaaaagactgttaggttggatcggaaggtgtacgataaagctcatttcacggtactgtagcatatgactgaggtggtgccgtacgttgacgaacaccttgcagttctccgacaggagaacccaggccgataagagagttgggtcagaaataagcacatgtcttctttcaacgagtggctgaaaaaccgaattgccaggttgcagaacttgtctagtgaaacacttcagtggttgtcacagggtcctgaatggagtgccaccacctggcaaggatatgacataaatggatacacctttcacacggtaaagcaagacagcaaatgcacagtgcagaacagtgggttacgcatcaaggctgctagtgacggtggtcatcgtgatcaatactatggtagagttgagcaaatattggagctagattacttgaagttcaaagtcccattgtttcgttgtcgatgggtcgatcttcgcaatgtaaaagttgacaatgaaggtttcaccactgtcaacttggctaacaacgcgtacaaggatgaaccgttcgttctcgccaaacaagttgttcaagtgttctacatagttgacccatgtaacaagaaactacatgttgttcgtgaagggaaaaggagaattgttggattggacaatattgcagacgaggatgattacaaccagcacatccatggcataggtcaagaaatacctctagaagaggaggaagaagaagatgacgttcaatatgcacgcgtcgaccatgaggaaggattatttttgtaatttatgtatgtagtttatgtctacatgtctgttatctgtatgactctatatgttcgcaatgatcaatagtatattgctgatgaaacagtcaaataaaataattaattgaagcacccactagaagtgaaataaaataattaaattagtataaccattggaaataaaataataaaattagtaaaataatgaagtgcaattactactgttagtgaaataaaataattaagtataaaaaaaatatagtgtatgtggaaatatgttaaggaaaataaaaaaactaagtgaaataaaataaaataaaattgctgtaggcaaactcacctatgacaggtggcccagagtgttgggcctatcacaagtggcctcacctgtgacggctcaacagttggcgcccgtcacaggtgaggccacctgtgacggccccatagttggcgcccgtcacaggtgagtttgactagggttgtcctagagttggacatcttctagatcgatccagatccagcacccactctcactcactcactctctcaaccgccgcctcgcctctctcgacctctccgccaccctctatgccctcctctccaccgccgcctcgacctctccaccgccgccctcgccgccgtcaaatccgccgccctctccaccctctccgtcgccctctacgccctcctctccaccgccgccctcgccgccgccctctccgctgccctctacgccctcttctccaccgccgcctcgacctctccacctccgccctctacgccctcgtgtgtacgccgctcgccctctccaccgaccgcgaccccgaccttcccgacgccggcctgcaccgccgaccatcaaggccgtcatcctcgccgcgtccccgacctcccaagacgacgtcgggatccacgacgccgacaactgcaccgtcgaccaccgcctccccgacctccccgacaccgggatccacgacaccggcctgcaccgccgaccatcaaggctgtcgtcctcgccgtgtccccgacctcccaagacgacgtcgggagccacgacgccagcaactgcactgccgaccaccgcctccccgacctccccgacgccgggatccatgacccggacgtcggccgccaagacaccgcctccccgacctcttctcctcgaccgccgaccaggtgcgttgcccccctcctcctgatgagatgatgaattgatgaattgctgtttggatggatgacttgcttgaattgaatggatgaattgctgtttagatgaagttagtagtactgtctcctttttttttgatgaaatatatgcatatttgagatgtgaaatatatgaggtgatgaatttggactgtttgtggatgaaatatatgcagtattagaggaattagtctttttgtattagatgatttcaggattaattttgctgcattggttgaattttgcatgattttaactagataaatggccagtgatgttttatgttaatacacccctgctactgttgttattgtgggctacttgttcatttttttaatctacaattgctactgttgctgctgtgttccttgttaaatggccagtgatgaattgctcaacaagaacagattatctacacttgttcattttttttatctatacttgttcttttttctggattgatatgaggagactatctagacatgttgttttagttaatttgcccctgttgttgttgcccctgtggactatctttgcccctgctgctgctgcccaatgtgttccttgttaaatggccagtgatgaattgctcaataagaatagattaactacacttgtttattttttttatctatacttcttttttctagattgataagaggagactatctagacatgttgttttagttaatttgcccctgttgttgctgcccctgtggactatctttgccctgctactggtcttactgtggctacttgttcaccctgctgttttatgtgaatttccccctgctgttgctgcccctgtggcatatatactcctgctgctgctgttttatgtcaataacattctatctgtacccttgctgctgctgttttttaaatttgcatgattgattcagtggttatatacctctacacttgttttttatggataagaacagagtatctacacttgttctttttttatgcataagaacagattttctgcacttgttcttttttctggattgataagaggagactatatacacttgttcttttttatgcataataatagatattgatgttatgatttcctctttttttcccttcatgcaaatgatggtaattgatgcataatttctaagcaaaactgaggccatatctttcatagtataccccgtattacattggatctaatgctatttagtataatggtaggaaatttataagctttttcacgaaaattagaccatgacaacgcccggcgcaaacccgccctccccaacacctgcgaggatccaggaagaagcaaacccagccacggagacagttgctgaaggtcatccctcgacaacagcggtcgaacaacccgaaattcatggtaatttataggataatttttcaccacatgaccacataaattttagctagcactccttagcatatgttgccttctgtttgtactaaagaattgccgcatgaacaacatacatcgatgtcgggtgggacaagtgcaagtaggtcgggtagaaatcctcggtcacaaaatatatggccgaccacaatgcaagttataagagaggttgacgctagtggtaggcccacggcgcccaggactgtcattggaagatggtctaactgctacgggctggcggcacgtgagaactttgggatcctccataaagatatcggcaaggtcacagaagccaagaaagagcgagcttggacggcattggagaaatggttcacatttccggctgaagcaaaggataggctcaagtggaaggcattctagaagatgggc

SEQ ID NO: 25248 - DNA, 26236 bp, Oryza sativa
aatgtaagtcattttagcatttcccacatttatatttttttatttttttattcaacatcaatatatgaataaaaaaatatgaatgtgggaaatgctaaaatgacttacattgtgaaacggggggagtacttgctatactttgatctagtagaagcacggacgacacgcattcattcaatagttggctcgcaaatttaatataatgttccacgcatggaccaatcgaattccgggcgaaaccggaagacgagatatgatatgtatatgacacaaatcatcaacatagataatatatcgttgaattgttcgtctcattgctattgataattgatacacacttgcatacacacaagagaaaactgaggaacagatcatcggtacgtagtatattcgcgatggacaaatcgatatatatatatataggatagagccgtaggaggcatatttagattgagaagaaagaataattagttgacggtgaccttgccgaccatcccagctccggcgtgcggctcgcagtagaagccgtatgtgccggggacggtgagcgtgacggagaaggtctcgccgggggcgttgaggtactcctcctgcgatatcttggacacgtcgacgccgctcggaaccgcgtcctcgtcgaacaccacgttgtgagggaagccggcgttgttcttgaacgtgatggtctcgccggacttgacggtgaagtcgttcggctcgaacaccagcacgccgccattggcgccgagaagcacctcctgcgccatggcgccgcccgcgagcatggcgctggcggccacggccactgcggccgcgccggctgccttgccgagcgaggcgcgcacgaccagcgaagatctcatcctcctccgcccgggagcggagggggccatggaagggatggtgacggcggcagaggaaagagcggccatggtagctagtgtattgtatttcttcttggtctgcgtctgcgtctgcgtctgcgtagtactcctatggttcagcagcagcggcgccggtgtagtggttgctataaaccaatccaatgatctgagctcgggttgggattgagaggttgggtggccagcgtcgtcgcgcgccatcttatcgacctcgtggccgcagcccattggctcacccggattaggtgggcccacccccacactgccctagcttagcttcccccatcgattcgtgatgcccacccagctcagcagctgctttctgggccggaatgaaaacgtgggccttttcttctcgctcaaatccacccatctttcctattagaagagtaaaaaaggaaaaagtacacctaaggtccctcaacttgttatcgggatacgaaaacgtcctcgaaccgcaaaaccagatatatgggtcccttaactatacaaaaccagtcactcgaggtccttcggtgattttgactatggttttagtctacgtggcggctgagtcagcgtgggacccacgtgggccccacatgtcaggatgccacgtcagtcggcctctcccccccctcttctcttcctcggttcctcctctctctctctgccaattgagcgcgagcggcgaggcttgcaggcgagcagatggttgaggactcggcgagctcgaaccggtgcacgacgtggaaggggtccgggtgaccgacgagggcacggccaacggctacgacaccgacagcccgccggcagagaggagatcggcgaccagcgccgccgccgctcgcttcctccacaagccggccaccaccgcgccgtggacggcagccatcgtcgacctcgccgcccttatggccctccacgccgacgcacaaagggctcgccacggaggatgagcggcgtggagctccaaacgcgtcgccagcggaaggcgagtgcggcggtgcgagtcccgtccttgacggggatgcgggcgacgaggaggtcgtcggggaacgtgctaacgcggtcctcgccgtcgtagccctcggcggcggaaattgtggcgccgttgccggaggcgggatggctgggaaccaccggaggcggccttggacgttgcgaggaccacgtcgagcccctcgtgcgccggcttgtagggacctatgtgtggcgaggtcgacgttggccgccgcccacggcgcggtggtggccggcgcgtggaggaagcggggcggagcccgagccatcaggctcgcagtcgcggaggatggccagcgcgccggtcgacgggctcgagcgccggtcgacgggctcgagcaccggtctctagtggtgaggccctccagggtgggcgccggtcggtgatgacaacttccagtgcggtgtccaacagcgaagagcccctctgcctccacgctcgcccacgccgtcgcctttagcttccgattctgggtcggtgccggcctcccctcccgcgtcgcagctgccgtcgatgctgccgcctctctgtcaccgcactcgcccgccgacgccgcctcgccttgccgccgccctccccttctcccgtgtctctgccgccgcgtcaccgccgccgcatcgccggccagcctgcccagtccagagagaggagtgagagggagaagaaggaaaggagaggaagggagaggccggctgacgtggcatcatgacatgtgggcccacatgggtcccacgctgactcagccgccacgtagactaaaaccggggttaaaaccaccaaatgacctcgggtgaccggttttgtatagttaagggaccccatatatctggttttgctgttcgagaatgtttttgtatcccgatgacaagttgagggacctttggtgtactttttccgagtaaaaataacttcaatttacatagtttggctcgtatccttaaacacaataccaaatataaagcatttctcattttttaaaccaatgcaaacgaggttatggtttggatgattggttttggctgagtggtgcttacatgggtagtttgactagtcctcgtcccacatggcactagaagcaagattaaaaaaaataaaaatatgtgagctacatatgttagccaaataagaagataaaaaacagtgggacccacttcctccacctcagcctctctcatctctatctcctcgactcttccgggtcggcgtgcatccctccctttctcccctctccttcccaattgagggcaacgagcaacgggggaggagctacgcggtggcggtcgacaggaaagggcggccaacaaagagttcgacgacggttagccatggacgcgatggcgatgactccccgcttctcaatggccgacgatagtggtggcgagcctaggtcttatcctcaagcgacggtggcgcctctctttcttcccctcttttgcaggcttgggtcaccagcgatgctcctcaatgactcaattatcttgttacgtgagcagcgcgacgacggcgacgactgctcgtgatcttgcgccaatgacgagcagactggtgtgcctcgacggcgagctccctgtctctaagttgcatcgttgcctcctctcatctgactctagcaacaactacaacattgccaccgtagatatcaccgcagacctcgcccgccttcgctcgcacaactcctgcctcgccaccggcccgcccgtctgcccctgcaacgtcccatgcctcattgtatgcactgacaacccgctgctcgttgtcgccgcgctctcttggctcgacgacgacgtatgcactctctcgacgctcttcctgttcctccccgcacatgcccacctccatgctcatgaagctatgctaggacaacgaggatgcacgcaccgatgacccgccggtttacaccttcgtcagggataggaaagaagatgttcaactgatatgtggatcccacatgttttttattttttttaatgttttcttctgttgtcacatcagtgcgaactaggtccaaaactgcttcgtgatcttgttttcattggggatacgttatatctgataatgtagtttaaggacgtgattcaaacttgacgtcaaaattaagaacctaaggtgaacttatttctagtagagtagagttctccagttccccgttgcacgcagcatctttggttggcaaccttattcatgcgagcgagctcttgagaatggatggatcgacatgataaagacaatggaggaaaagatagatgcactagtgatataacaacaaccacactagcaataagcacatcatggctagctaatgaactcttgcaacttctttatatgaaccagttacctgcagtactttccaaagaacatatgtagtagtatatatgaggctcccaagcttaagctaagcgaccatttatttacattagtcaggtagtgtgattcagagatttccacacaccaaccaacaaaagcagagagccggccatcacaaagagagccggccactgccacccccaccctagtcgcacaacagagctagtccatttctgaatatgaggtgcatgctgctgttctcgtgtctccaacgaaggtacattattctcattgctatttctagactccactctcaacagcctctgctttagattagttccacggggctgattagcatgtaccaacatctcttctgcacgtgggaaattgaaggagatcagctacatcgtcagagagaaaaaaataactcagccacaacagccctgcaaacaacattggctccagtagtctgtttcacaaatgttccacacgatcccatcctctaaactataccgcataagagacgaagacctactgttcgtggacaaaatcccatactttcacattataagacgttttgggttttgaataggttcatgcataggtcgatgtatgtgttacatatatatgttcaaattcatatgaatagtagtgaatctagaagagcgatggagaggccaaaacatcctataatgtggaacggagggagtactatatattttttcaatatatagaaaactcaagttcttacacttagcattaatgacatctcaagccaatattgacctttttcaaattagctaattgtacttgagatctaggggcgaatgcatgtcatacccttgctagcttggtaaatacaccactaatatttattaacgatgactaccactttacactagcaagaaagaaaaagtccaggacccttcatgaggtatatgtaggaagatataaatttctttttgccaggtggaagatataaatttcaatgtctcaagttctaattacgaatttaacaaagattgcttaccatgaaaggagaagccttggagcttgtccataacttccactgaatgatccacttgaataggggtatcctctttgcactgaatatgcattggttctccatcctgatcaagaccattttaatcaaaactatactactatgagtaaatagacttacaataaactgtagtagtaccataatctgggaggctgcatcgtcattttcctcgctgtggttattagatgaacttccagtgttacaacatgatccagcttcatcttcactcctgacactttccttcttgttattagatgaattgcgagtgttacagcatgatccagcttcatattcactctgcaaatgtgaggatacaggttgagagactgatgccctctcaacagagcatacaaggcggatccttcttgcagcagttccttgttgtggatcaacgagatcttgagctgtcaagtgcttcattgaaggtgcctgttcctgaccttgttctttcaaggcatctgaaaatgtcatgccactcctgcccggttctacgatagtatcgaaccaatgctggggataaggggtccacaatccagcccaacagaaggctccactcttttgtgactccatgtgaggattgaatgcggagtgtagttgatcttggttgcacaagggggagccctcggctactccactgtagaccatgctgctactctgggctcttgcttcaagattagcatcacttgtttctgtttgtggtgcattgattgaagaagaacagcaagtagcatctgtgttgtctgcacgctttgtttagaacaggaaatagaagggaagaaaatgttctcatgagattagtcaaaatgtgtaagagtaaattctagaatattctaacctgaattagaagcatctgatatgaatcattcttcctccaactatccatgagtaatgtgttattgtttggattgttggacgacgcggtaggattagactctacgtttccagtggggtgcttatccattttggtgtaatttggactaaacaacaaactttgcaggtcctgctcagacaaggtactgccaaaatgcgctgaaagatcttgctcacccagattgccgacaaaagggtgatcgctgtaagggcgaattggagaggtgatattagggaatccattgtatctttgctcaggctctaggtctggaagttgagataacacgtccagaaaagcatcgtcctaagttttacacacacacaaaagaaaaaaaagaaaagaaatttattatcatataaatgccatggggaccagtaatgcaggagaattaataagaaactcacatgggctacagtttgctctttgtcatggacagatgtactagcatcttgtatttcagtcagttggctgaaaccagatgatggtaaggtctgatgatccttcattattgaggcgagggccggttggacagcaggtgtgccattttggggattgccttgagaagacgtggacaattgttggtccaaattggaggccggggtatgggtatcatcttgttcgtgcttgttaaacaggcgatacagaacgaagctaccctgacaaattaaagcaaatagacacatttgatttgctcagctatttatatttagagtatggagtagacagtatatatttggtcgtgcttacgtttttgcctgattggaagtgaggctcagtggtgcggtactcgtgcatgatccaggcggtgcggaggccccgcggagctctgccgcggtggaagacgagggtcttcttgatgccgatgagggggccggcggggcgggagcggatgaggcggtccttgccggtggccttccagtagccggcggcggtggagcggttggagcggtggccgccgggatacttgcggtcgcggggggcgaagaagaaccactcggggtcgtcggacttgataacggacatggccgggagatcccagggctcgcaggtggagaggtccacgtccgggatgaggaggaggtcagggtggctccgcccagcgatctttcccttcagatagtgcctcaccagctcctcgtccgtcggccggaaacggaaccccaccggcagaaccgccgcggcggcgaccgccggcgtcatctccactttcccttgtttcatcgccacttttcccttctccgacctctctgtctttcactttttttttgagaaccactttatattctttcaaaacaaaaaaagtgtttcacttttatcttgccatacctaacaaccaatgttttaagggcagggttaatttattcatgccattacaagtatgttatttcagataaatatcattataatttgtttattcgtaattgtgtcactgaaatttttacaaaattagaaacatatcattgccgtcacattttcatcttcttcatttataactttaactacgaatatacattaactagttacgtgttttcttttataacttgtggtaactggatttttaacttctatgtttgtggaatgatctatttgtaaagtgagtataattcaattggttaggttcttgtggtggaaccagcccacccgagtctaagtcctagactaattgtttaggctaattattatttcagtagtagacgatgtacctgtcgatagcaagacgtcgtttgtgcgtttgtactatgtttctaaaagtattaatctattatgttgatttttttttacaatcaattaaattccatgcaaataataagtagatatattttttgagtttagaatccacttccgaaaatatgtggaagcctagaaggtgtgggttgcatgcatactttcaagcctctgagataatgggccgttttggtttgataaacaaacatgccctaccaatttattggcaaatgtaatagtttttgtgttagtttggatcgtggccaaatatttggtagtgcatctttcctatttattatattttataagtttcttcaatgtactatgagaatttggttttatattggtagcaatccaaatgtttgctaaataattttactctaccaataatttggtagtgcctaagtttacctagactttggcattaccaataaattggtaggttaaagaaccaaacaagcccaacataaattttatatacttcaaaattttgaaagaaaaaaatatgtggttcttttttaacctttttcgtaaccattaagataaatacaaatcacgagaagatattatgaatttagataattatatgttcagatttatagcttaaaatatactgtactacttatatttcaatacggaggtactacttctgtaagttagagcatcttcaacagcctcagagcatctttaacagcctctccattccactcttcaagccaaattttagccattttagcctaaaaaggtgctccaacagcctctccaactggatagctaagccatcctgctggccaaaacccctcctccactagccaaatttggccagccagaaatcactggccaaccgtgggccccacatagatccccccctccttcggctcggatggcgcaggcggccaagacctcgccgccgccgccaatgcaggcgccgtgcaccgccgcaagcaccaacttctgtaacaccctgaaaattcgaccaacaaaatcagaactctaaaattacggaccctcaaaaactttttaaatgaattgcatcatgacggttttattcgcctattttatttggatttgatttcggagtttgttgatcgcgaataaagaataattaattaggtataaaccctaaaaattaaactggcaaaataaataattaaaatataatttaaaacaaagattaggtgaggttggtaataaataaaaatattatcgcgaccatattagtatcaaataaattcaagtgcgatggaataagaattaactctaattaaattcaagaaagttatatataaaaataaaatatgggttaaattagggttaaatagagctagcactgttcattgcactctaggtgctcgacgaggttccctagccccgcccctccctgccgcgtgcgccgcgtcgcccgcccgtcgcgagccgctgccgcctgtcgcgcgtcgccgtcgccatcgccgcctaccgccgcgcgccgtcgccccgcgtctcgagccccgcgccaccgcgtcgccgtcccgtcgcctcgcgccgcgcgctcgccgcctcgcgccccgtgccgcgcgccgtcgccatcactgtcgccgtcaccgtagcgtcaccgtcgccgcttcgagtcccgtgccgccgctgccgtgccgcatcaccgctcccgctgccgcgccgcgcgcgtcgccgtcgtctcgagccccgctccgccgtcgccgtcgcgtcgcccgtcccgccgtcgcatcacccgtcccgtcgccgcgcgccgtcgccgtcgcccgtctcgagccccgcgccgccgcgtcgccgtcccatcgccgcgcgccgtcaccgtcgccgatgccccgcgccgtcgtcgtcgccacgtcgagccccacgccacccgtcgcgtcgcccgtcttgagccccgccccgccgcccgtcgcgtcgccgcccgtcgcgtcgccgccccgagccccacgctgccgttgcgtcgccgcccgtgcgccgccgtcgcgtcgccattaagccgccgcccctccccctctccttctctccctcttccctataaataccccaccccctctctatttccccccactccatttccctcctcctcccctcttccctctccaccgcgccgccgctctcgtgccactgcaccgccaccctcgtgccgccgcgccgcgccgtgtgccgctccgagcgtcgcctcgccttgcgccgccgtcgccgccgccgccgtcggtaagccgccgcccctcccctcgtccgccgccgtcgccgccccgggtagcatgagccgagagagagaggaagggagaagccgggagggagaagaaagagaaaagaaagaaaaggagggaggaaaaaggaaagaaagaaagaggagagaaaagaaagaagaggaaaagaaaagaaagaaaaggagggagaaaaggaaaagaaagaaaagaggagagaaaaagaaaaggaaaaataaatagaaattagagggagattaaggaagcttagaaaatttaaaataattagaatttaattataggttgattatagtcatagaattgtaaaatttaatataattatagattattttggtaatctctataagtaactcactcgcggtagataatcggatttagttactaagaattgtattcttcgttgaatgttaatagagacacttctaaatcacaaaatgacttaggattaaatgaccttaaaattggaatagcgtggtttttgcaaactttgtagtcaatatagaaagatcgattcgcgctcgacttttatttgagtttatttggattttatttgaattctaattgagttcaaatcatttcttcgcacgtaattttagagcccgagggagttgcggatccgagcgagggtcaagacccgcaggactacgagcgaggcaagtcatcactattccttgaacatgttgatcccaattgcgaaattgttttgtttacaaataaaattgcatgcaatgataaacatcctacttgtgattatgccatgccttgattattgtttaccccttattccttcgtaaccatgtttacgtatgagtccctagtcaactatgacaattgcttagaaatgctattctagaatcatgcatactcatatttatcaaaatgctttatacttgggaaattacctttgggaaggtaattgagatgcggcatgtggagacatgagcgccacattgccatgatattgatgacatgatttgtgaaaggagaaataaaactaaacaactgttttcgactggggcggacggaggatttgggtggtatctgaaaaaggctagtaccgtccccggtcaattaaggaccgagccatgaagttaagaatgaaacgacccccgtacaaccgcacttctcgtatgggtatagacctagcggagtagatagccgagcggaggcagtatccctgcatagatggttcacccctgagtgaggcaggtgcgctacggtgggacagccgttgaggtagggtcgagaggcgtgccctacatcagtgtcgccattggtaggactgccatgagtgtgtgagagagagaacttaacttgaactataatttaatatgtgtgtgagacttctctttcccgggagcgccagaactcctctcactgctagaaacatggacacctagagtgcatgaggatttaagttcatggagcgggtactgccaatgcgaggttatcaaaaagctttgtcgtgacgcgtctcatgtgttgggacgaggctcatgtgttgggtagtcgcggagtgcgggtaaagtgtacatccactgcagtgtgagtaaagcaaatctattcgaatagccgtgctcgcggttattgagcaccgggacgtgtattacacttggctagactctaaactcttaacttgtgtgggatgggatattgcatgatgacttttatgctggtggagccacttcctgagaggagggaaggtggacgtcctcagaaaatcatgacgactcaatggcgggaagccatccttgggatcacattggatgctggacagaaccgccgttgtttaatgtgaacactggtactaaaatttgatcagtctatgctaggttttaggcttgtgaaaagaattacaaaacttgctttacgcaaatgaaccatagccacaccttgaatactctctatcatgtgcattgttgctgtggtggcttgctgagtacggttggtactcacccttgcaatatacaaacttaatcagaggtcggagatgaagcttcggaggatccctacgcttactaccaggagggtgatgaagacgatggcgctcagtaggtcttagttacggtcgttgcaagtggcaatggcgtgccgctgccttatctacttctgcttttggaatgtattccggaccgctcggtccgatgatctaagactatgcctgcgggcttatgatgtaataattcgcactagactctcgtgtatgtgcatttggtatttcagctaagaactcatgtgtaccagactacttgatccagggaaatggtactgtttacacgattgattcctgttataaaaacgggagtccacaacttctgtgcgccgcttgcatctccaggatggtacggcgaagctcctcgaccgcgggcactgggccgctgccgccggcgaggagggggccgtggcggggttgttggggagccggcggcggagagcacgacgacgagcatcttgaacctacgccagagcgccaccatcgttgtcgaggtcgccagccgctgtcgtcgtcgtgtgcaccgtcgccagtcgtccccgaggttgccgttgctgtcatctggatccagcggcggccgacctccgttgcctccgtccccaccagtggcgacatggattcgggcggcgcggcgtggattcgtgcggcctccgccgccttgccgtcgccgccttgccattcgccgtcgccaccatccccatccactgtggtagccatcgtcgtttccatttgtcagtgttgaggaagaggaggggggagaaaatctagaggaagaggggaaaaaagattaaggagtgataatagaggctgacatataggtcccaatgttataggttcggaatagagattttagatggagaggctgttggagtccacaatgagtttgactgaccaaatcaattggctaactagctatatgggtatttgaagagtctattttaggtagtccgttggagatgctattagatagtgacaaatgttgatggtagtatcaatgaaggagaagcagacacgcatccatttctgactcagaggacgttcattttctgtgacacctgtcaggcaattaattacacaatcgtgcggtcggtacaggcctcacaagtctcgagccaaacacacacactatcaagtgctcggtatgtactggtaaagaagagcccacacgtgacatactacatgtaaataattttaccttttatcttcatttttcttctttcaaaattttgaattacatataattggtgtaagctccaaggcttgaaagtaggcatgcaatccaggcttccacagatttcggaagtgaattctaaacttgtttgtattttgagatgatacaaacttgtttgtatttctatttcctcttctcaatttctctaaacttgttctacgtatcttttcaatcttctcttttcaactcaaccatttttacttagtctattaataaaaaaattaaacatgtaaattgatgttgctagatttatcattaaccaaactatcataatatgcaactcttttatttaaaacatcttagttttatgaatattattgatcaaaatagcattttaaaaactatatcaaagtctaaaaatacttctattttaggatgaacggagtatttggacttatactatggcactacgtagcgaaagtgacggggggccgggggtgtgaattctggccgcacattgtacctacccaaaaagtacttgctgtattgaatcaacgacgatgtcgtcgttaatgcatcatcttaattgactgtagtagtactagtacgtaatgccattgcacgggaccatcttatctctttttttttctttaattatttgacacaatgcgattgaattggggtgcaggagtatatatataatagtagtggtaggtaacatgaacggtgtagattgagagaggagacgtactggtgctaataacaagaagtactcctacataaagagagagagagctagctaagggagtaccgaccgaaaaagcagaaacagcctgcctgaccccaaaaaaatggaggaaggcgtcgtcggtgggggcggcgctgccgttcttgttgccttgctcgtgaccgtggtgttggcggtgatgaggtcagctggaagcagaagcagcaagcgcggtcggctgcccccgagtcccatggcgctgcccatcatcggccacctccacctcatccggccgccaccccaccgcgccttcgaccgcatcctcgcccgccacgggcccctcgtctacctccgcctcgggccctccacgcactgcgtcgtgatcggctcggccgacgtggcgcgcgacttcctcaagttcgaggccagcatcccagagcggccgcccacggcggtgacgcgacagctggcgtacggcaaggccgggttcgcgttcgcgccctacggggcctactggcggttcgtgaagcggctgtgcatgtctgagctgctgggcccgcgcaccgtggagctgctccgccccgtccgtgccgcggagctggcggacgtgctgcgcgcggcgcagtcggcggcggagaggggcgagggcgtcgacatgagccacgagctggtccgcatggcgaacaacagcatcatgaggatggtggcgagcgctctgcctggcgagatggcggaggcggcgagggactgcgccaagcaggtggcggagctggtgggggcgttcaacgcggaggacttcgtggcggtgtgccggggctgggacctgcaggggatcgggcggaggaccaacgaggtgcacgccaggttcgacgcgctgctggagaccatcatcgaggccaaggaggaggcgcggaggcggagcctaaggctgggccggcgggagagtagcagcaaggacctgctggacatgctcatggacgcggcggaggacgacaccgcggaggtcaagctcaccagggacaacatcaaggccttcgtcctcgtcagtacactatatatcttcaaatactcctcctatatatatatatatatatatatatatatatatatatatatatatagatattcctccagctccagtgctccagtagaaaagaatgttaattatatatatatatatataatgcaggacatcttcaccgccgggtcggacacgacggccaccaccgtggagtggatgctggcggagctggttaaccacccggagtgcatggcgaagctgcggggcgagctggacgcggtggtgggcaggtcgcgtctggtgggagagcaggacgtggccaggctgccctacctgcaggcggtgctcaaggagacgttgcgcctccgcccccccgcggtgtttgcgcagcgcgtcactgtggagcccgtccaggtgcgcggctacaccatccccaccgacacccaggtcttcttcaacatcttctccattggccgcgacgccacctactgggaccaaccgctccacttccgccccgaccgcttccttcccgacggcgccggcgccaccgtcgaccccaagggccagcacccgcagctcatgcccttcgggagcggccgccgcgcctgccccggtatgggcctcgccatgcaggccgtcccggcgttcctggccgcgcttgtgcagtgctttgactgggcgccgccgccgtcgcagccgctgccgcttgacatggaggaggcggcggggctcgtgtccgcccgcaagcacccgctcctcctcctcccaacgccgcgcatccaaccgctcccttccttctactcctgagcatcctcgatcgtcgatacgtacacctgcgagcctgcgatcctgatccatccatttgtttttgttgacttgttactagcacctgctttgttttacgtacctcacatcaaataattcttattcaactcaaaattaagctacaagtaagctatctcattttgagtcaatgagtagaacaaaatatcatgggcaggggctcgaccttgtttggtcctactcatggccaccctgctcatatctacttggcttttagcaacccttatccttggagaagaaaattaaagagaggaggtgcaatgtaaaacaatttataaataaaactagaccaaagtgaaaaggtttggttcaaattgcatctaggtaaaaagatgtgacaatacacttggaccaaagtgaaaaggtttggtccaaattattacaattacaacatactaggtaaaaaaaacgtcctagctggttatttaactgcattgagagcatgtcagtcctaatgtttctatggaggaattggcatgtgcgaaatgaaatcatgcatggtaaagcagccccaccaatagaagtctcagggcccctttgaatcgcagggttgaaaaaatggagggataggaaaaacacaggattctgataggaattgaagtgtaaaacagaggattgcaaaacacaggaaaaacatagggaatggtcgtttgattggagcgcaggaaaaactaggaatctgatgagagagatagactcaaaggaaattttccaagaggttgaagctcttactaaatttcctccaaaatccacatgcaatgtatcattccataggaatttcgtaggatttggaaagcttcaatccattgaatcaaatggccaaataggaagatttcctataagatttgaatcctatgaaattcatataaaaatcctttgattcaaaggggccctcaaagaggttcattgtaagttatgttgatgcactgttccagatccgacaaaatcctggtgcagacctgtcaaaaggaaaatgtattgcaagtgctacaaagggtactgtagtcacttcggctttcaggattattcagccaagttgggaaagacatgtactgggatggatgaaacttaacatcgatggttcctttgattgcagcattggggggggggggggggtggtatcggtgcaatcctccgggatagcacggggaaaacaatttttgcgtcatgcaaaccacttgagcgctgtaatggggcgctagaatctgaacttcgtgcatgtgtgatggggctgactgcggcgattcaaaggacgcttcttccgattcttgttgaaacgggctgtatctcggtggttcaacacctgtactgcagagagaaggaccgtttagagttggcctgcatttaggggtgaaaacggagcggataatatccgatccgctccgccccgaatccgtccgaaatgaggatatggtatgggcttttagaaatccggcggatatggatgcggatgcggattatccgataggattttttcggataatccgaaattatcaacacatgtaaccactctatctattgcatataacataagttggttcatccaatggcctaattcatcaatgaacctagattttttagtctgaggctttcaccgtcttatgtcactcttgcgtagctgtatttttacattatggacattatgtattcatgttgtttagcacttaagcctataattattacgatgggtcgtttattgattattgtattatagttccttgcattgctaactcgatgttgtattgattgcatacacacatagcatccgataaatttattccgtttccgaaccgactccgcaccatttccgacatccgaaacaatccgctccgcatccgtacactatccacacccactccgaatccgtttaaaaaatatggtttaggatatgctatgaccgctatccgtccaaatccgctccgttttcactcctatctgcattgttcaggaggctaaggaccttcttctgagagatagggaggttgttatcaggaaagttagccgtagttagaatgccgttagtcatttcttagcaaacaaggctagggtggagttttgcactggtttttggttggaaggaaattgcaatcagatatcacagctagtctgtgagaacttctccaataagcaataaattttcttccccgcaaaagaaaaaagtgattctatgtcaaatttgtatatatgtaccaaaggaaaaaaataatcgacgcctgagagattcgaactctcgcggggaaaccccatgtacttagcaggcacacgccttaaccactcggccaaagcgtcggtgatgtgtaaggatacgatagaatacattttgaaataagattttactttcagtcgagtgcaagaagaggaaagcaagacgcgtcaaatctatcaatcagcttcagccaaagccgagagcccccccaaaagagagagaagcacgcatccgatcgccggcgacgaccgaatctgtgccgggcggcaggaaggagagcggcgatggcagcgatggcatccctgtaccggcgtgtccttccttcgccgccggctgtggagttcgcgtcggaggaggggaagcggctgttctcggaggccctggagagcgggaccttgcaaggcttcttcaacctcatctccgtgttccagacgcagtcggagccggccttctgcggcctcgcctccctctccgtcgtcctcaacgccctcgccatcgacccgggccgccaatggaagggcccctggaggtggttcgacgagtccatgcttgactgctgcgagcccctcgacaaggtgaaggcggagggcatcaccttcgccaaactcgcctgcctcgcgcactgcgccggtgccaatgtccgctccttccgcgccgaccagtccaccatccacgacttccgccaccatctcgtccgctctgcctcctcccaggactgccatctcatcgcatcctaccacaggaagcctttcaaacaggttgtttttgttaatccttctcttcttcatttcaaggtcttaataaccaaccaatttatcattgcattgcatttcagactggaaccggccatttctctccaatcggcggctaccatgccggccaagacatggcgcttatcctggatgtcgcccgcttcaaataccctcctcactgggttccactcccactgctttgggaagccatgaatacaactgatgacgcaactggtctactcagggggtctcttctctacccatcttcctcctctcctatctttcatactagaatgtactgcctcccttctcaaattgcacatgtctcacgccattactgtttttaactatacatcttttaaaaattataaccatatcatttttttcatgattaatctaccaatatcagcttcgcatataaagtcctattactgtttttagtaataatttaagattttgaggtcgtcatccttttaggaacagaggtagtagcttgagaattctcagcttctacctactactccctccgttccatattataagacgttttggcatctctcgtctagattcactaacattcatttgaatttagacacatatatgaagcacatatatagattcaggcatgaacctattcaaaaccctgtacgtcttataatgtgaaatagagtaagtagttcaatttctgaataatggagctactgattctctgatgagaatctgcactgttgggagctggagattctttgagctgccccaaacagggcctttggtttgttagcaacgattactcttgatgaagcaactggggcactgttatatcttattcaatcctttgtgcaattaaactcccatttctttaagaaagcctccttactgatggtacatttatgttttctttgctgcagtaattgttgtggttcgcaagtagttgtagggcctgttacttccttttttgggcagccatctaattgcagggagcattagttatgatctcttcagtttgattgcccagtttttctttctaattggcagagattgcttaaatctgatggggtgtcctttttttgggtggtttagcgcttaggtttagatgaatatacatgttacatcacttgcatttggtattgtggaaaatagcaacttgtagcattgaacttaaacatcacactaggtgtatcttccacgtgttgctgtggagatgacagtgcttttctaataaaactgcgtggaataatataattgctataggagggttaagtagaatatactttagaagctgtggcctgtgggaagaataacaaatttgctgttgttatatgacggaaaagtctatttggtttctcaacttgtcgtgtgatttgcctttgcgtctcgactctaatacctgatattacttgtccatcatatcaaaacgatgcaaatactgtccctatgcttgttttgcaagtgtttttttagtgaggtggcttcccacatcatcactttttttgccatgatatctgcctatcaattagacactcatgttagtcatgcctcttccgttataatagaaaaacaaatattaagaaaagagatgaaaatcatatgcatacatggataatccgaatggccccatcatgttccttattttttgctgacttattttccatgtacgcagtccagtaggatgccacatatgacaaaaccaccaatatacctaccagggacatcatttgcatggttttgatagttgagggatgagttttatctggtgctggatttgaggagtggaaattaaaccacattaagaattgagggtccaaatatgtaccttttccttatttattgggatacatggaattcttgtactgcacagtgactgcactgatatagacatgcacactaaagtactcacttcaatctgcacccatccactcgaagacgcagaccatattttcatccactgcccctttgcttcggccttctggaatctgatacaagtctctccaaaccgcacatcaattgcatccgtatacatcaggtcaccccctccggataactcccaaaccgtctccaaggcaccttcctgttactctgcttctggagattttggcttcacaggaatgaaatcatcttcaactacctgcctccctcagttcatcgtctacttcgtgcctgcatagaggatgcagggctctggactcagcggcttagacagatcaaccttcctattgccgccacctggaaatccctttttttcgggtgctctgcagttactgtatattgtgtttaaaactttgtacagtgttttcccttaaaaaaaaaaactataagcagctaaatgatacagctagcccacttgctgcttgaatgatgatgtggagaggtaggcttggcaaagttgccttgtaaacacaaattaattttcactgtaattatttgaaattataagtttagaacgtatgatgtaattatttgaaaccgttgcaagttgcaacacacaggtattaagctagtcaaaagaataatatacaattttaaaatagtcagcatataaaagtaagcatggtacaaaaatatgcaaatgctgttatttgatcttatcttataagtttacttaaaagagcaacttttagttcctgtgaaatgttcctaagaaaatcaaaagggcagatacatgtttctttgctgaactcatactgtgtaaaaaaacatcgacaatcacattgatatctgatattgtttatttattgctgatagcataagtgtattctgattaagatatttatattatttatagctgtagatatcatttagatccatcacagtaataatataaggactttaagttagtttttcttgccaaactaaaggatttatatgctgtgaaataaagtaaactacaaactacatattaaaacccatctaaaagaaaaacaacataatacctttaacatctcgtgggcagcaagcattgactcatttcatcagcaaatattttatacctgatctattgcatttccacttcagtagctcatctctcctttgttttgctattactttcagaatgtcctgaccaaatacatttcatgaacacaactaaaacaacatatctgtaaaaaaacagtacagaattgaaggaaataataggaaaatgagaattgaaaagtgcgaagaaaagcaatatgcaaggaaaaacaggattgttgtgattcactggactcaccagatgaaagagcatatgccattcattggtagacagagttagagggttggagaaacaatgttaggaagttttgcttgctccagtttcctcctccgtatctatccagttattcagactcaagtgcatgttggcattttgggagatccagacagcaataaaaacttgactttatggctttattgttattgggatcaggaacttccgaacttggcaatttagcttggtcacatgactcacatctaacaccatttcttccgcatccaacctccatactgtcaactccatacctgtttatgaggagacaacaactgtgaactgtctccgcggttcttcctttgtgcagcatatttttttgttcatttgtttcatccccatacatcaaatggttgtttacatcacagtgatccaatggttggtaaattatgattactagaaaagatgcccgtgcgttgcaacgggtggatgctatttcaatcttattattattatacggtttagctagggtgaaattcactgtgggagtccgatatttatctcaagttagtatgcaagtttttttttacaaaatttcttatacgactcttttcgtattttcgaaagcaaacgaacttaaaatccgactcaaacacggatatgtattccaaaagcaaacgaacttaaaaccgactcaaacacggatggcgtaccaaaataccggcaaaaacatcttcaatttttataatagtagagatgtggataccatgatatttacctttgctgcaaaacattataggggagaaattacatttgcgttatttcctatagatacaaaattgagtatcatttcagttttacactcaattgccaaactatctgtacttgtctttgcctttttattcatgccagtttaagatactgccatcttgatatttgaaggttcatgcttatctcaaggcacactgcagctccttcattgctctacacagtggtaaacatgccaatgcttggtatatcgaattcaagtgggtacattgatataatttcctttatatcattcctttagcttttgtgcagagttgcagagatgaaagctggaaaagcatggcgaagtattgcatggaagatgtacccgatcttcttaaggatgagagtgtagacaatgttccagcacttctgtcccgcttagtgaaatcccttcctgccaatgctggaaatttgatcaaatgggttattgaagttaggagacaagaggaaggaggatcaggattaagcaaagaggaggaagaaaggcttattttgaaggtcatcttcaaccttttcttttcaatctgggattctggatcagaattttctttttgtctcttttaacacaccttacactgtgtgcacttgcaggaaatgatactacagcaagtccgtgatactgagctttttagattagtccgtgaactgcaattcactaagcagccatgttgtagttgctcatattcaagtgatgatgattcctttacccggattgcagcctctgtgtgctgtcaaggggccgcattgctaacagggaatctttcatcaaaagatgggttctgctgcagagaaacttgcttcaaatgtgtacaagtggatggtgatgggcctaagactgtcgttacaggcacagcggtttcaggagtcaatgaacaaagtgttgatatgcttctaccgatatccacattggaaacaagcgtgtgcaattcaaattcaagcaacgaggttgtcaaatatccatctagaacagatattttaactgttctattgctggctttacatcctagcacatgggtgggcattaaagacgagaggctgaaagctgaattccagagtcttatttcaacagacattcttcatgatgatcttaaacgagaggtttgttgtattaatccaaacatcccttgctccctactccctagcaagatttgttttctagataaaataggatgtaaatcatgcctagttttgtgccaaacagatctactttaaaggaaccttgtcagacgaaattatcgtttccaccttccaccacaagataaaataagatgtaaatcacgtctagttttgtgccaaaagatcagttgtatagggcctactttaaaggaacttgactagacgaaattatcgtttccaccttccaccacaagacagaatagttaacccaatgtttaggggagacgagagtagtagtcactgatgagcataataaaagagaaaaggaggaaaaggaagcatatgctttacatacattaatgaagttaagtttatgagtattccttgaagaggtcatggggctctgcgatactaaagtttttacttctgagtacctttttgaatagaataacgttaacatataaatccaacatctagcaaaatgatctgggcgccgcattttattgcacatgtgtgaattgtaccttcacatgcaaaactgaaacaaacatttttctggagatgatattgaaacctttttcttttacttcagttaaggaagtatcgaatagaatgctgtttccaatcagatttgtccatgtttccctttttttctcccttgtggatgagcattcataccatgccggagttaaattcatatttccatgaaggaagataaattgttcatccacttctcttttcatcaaattatagatgtcaaaaacatttgttgcactagtttagaataacattttgtctgttgacacagatattgcatctaagacggcaactccattatgtgaggtcctgtaaagaggaggaatatggagatcctgtgccacaatcccattaacaatgatgcaaatcgcgcagttggttaccctggagatgcaaaaaaaaggggttagaggaggaactacatactccgtattacctttgtttcgagtgaggacttctcatttttgagacacctgacctgagacggatccgtgtagacatgttcatgttcatcacctgtggtcgtttctcttgttagtgacaactgacaactagcggggaggcacacgctaattgtgcggctggtgtccttgcaaaagtttctcataataacgcaatggcagatatattttcacactttattattaaataaaaatattgaaaagggcaattaaggagtaggataaactctaagagcaagtatgatacttcttccgttcctttatatttggcaccaagcatggtttatatttagacctggatcattcatcttctcttcaaaagttttctaaatgctcaaatagatgtcagattatcaaaatgtattacatattaagtactaaactttcatttatcataatctaatcaactcaaaattattagtggttaaagttgcaatagtatgagtcaacggtgacaaataaaaaggaggaaggctctaagcgctagtcccaagataggcttagattagataaagatgtggaggagaaaatagagaagttatcctgtacacaaacaaatttgaggaaatagagacaatgcgtgtattgctcattttgactagtgttaaacttgggatcagtgataagaaacataagttcacatatacaactaatttttttgagttttcgtcaaagcggtcacctagcagcacccatcaaatgcagcccagtctacctagtaccaatctgtatgactcatctttcttactttttcttcttcacaccacagtcgacagtatgacacgacaggacacacatatgcttttgtcttccttcttcccctccaactccaatgatccactccacccctcttccaaaaccctaacggcctaacccctcgatccaccacgcaacgcaggcaacttccctcgctcggtgagcaacggcctaacccctcgatccaccacgcaacgcaggcaacttccctcgctcggtgagcaatccttgttgtgttgtttatattatggattttctgtttgatgcataatttaaatgcgggggtcctaaccctaatattagggtttagggtttagggttcgataaactgtatgtgcagagcatgcttctgaacggcgtccgacagctaactgcatatgttgtccaccagcacgtcggatgttgcattggtttctggactccgagacctttgaaccagcattaatggtgacggtgtaatcggggtcggggaactgttccctggtgcattaatggtggggaactgtttcctggtgcattaatggtgacggtgtaatcggggtcgggaactgttccctggtgacaaatca

SEQ ID NO: 25249 - DNA, 47614 bp, Oryza sativa
tgtcgtgtaagtattgactattgtttcaatctggtcttatgcgagtttgatcgaattactaggctctttatatgtttgttttgtgttaagtgagacagactatgttggtttacacgaggatcaccaatcttaatctggaaatggtttcaatgaatgacatgtcaggctcgccagtgcttaaggcaacatgagttattgagttattggtagggatgaaaacggagcggatagtttccgtccgctccgaacaaaaacggataaggatacctttcagatcggataattgttggatagttcggatacggatacgaatacgaatatggtatcagggtttccgttggatacggataataattcggatatctggcgaacagtgctattcggatatccgcaggacccatgagacataccccatttctttctaactctataaccttcaatatacctttatagattttaatagtagtttaatctcttaacactagtccatactattaatattatttaaattttaaaaaatatttataaattatacctcattttatataaaatgagctaattatatatgttgatatttgtttctattagaagttgagttggttttcgtgttccgagaaaaaattgtttccgtattcgtgtccgatcatattcgattattattcgtattcgagataatccgaatttgtttccgtattcgagctatccgtattcgttttcgtatccggtaaaaaaaatatgaaaacgaatatggtatgagcattatccatccatatacgctccattttcatccctagttattggcatgttagtcgctggtggttattggcatgttagtcgctggtgacggggcgtacactactgcagctttgtacgatacagtgcttaagacataccacgggatccatctccgccacgaaataataagactcaaatagtcaaattttcacaacgttttgccaaattcacaatttattatgatgaatcattctttctcattttctttaggatatatccagcatcaccgatgtggagatgaatgcttgtgtcaatccaatgaccatggagcaagtcattgatgcactatcttgattccctacatcatcactgaccacgacgtctttagcaaccatcgttcgtgcagagagttcgtcttctatgtgctggcggtcgcttcctgcactagtgtggtctgtcatcatttggtcacgatttcgttaggaagtgttgaaccattatttgcttatgtagtggtcaatcccaaaattagaatccgtacgtatgtgcacgtccttctttttagctctctacgcacaaatgcagacatagggtttttagccttgggcatcctgtcacacaacaagtgtgtccatccaatcttatctgcattgtgattgctgcaaaagagaatatctaggtaaaccgttttacacagtgtgccctatttgcagaagctgagatccgaataacacgagggctacgccgacaccagcaccgcgtcgtggccgatgaagttgtaggagaaaaattgtatatttgggactccaaacgttgtgttttgtagatttgccattcctaacatcgacttgtaaaaataggtctccaaacatgtgacacttgatttgcatactattctatgtatttcttctcttttctaatcgctatacatgtatttggcaaccaaaaagacgtatctggcccttctcctccgtcgtgaccgttcacttgtgacgatgagaggatgccgaagagggagttccggaagccgaccatatgccgtggagtgctgtgcctggacgacgacggcgacgagccggcgctgtcatgctgcgggataggttacgcaccatctcacgcacgatatgtttccgaaacaaactctagaaatatttttgggtgcagcaaaactaaattgtaaaagaaatccgcatctgcgcaggcacgagaaccaattttgacggaccattcacgcgcatgtcttgtgcgcgcgtcccccggcccgtgcccaggcgaggtgaggcgagcgagcccacacgtgtgttcctctacttctttcttactcaagtggctagggagtactctcctagaactagtaatatgaaggttaacatgtgtgcttctcatgaggtaagcttttgtgattctctagaaataatcttcatatagaccttagcccacgtattaattctaacaatgcctgactagattttgcagcttagtatggcagcctcatattgaccttttatttaaacacattatgcgatatgttcgcaattaatttagtatttaaaggtgagacatttgtgtcaccatctgtaatttatgtaattgacagtcttacctactaacctcctctcaatttctacacacccgctggccggcgcgctgccggccacggctctatcttgtatgatctgccaccacactacttaaaaagtactcattgtgtcatttaattgagcaggtcgttgagcctgacataacccctcctttcctaggagtatgataagtgcaacggcatcttaaaagaactaagtcaatgcctcactgtcgatggcattgcacacttgctagtttcaaatgaacaaaagtgtctagtgttagactagacatatatgctactccctccgttccaaaatataaggcacattcatcttttatggaaagaccaagaagcatttaattgtgtatttacttgatacaaaccaaccaatgcatgctatatgtatttgcttttatttagtttttgccaatgcatgatgccctttgtcttattcaaaaaaaatgtaattatgaattattttgctagcatttgattcattattaaatatactttgagcataacatataattttctatatttcacaaaatttttgtgatcagaagcgatgacgggcctcgatcgtcctcacagccgatcgaccacgtggttcaggatatggagcccagcgataaactgtacgtgcggagtatgcttctgaacggtgtccaacaactaacagcccggcgataaactgtacgttgcactgcttaggattcctagactccgggaactttgaaccatcattcttcaatagagacggtgtaatcggggtcgggaactttgagccatcattcttcaatagagacagtgtaatcggggtcgggtacattaattcagaatatttatgctttcttcgttcgattgaattatcgggctttatgttctgtatatgtttgttttgtgtgaagtgagacagactacgttggtttacacaaggacgttaatatcaccaatcttaatctaaaaatggtctcaatgaagggcatgtcaggctcactagtactcaaaggcaacaagagttattggcatgttagtcgctagtgacggggcgtacactactgcagcttcttacatacactccttcaggaagacataccaagggatccatctccgccacgaaataataagactcaaatagtcaaattttcacaaagttttgccaaattcacaatttgtttttgctaacattatgatgaattattctttctcatttcagttagccatttgacgccatttagaagcatgttttgagtggagattatattaggtggtgggtagtagggttttacactgtttttgtataccagcagaaccagacatacaaaatgctttagttttgaaattagggcatttccctgcatgctttaggtggtgttaatttaaagtaggatgactattttgttgcccctctccctaattctaagtatattatagaacaaataagaacctaaagtatacttagagcctcttgtaatttagctctacatcttgtgtgagaatgaatgatgagaggggtatttataggtggaggtgccttggaggatagagtttcttccaagcatccaatgagcatcttcatcctcctagtgcaagtgtccattttatgaagttcttccaagcatccaatgagcatcttcatcctcctagtgccaagtgtgtattttatgacggttttcattcaaaaacctaaaccctaaaccctaattgttgccttagggtgtagggtatcagggttttagggtttagggtttagggttcagggttcaggatttagggtttagggttttgtcatgattatggataaggtatacctcctatcctacgacttatgaaatatgcggatatggcataccttcacatacgcggattgttcctgtgtacgccgtaggaatctgttacaaattatggaaaatatctctacgagtctagcgatttccaaagtcctgctcggaggggatagagtttctgttatatcgtacaagatccgatgtctccgagtcttggagatcaagatgatgcacgatataaaagggacccccggggaggggtgcaaggcatcaaatatcatcgccaacacactcgccatagcttacgaagccggagtacacggagctaagtcaccgggagatctcgtcgaatacatcgactacgatctcgtcgatcctcgttccaacgtaccccaataccctaatcatccggtctacgagtatcactcgtcgacaatggcgcgccgggtagtgggacttggtgctcaaggttccgctaatatgacttcaagccatctcgacaacagtaccaacaccggcatcaatcaaggagcttctacctcgacatcgctggtgtggactcaagtcggatctattatcttccagtctacaccgttacaccaatctcgactgacccagttactatcgggaatgagaacaacatggctacgacttcgagaaacgacgtcccgccaacagttcctcccacacaagtggagaacggaacatcaacggccccaacacctggaaggaatcctcaagcggctgagttatgtccttcgcgcagaaacccagagccgacaaggatgcctatccagaatctgagatcttggtgtctcgtccataagacatccaagcatactctggaagattgcctggtgatactccatgtgaaggccgaactctacgcctgctgggagcgtgggattcaacgcacttcaccaacgggcttcacctattgcccggtccataaatcaagatctcacgatctcacaagttgcaagatcttccttaggacattcaagccgccacgtcctcacatcaaacaaccacgaattcaatctcagtgcgttgccgaggaacgagacgtagcaatgactttagatcggttcgtgggttttgtcggtgtcaaccctaacgagccattcgtgctacaccttttggaagattacgagatgtaaacgtgatcaatgtcgctgagacaagtgcgtccgcagcagccagaacgcctgcccaacaactgtggaacctcgatgcgatattgagataaagcccctttgaccttgccctaaaccctgacgttgatcagcgggcaacgtgattacgagagactgtgaccaatctcaatagcgtgttcgcggacacagcgactgagcctccaccgcaagatccaccacgaggaaacggtgaaccagctaacgggaacgcagaagcggaaaaccctattggagaacgtcctccccgtgctcaatcgccacgggcagcccgagatccaactccaccgcgtcgtgagaatcgcgaccttcgcgaacatctggacgactggcggagggaaagacgagatcggaacgacactgatcgtcatcggcgtcgttctccctctcgacgagaagagaacaccgctcaccgttgacactgccaccgtctcccctcacgccaaggagggaacaatgatcgaggaggccgccctaacaaagatcgagatcggcaggcccgtagcgaccgccgagacaacaacgataacaaccatcgtgacgatggtgacaacaatcagcgagatcagggagccaatggtcaagttcagggcgacagcatcagtggcaaggcgacgacgatggacgggaacgcaattcccgatctcccgcatctagtcgagattgaagacgcgaccactgttcgagaagccgagctcccgacccgagcgatccctcgtcctcatcttcgtcgtcttcttcatcggacagacctcctcgacgacatcacaaccgcaggccacctttcgctccaggaggtgggtgcagagcgttcacgcccacattatgagatgtacgatggcccgaaaagtttcgaccaggagcgatcgagaaatatgacggaagtacagacctagaggaattcctgcaagtctactccacaattctctacgctactggcgcagatgacaacgtgctggcaaattacttaccagccgcgttgaaaggttctgctcgttcatggctggtccacgcgtccttgacatgtggggccacgtgggttctacgctgactcacccgccacgtagaacaaaatcggatcaaaatcactgaaggatgtaaagcgaacggttttgtaagttaagggatgttatatatctggttttgcggatgagggacgattttgtaattcgatgacaagttgtgggccctttgatgtactttttccaagtagaaaataaactagtaccataaggatatttatttttattgatttatatggtgggtcccgcaatatctccttctcgttcacctccctcttgtgttgttgaggtgcggtgcgacttgcgattgcgagtgagcggcatataccctacgaatcgaatcgaattccaagcccaccgccggcgatggccatcgccggcctgctactccgacctcctccgtgcgtcgccacgtgcactcctccttccccttccctttcctcacagtggaggaggcggaggctcaccctcgcccagccctactgcgcggtcggtctatccttcgtctccggccgccatctccgccgccgccgtcgtacgggcactctcctactactacaccacaaccaacaaacgattcattgattgattgattgtatgatactaagcgagccttcctgagtttattgtttggattcatttcttcccttcattcattgcgactcatagtatctagttgccttttaattgcactccttctttgtgttattatccgtcaaaagtattcatcatatcttagatgaaaatacccgtaatagcaactcttgtcacaagctctatacagtgcacaaattgggcggcattcaacattttgtcattgttcggcaaaatgcccaccatatgctcggcaaaatgcctgggatcatgtccctcgcatcacctggctgctcgccattctacactgtttagtttcatctcaattcaactctacccacttcttctttcgtttccataactaccattcctacgtgtctcggcagttcgatttcactaacctcatctacaaattttctcttggactggaattagacgtcaacacactaccatctttgtatgaaaaacaggaaagctaaagactaggaaaggaagagatcaggatttcttacccatctaatttgtcttcgccgatataactgcccatctaccttcctgctttacatagctggatgaaggatattccctttactatatttactatgcctgtattcatatcgtgctgttccataattctttgccaaattaggcatctcactgcgtttgtgtttctttgacttcttcaatgtagagagcaaaagaacaagtcgtggaactggtgtttacgcttctttatttggagttggagctcccgaagctctggttattggagtggttgctctgttagtctttggtctcaaaggactagcagaggtaaactctttcccagcaagcctagacatcatatttttgctgttgtccggcttcctattctagctaattcttcactaaaccctcagcattagtactccaaataaactgctcctgaagttattcagggggaagtcatacccaattaatttaaagcactcgtcttgaaatccacattagaaattcatgtatgtcagtaaaaaatcacaattgcaccttgatacatttgcagtgtttggacccctgggttgttgctggttagctccacttatctatttacatttccttcagtcctagactcatatcctgcttctcattcaacgctgttaaaaactaaggtggcattcaaacaagggtcttgacattttcctagtcttgagcaagcacacatttttttcccgtgatttgagcttaagacccgtgaatgtaatgttgtcttcccttgtttttttgttccttgaaacacaaaaggctcggatgataagcctgaggctgcaccttacaccagcgaagaactcatgaaagtaattgaagaacaactagctgcatctgcagctgctgcttggaatactcaagaacctcctccatcacagcaaaaaggttgtgacattttctttgtgccagttcttcaattaggtacacatgttcagtattcataagataaattgtgcagattgtcttatgttgtatgacattttccaactgtgtaaaattctggtttgtctttgccaagttctcaggactctatgctcctgtaagcatatagtagtcctagaacaaaatggaagcaacactgccagtggcttatgtgagcatgtgttgattgctggggtagttgttaaaggtcctagtgactgcacttgtttttgctctgaatttgtgtaaatcgtaagcctgtttcaggggacactcccttgtagtatcgtttttacttacgttgtatctgaaagtaatcgcttacgaatttctggtcaagctaattaacttgattctgctgtgtcatatttcagaagcagcagctacttctgaaagtaatgacggtgctatatcaagagggagtgatggtgctggtgctgcaatgagtgagcccaatcggaacatttctgagaagacggaaaccgagagatgaagcataacgatgtactactgtattaagaccgacgcaagaacacgctgtggaggttggaaagagcggattatgatttttaatttggggagctaggtatgcctgggtttgggtagggagtgatttgagaagtctgatcaggtgtgatgcatatgtgttgctttgctgtgtactagtactagatcgattgtagaatggacggacagactgacaggtgatcgtccctcccttcctccgacctctagttttgctatggatgatgttagaccctgtttatatgtgagtaaaagttttaagttactgtcacatcggatatttggactataaatattaaacgtagactattaataaaattcatccataatcttgaattaattcgcgagacgaatttattgagcctaattaatacatgattaggctatgtgatgctacagtaaacatgcgttaattatagattaactaggctttaaaaatttgtcacacgaattagcactcatttatataattagttttataagtagtctatgtttaatactccaaattcatccgatatgatagaatactccaaattcattcgatatgatagaggctaaagtttagtcactggatctaaacaccaccttaatttgtaggagtagctgtctgtctatgcccattgactatccctagtactactatgtgtttgatcagttgtcatctgcaatcacttgatgagcttgatttgtaaggtgaagaggatataagttaatgccaaaggagacgatgcaagtaatgaattgatggatgatgtgtctgattattggcactgcaggcatgtccagtataggtgttattatattttattattatcactatgatcacttttaacttaaactatcatcgtctcaaaatataagtattttttgacttcaacatagcctcgaagatactactttgagcaacaatatctatgaaagtaatagatagtaatatgttttaaatataaatagttacatactacgatagtttgtttaatgattaatctagtaacattaattttacattattgatcttttttattttttattaatagttaaaattaaaaatgtttgacttagactattctaaaaatgtttatattttgggacagagggtgtatgtatgtagacattcataataataataataataaaactttttatattctggtaaagagataatagtagattttattactgtatttgtttggaaatgtagctataaatttggacgtatgaattgaaaaggtagaaaggtacgctcccatccttggatgcaaaatgaaatgggagtgggagagggccaccgagcagctgagactcggtttggttgacctgaccaccggtcgtcgtcttgggttggcttggcttgctgtccgcccgcgttcacaaggagaggagaggaggttgaggttgatcttgagtgtgaggagaggcgagatcggaaaaaggggaaatcggcgttgcgatgccgaagcgggtggccgacgagatcgcggcgctcccggagccgcgtgggcccctgcgccgcccctgcgccgacctctcccgccgcgtccgcctcctcgccccgctgctcgaccacctccccgcctcctcctcctcctcctcgagtactcccctcgccgacgccctcggggccgcgcgagacctcctccgcaagacccgcgacggcagtaagatcgaccaggtctcttgtcaattctcctcctgctcttcctgctgctgatttcaattctcaaccatcaatctatatactatatactatatgatggatggatgcaggccatgcgaggggatgcgttcctggacgaatttgcaggcgtcaacaggcagattcacctcgccttggatgccttgccctacaacaccttccacatgccccaagaggtccaagagcaggtactcactatattatgcagcccccaactccttcctggacttggacttggaatggaatgtttgaatgtatgttttctcctcatcaggtcgcgctcgtccactcccagttccaacgagcctccacaaggacggatcccccggatacacagctttccatggatcttgcttgggctcttaccgacaacccttccgaccccgcccttctcaccaggatctctcacaagctgcagctgcacaccatggctgacatgaagaacgagtccatcgcccttcataacatggtcatttccactgccggagaacctgatggctgtgtcgaccaaatgtcttccctgctcaagaagctcaaagactgcgtcgtcactgaagatcatgccaacgatgccctcaccactaggtctgcctccattaagcataggtctcctatcatcccagacgagtttaggtgccccatatccctcgagctcatgcaggaccctgtcattgtgtccagcggccaggtacatgtttcttgtagtatattctttccaccacatacattttttcagtccaaaaaatttaaaaagcaattgtgtcttctttttttcagacatatgagcgatcctgcatccaaaagtggcttgattctggccacaagacctgccctaagacgcagcagccactctcgcatacttctctcaccccaaactttgtcctcaaaagcctcatctcacaatggtgcgaagctaatggtattgagcttcccaagaacaaacagaattcccgtgataagaaggcggcaaaaagttccgactatgaccatgctggtctagtctcgctgatgaacaggctcaggagtgggaaccaagatgagcagcgggcagctgcaggtgagatacgactgcttgccaagagaaatgtcaacaaccggatatgcatcgctgaggcaggagccatccccttgctggtcaatctgctctcctcttcagatccacgaacacaggaacatgcagtgacagcactcctgaacctctccattcatgagaacaacaaggcaagcatcgtggactctcatgctatccctaagatagtggaagtgctgaaaactgggagcatggaaaccagagagaatgcagcagccacactattcagcttatcagttgttgatgagaacaaggtaactattggcgccgctggtgcaatccctccactcatcaaccttctgtgcgatgggagcccaagaggcaagaaagatgctgcgacggcaatttttaacctgtgcatatatcagggaaacaaggtccgggcagtgaaagctggaatcgtcatccatctgatgaacttcttggtggatcctacagggggaatgattgacgaggcacttagtcttctgtcaattcttgcaggcaacccagaaggcaagattgtaattgcgcggtcagaaccaattcctccacttgttgaggttatcaaaacagggtctcctcgcaatagggagaacgctgcagccattctatggttgctctgttctgctgatactgagcagacattggctgcaaaggcagctggagtggaggatgcactcaaggagctgtcagaaactggaacagatcgtgcaaagaggaaagcttctagcatcctcgaactcatgcaccaagcaaatgaggcatgaagcagacaacattcatttgtttaaatctgatttgtggtcgtcttatagctgtagcccattgtacacatagacatataaacactaaattgtttctcaattatgttgaagtttgatatatatatgtaggcagattttttaaaagggaatatgccgtaaacgtataaagtgttgtataatttatattgtaacttgctaccatgtacttgataaaactggtaaaaaaatccatgtgtttcagtttgctggctattattgtttcagatctgacgcattcacatgcattttcatttgttggcatttgactgcttgttgagcaggattctttgaagggaaatggacactgaaagttgcttcttcctggggaagctctgtgctttgggcaatgcatttggtggcttcattctgaagtaagttcgatttcagaaaattgttaccacatttagttgttttttttcacagattagtactgcatgttagtatattggtttcttgaacccacaaaatgtgtctattatcaaattgtctgatttaagcaatgagcagcatttctttttcctttttatttaccaaaagcaacatttcttcacttgatgaaaacctaagacatagaagattaccattgcatctacttcactttgtgtttcttaagccttttgctaatgacatccttaacttgtgattattatttaatgaaatcaaacaaaatgaatggtgtcattgccatgtaactaaatctgttttgcaaccaaaagattcataacatgcttgggcacatgtaagttgtaacatactaaaactgctatgttggggcaacaagaagtggcccagttgtctatgattccaatttccaaaccacttctaaaaaatataaatttttggtgcaaaataaatactgacaaagaaacaaagaagacaagaaattgctgaaaattgttgcccgggtgcagcacgtggatcagcatggtgcataatttagttgtagctaatttcaagagatagtgctttgcggattaattacaaaaaaacacgttattggtatgttagtatgaccgtttacactcttactaggatgcagggaaaagaagtcataggaataaagagacagtaaaaggaaagatacatatgcctccatgaggaggacatataattatatatcatcactgcacttgtggtatgtgagaatacacagcacgttgagaccataactaggtgtcgagaaatgctattcattcgcatgatctggtcttttctcggactctatcaatgcagtcttactattcttatttaatctcttttgagaacatgagaggatctggtcgtttatcttgtggcacaaagagctgagtggctgggacagagtagagtgttgggcttcatgcattccacccatgtggggacaattgttgtcgtgctggttgctctgtaattcctgtcagttctagccgaacccatttacagtctaaaatggaagggggcacaatatagtagtagcagataaatgtaacagcacactacacagtataatgagctgggcttgctatggcatgacgtctggttaatggcactagtaaaaatgaactgcctgtgtcctctcaacttttgaatcgtgatgcatagaaaaagttcatcaggtcccattgcctcctattaacaaatagctccagctctctcctcaccacggtatgtcatgtcagtagtagtgcacaaacatgcagccgcaaccacatggccaacctaagcaacgagggcatgcgcatatcatttgcttgcttaatctttcttaactcatctgtcagattgtcacagccctcttgttggagtaataatcaatactacttgtggtgtgatgacacagctacgatctaatccttgtacttaaaacatataagcaagttgggttgaggaagatctaaacaccgggcagcctgcagattcagttgtgttcaactttgtcctttgaccacaactactagctagtgcgtgtacctaatcaagattcttgttacaagcagctagctagcaaaacatgtattgtgatattattctatatatgttcacatgtgatgtcccctgttggcttggtgcatttggtaaaacaaaactactctatattatgatagactatggatactccaataatccacaatctgttgctagggggggtgtcaacttgcattaacttgttaacaaaatacagattaaggtgggagcccggttggagaatcagtggccaagacgcatgcatgtgcatggcgcttaattagttgagttgtagcttgttgcttatggagcaggagtagtatacatggaggtactccagtataaaggaaggtgatgtgattaatttgcatcgatctgctgcaggggtgagccgcgagccagagccatcaggtatttgtcagcagcagccaaagaagctactcgatcagtagctatcttggggagctaagggaggtcatgggtcacattggcgaggctggcggcggcgctgttgtcatgggctgcaaggtgctgccgatgtggagggagagcggcggcatggtggatggcgcgaggaagacgatggtgcatggcaagaaagctgtcgctcgggtgaaggagctcctcaggcgggctgctcagcccaggtcccctcaccctcaccctcaggccactggcgccagcaggtggaaggtaaattcattcaccttttttaattccttcttaaatcttcctacttgtaaagaagaagaaggaagatgataagtatgtgttgcatggatggcagaaggttatgagcttccaggcgagggatagcagcaacagcaaagcaggcaacgacagcacgagcaagctgagtttcaagtgggacgcgggtagctgctcgtctgcatcatcgtcggctatgtattccccgctgtcagccgtgtccgcgccggcgaaggcgccgtcgagccagcagcagctgcggccttggtccactgtccctgatgatggcgagcagcggatggcgcagtggatcaccaccgattcagactgtatgtatatactcctatcatagcatctttcttctactagtgtaccatatatacacacaatatacatatgtgaagaaggatcgaagcaaaagtaacgatgattttggttcatctgcagttgtggtgctggagctgtgacctcaactaatcccgttccttgggatgatggagtggaggccaggcaagcaattaagctgcagatactcatggatggctctcactaatttactgactgactacattcacaagtttagaccgatggaggaggggaagacggaagcagcgaagacagtagtattatttatgaatctcaacggccaagagcagaggctgcagctaggttgctgctgatcaatccatatcatgaggaaacttgaatggattattaaaagtaataataacagaccggtttattactagcacaagaggagagtcatcgatgaaatactagtgcgatgtatagtatacgtttgtgtttcttttttctttgacacgtaggatgtgtttgtgttggttgtcctattggagtgagtgaatttagagtagcatacatgccatgccatgaatcgtttgatcctctctgtttatgttccacgtggatggaggtttgggcagggtactacacgattcattttaagcccgcccttctctgatctccgctcgaaatagtccaatttatttcccaagtgaaaaaaatagatatttcatctttagaaacccgcacttagttgagtactactccctcgtttcaaaataaaaaaaacatttccaaagtttaaattatatattaaaatataactactttatcatttactcccttaccttatcaatcaaaaatcacctcttgtctaatctcttcacatgctttctcattttaattaatgataactcatgaaaaactttagaaatgattatattattaaaacagagggagtactatgcaatcccaaccccacaattctatgtatcttcaagacccatactccaagggtatatggccgatgaaaatgaatgataggaggtggtgatctactctagctagttgtgataaacatgataagaaaaatttctaactttcttatctatgagtgtcgatgctataaattcaagtcaagatgtcgaaaatatcatcgtacagatatttttgtcccgctctttgtcatcactatcagctatgtgttatttggcacctattaggctcttaaagaaaccggtttttaccctagattccacttgtaccatcgcgagtcccctgaagccctaaaattccaatgttgtcgctacaaatcgtgtgcgcctacatgcgcattgtcaccaatgtcgctcagatacccctcctcccacccaagcggattaaccataacatagttgccttccgctagagccgtgttggataggctccttttcaaactaaaagcaaaaaaaaacgtaaagcataagttgtcggacattccaatattgggtcaaacactctgatatagctattgacttttacacactaaatcgcactctaatatagctatatcgaccactcaaacaacaacgcatatacatcaactaactataagcgttgcaactagcaatgcgtcaagaaagtaaagatggaaataaatcatcgagatttgtgcgatgatgtatttcccagagttcaaatacttgagggaattctattgatgcagcaatgggacttcatgatctttcaatgagagtagtataacttcgatttggggtgagaagtcgacattgacggttcgactacaaataccatgggggtgctgcgacttagcaactaatgccgtgccaggaacaaccttgaacctgaagcaatcgaagaacaagtaagaacatgttggcaggtaaacagttcacaacacttgccaaatgaaactgatacacaaagctagggtaagtatctgggcggtctagttgatatgcgagtacaatgaaatagttgaaactaaacttgcatctaaacaaaacccaagttgcaatggtggctgcaaagggtttatataggtggaggaatgataaggagagaaggtgggagaaaaccctagtctttatggacctctaatggctctattgaatataagccagaaacccaagtttctggtgcgaacactattttggttattctgagcagcttcgggtgaatatgatggtgagacaatacatatatgaaagtatacgacaagatcatttaacaagtactcatttgcccccattgtcctctggagtgaagagccatgacctcatattccttgacttcatacaaccatgcccctaatgctcctagtcttgttcgtgaatctggttgctctcccatattcgtaagaacaagtagaccataacaactagttagtagcatccaatttaaagaacttatatgaatagttaggaacaactttacttgatagttaatttcttaagattgagctctagccattcgtccttgctgtgcagtagacatgattgtttcgttgaaagggatgtcctcatcatttactctccgttgagtagctcataaagagtcagtttttttttcaacactagtagacacatctctccactaatataaatagtatgatagaaaaaatcaaaccacattccagccaagctagaaaaaacatatcttgtaccacaccccaaccatttttatttacttttcattttagcattgtcgatctcctgtcgcattcccagatttttttagagatgtctttcctttgctacttttaatcaatgcaaccatagtagtacaaggaattttaatgcttttcttttgggatctccctccatttgacatttttttttcaaaaatcaaacatccttagatttaaatatgtttataaaaaattgacatagcaatacgtaaacatcaaattagttcactaaatctaatatcggatatgtttttatactttgtttgtttcatggttagattttataaatttaattaaagtttgaaagattaattatattaaatcaaaacatgttataatataaaacgaataatcaggttacaacttaaccacatatattggattcggataatcaaattgcaactatactactgagtactacactagccaccgaaccttttttaggaggcatttaactatttgccactcgcagttatgtcatgtggcttctcatgtgtctatgatatataacgagattgctaattggcgcgcgcatgccctccacccgccacgtgtctatttttttagtgatttttttcatgcgtttttccttttttttcacgatttttttcttttatttttgctctttttctgattatttttttaattttcggcacacgtgttttcaaatattttgtgttaaaagtttttaaatcatgacttgaaaattttttaatttggatttgaatattttcaagtctcgagttgaaagttttcaaatatgtgttgaaagtttttgaaatttgagatgaaaagttgaaagttttcaaatttgaatttaaattttgaaaatttgacttcatatatatatatatatatatatatatatatatatttcaatttcttagttaaaaaaatctagtggaaaaaaaaatcttagctactactgttattatgtctaagataagactaatagattagtctaatctaactacctaaaaaagttgggatggctagaaggagctagccatccaatggaattaagataggaggagccacatatttccaacccttcatttaattcaggtgtcatttaatccaggtggaaggtgagtagttcaggaattgaaccttggctgcaacgttcacactgaacgcttgtaccaactgcgctagaagcgcatctctaatctaactatctatagtccaaaaaaaatatgtgccggtagcgcgtacgcgtccactagcaacccccaatacacaagatgtaatgtatctatgataagtgggtccagcgataaatttataattgccacttataatagtgtatgaaatagttaaatatctcccttacggatctcaataaaagtaaagaaaatagagttgagggaaaaaaaagaaaaagaaaaaaagagggcgacccaccgaaccgaacaagaaacaaaactagagaggaactctcccgtcgtcgtctccccctccggctccgtccgaccaatccgccccgcataaacccccgcgactgccggcgccgcatcccctccgctccggccggcccgaccagagagcactgcccactggccactggagtggactcgcgggaacatctgggcgccgccactgatcgatctcctctccgtccgtcctctacctggtaagccctagtttgtttgtttgtttgtttgtgttttcaaccctggcctcaattgacattggcgtcggcaggggcagggcagctaggtgatcgatgccaaggaagaaggccagctcgccctcgccgacctccaccgccagggagactagaagctcctccgctcgtggtcatgcatcaccaaccccaaccccaaccctcaggaggtccacccgagaaaccacatccagattttcttcttcttcttcgtcttccgcaaacaagcacgaaggctcccccgccaagcaaagtgccaacaacaacaccgcaaaacggaagatgaataatgctgccgcagatacctccaccaggccaatcaagaagaacaaaaagctaaacgcaaagtcctatttagcactcttctccacaccccaacaaaccgccaaatcccctcctgcccctggtaggaatttcatctctttctcttctttattaatcgaggaggaaattcccggctgtattctaactttggcaatgtagcccctcctctcctagtccaagtggatgacgacaatgcttccacggtgcctatgcaagacagtggcactcttctggagcatgaagaagctgacacacaagagcaaggttaccagtctggcttgcacaaagttcctgaggtggtactggaggagactgatgtctccaagaacaaagctgatgaacatgcttccacttctgaggtctcatccttcctaggccttaaacccctgagtaacatcataactagatatctgcttatttcagtattacgtgttctgtttgtttatacctgcaaaatctatacgacctctggagggagctactttggtttataataatatgaccaaacacagtatctgccagatgaggatacttactacacatgctcttttctgtttaccacctcagtccctttaattactatgtttcatggctcttagcagcaccctggttctttgaatattgtgttatgttagttccgtttgttttgagagatataagatttgcaactccattgtggtgcactctaggatttgccttatccgccattttgttggagtgacaaattcttgattgcccccatcctagtcattaatgatctttcaagttccatgtgtacaagggaattaaaagcgtaacatgtatttttctacagccacttattcctgttgatctgtgttcaaacgataatgcttctgaaagcagccatgggatggaagtcaaagagcaaaccgtgggatgttcaaagtaatccacttatcactgtgtgaatgctgattttcctatagagttgttaccacttaccatgatgacgctgagcatcaccctttcattttgcagcccatgttttgtaacagatttgccaaataggccttgctccattgttcatcatgaagaggtgatactaaaacaagtctttcagcatctttttctgtcactagcattgtatttcttctgtcttcgttttggtggaacaggaccaacatttttagttaatgttcttttgatgcttctctaggccaagaagacaattgaagcaggtgatcccagagagatcaaaggggcttctacttcaaatcaggctttagtaacccattctgatggaacagattacaacgagtacctgtgtgctgtttgcagaagtagggaaaccccaggaattctcaagtaagtcaatttacttcattcttgctgctccttgcggtgctgttcctttctgttacttctgcagatcctgtccattcttgctgtggatcctgtattggctttccacatgttaaactgttcatgccccagtgtagaaaatatgtggtgattgttactcccattgacagctggcattctgtacagtgagttaataccagtgacaaaacactctcaaactgccaaatgtatggagggcactgtgaccacctgcccttcgtgaggatggagggatttgggactatctgcgactgtggaggttgatccaggccatgtagcctccctcgttggttggttggtaggggctacttctgcctcttttgtaggtttaaaatgaggcagctcaggagatgccaccatgaaaggctgtgggagaggtcattcaagaagaatttgtatgacagaatggggcacaccggcagtgtgatgggatcatgggagtagtaggtggtagggtacgagaaggtggcagtggagcatgagaggagagagggtacgaagatagtccgttggacttgagtgaatagtgtgccctttatccttcatatcttcttctcttatttttttcacattcatgctgtggatataatagttggctttgttagattgtgttttcggcatatacttaatttgtaaggatctcaataattttaaatcatcgtttcttttttcaatctggtaacaggtcttgtgatggaaaagattgcaaaaatcggtaccatgattcttgtctggatcctcccctgcaatatgtgtcgctaggtatctggttgtgcaccttatgtactaaaaagaggctccagtttggtttatttgcagtcagtgagggcattgaatctttgtgggatgttaaggaaggtaagtactaaataaagcgacaaaacatatagatagatatcttgaagtgtaaccattcatttattagttctattactttgtcaccctaggagtgcagaacaacaagcagtattttgtgaagtacaaaaatttagctcatgtacataatcaatggcttccagaaagcgatataattcgcaccccaggaggtcaagatctaatcaacaaattttgtaagaggattcaaaaagaaaaggtggtctctgtgaattttttgttttgtcatattagaagagactattaggttctgcaagcctactgatgtttgtccttttcaaatgtggtttcttagacaataaggtggaagcaggaatgggctgagccacaccggctattgaagaaaagacctcttatgtctgaaaaggaagctgaagaattttttaattcacttggtgataaatttgcttactgtaatgtcgaatggttagtgaaatggaaagatctgggctatgagtatgcaacatgggagcttgagacttcatcatttttatgtacccctgaggctaaggatctgaaaaggaactatgagagccgccatgaagatgcaagaagaggttttgatcctgcaaaaataaataaggtatacctctgagaacagttatccacattaactgattcaccattgcttaattggataaggatcacacatatcacctgtacatgctgatctgctgcatgcatgcatttttgtggttgtccacctcataaaaataatgatgtttgtaaatttttaataaactattgacttcttttcatagtcatgtcttatcttcatgtcattttattgtacaaattcgaccagttatggccggttgattatcagaaattgaagctttataattggttctcaatcaactttgaatctataccaatgatcttctgtgctgtttgttaaccttgtctttctcctttcatgctacattttgcacttctaattcttcagtgatttaattcttattctacatgaaacagcaggtgtatttctgactgagttcttgttagattcttcgtgtcatttaccttatataaacccatagtctcctagaatcattttgaattgctaaaatttggtcggacaacttttttgtacttactccctccaaccaaaaatataaggcctagtagctttttacattgtctccaacattatactttgaccattaatttcttttataatatatcaacaactatgaaattaacattatgtgaaagcaatttcaaatgctattcgaatgatatcacattcaatatgcatgaaattaaacatgtgttttgttagttcaattattagtcaaaattttcagatgttgattttcctaaaaataaggatgccctatatttttggatggagggaataacattttgctcatgtaacttcactggtatcattcggttactggcattttcttagtttgtttcatgctttccaagttagttcattatgggcctgtttggcatagctccagctccaactccacctctcatggagttggagctcagccaaacagtttcagctccacctaaaatgggagtagagctgggtggagtctctcacaaaatgaactagagaggtggagctgggtttaggcagctccacaactccactccagacccaactcctagagctaaatttaggaattggagctctaccaaacaggccctatgtttaaatccatatattcattaggactgtttgaaatgtgggaacccgcagggagatacactctttcctatatgactatatttgaaacatgtcttagactggtatatctttctatgattatgcaggtttctctttaaataactcaatgggggtgttttttcttaaatattaacagtttatagtgtctttggtgtttacagggtaagcaatgtctgtttcagaaacttcagaagctaccggatgggttcccccctggtttagacaaagatcatttgagttcacttaaccggctccgcgagttctggcacaattctgatggtgctatttgtctcgatgatcaggtagtactctctgaatgttttagctgctatgcacaagaactgatatagcgtttactccaacttgggttggcttccttttttttcacccacccacttttgtcagttcttacttcttagttataagtatatagtggactgcatggctaaatgctgtagtgcccttgacattttattgtggattctttccagttatgttccacatctgaaggtttaactatgtaacttatctattgactttatacaggagagagtaatcaaaaccattcttttttctatgtccatattgcctgatgtctgccaaccacttctcattgtctctacttctgcttctctctcattgtgggaagctaagttcaatcgcttggcaccatcgatcaatgttgttgtgtataatggggagaaagacgtacgcaaacagattcaagatttggagttttatgagaacggtttggtgacgtttcaagttctcttgtcccatcctgatgccatcctagaggtacttgtttctcatttccatcagcatcaaaacacatcaatgactactcttgttctcatttccatcagcattatccaatcatgaaagtcagctatcaagattactcacatcctatttctttccttttttccactgtaatacaggacattcagaccatggaatcaattgtttgggaggcagttatggttgacgattgtcaaagcttgagagtttcaaaatgccttgaacaacttaagcatctttctaccaattttaggatggttcttttgagtttcccactcaaggtgctgttagcaaccgtaacctgtagaattattttcactctttttccacaaacaggcaatgttaattccttttgttttgcaggagagtattcctgagtacatcaacctgctgtctttcctcaaccctgaaggaagtgtcatttcgagtagttcaaatggtgattttactgatacaggtgatatcttagcaacgctgaaagaaaaatttgctcgtcatgttgcatttgagcggaaagcagattcttcaaaatttttggagtactgggttcctgctcgtctttcacgagtgcagctagaaatgtactgttataccttactttcaaactccccagcactccgatcacactcaagaactgatagtgttggtgctcttcgtgacattcttgtatccctccggaaggtttgctcttcaattttctgagcacaatatattgttttaattcatggcagggaattagatagtctagatgatggaatctgtatgcaacagtttcttctgacatagctgctgacacaatatatccttgtttcttctggcacagtgctgtgaccacccttacctggttgatcaatcactgcaaagctcacttactaagggccattctctgactgatattctagatattggagtgtgtgcaagtggcaagctactgctgcttgataaaatgctccaaggatcagaaaccaaggccggagagttctcattgtttcccaggcaagatactagataacattcatccataatgtttttacatgctatacttaaatccaaagttgtgaagagtgattgcttagtacataagtccaaagtttactttcctcaaacatatttgggtgttttcttatcatttccaaagatagtcattgctatgcgcaattattatcatctgagaaaaatattgtgagctgtctttaatatgcacgttttagtgtcagggcttaaccactcaaattagggcagtatctgacttgcctcaaatgcaacatcaagggctgcataaaaaccttacacgatttaatacagtcatgcagaacatgtagggctggtgtctctctctataaaaattcttagggctgtagctggggtagaatgcagttgtttgcttgagccctcctgttcatattttatactagaaacaaaggctcaaaccatgttattctagcttgcacactccatattctgcaggaatccaggtgttggagctgcaccatatgaaccctaccaaaaagaattaaataagttactgaaatgtacaaagtacaaactcttttaggagtatatacttctttatttctaattgaactcattatttcgatatgctttggttcatcacttatagaacttaagtgtttggcattcttatatttttcttccaaagtatgtcagtccaatctggttctcctttttcttatatggcagtctggtggcggggctggcaaccctatgggtgacattttggatgattttgtccgtcagagatttggttttgagtcatatgagcgtgtagaacgcggattgctagtgccgaagaaacaaacagcactgaatatgttcaatgacaaaactaaggggcgttttattttcttgattgatagtcgtgcttgtgttccaagcattaaattatcatctgtcgatgccatcatcatatattgtagtgattggaatccaaccaatgacttgagagttctccagaggatcagtatagagtctcaatctgaatgtgtgcctatttttcgcttgtattcgtcttgtacggtggaggaaaagactcttatactgcgaagcatgatcatattcttgacagcaacgtccagaatgtaatgcctatcgtgagccattccctgcttagttggggtgcatcgtttctcttcaatagacttgaggagttccaaaagcatgactactccagtaaagattctgaggatgatggtctcttcatgaataatgtatttttggagtttgcagcgaaactatccaccaacgttgaagccagcactaaaatggaaaatgcagtcatatctcgagctcagcagagtggatcgttttattctagagatattgctgttataagcgagagggagggaatatctgcagttgatggtgatttgccaaagttctggaccttctggtcaaatttactaggtgggaggtctcctcattggcaatatatatctgagccagtgcaaaggaaccgtaggaagatacaaaatatggaagaccaaatgagaatacctgcagaagaaactgatgaagcaataatgaaacgtagaaaaatcggagaaatcatggattcatctccgaagatcctacctgtcaaagacaatgatgctgtgctgcctgaaaatagtacagcatccagttctcatgaaacatcagttgatgacacttggcaagagctaggtattccaactgtaacagtaattaacagctcttatgctttatgtgcatatgctacatttttttataatacactccattttgtaggggcagaaagccttcagggcacacagaaaggtcttcacacccaactcaagccagagctgtcaaagttgtatgaattgttggaattgccggtactgccaagtatattaaaataaatgcttgctttatgttattaatttgagaaaaatattttagttcactgcaagtacaggacataatctgctcttttagcattcaatttaatagctaatattttttagttttcaacagcagagttccacaccttgtgaagagttatttatcaagttggatcttgataacttttgctcttcataacggaaacattttctttgactcttagtgtgtcattttgatccatatatgttacttcctccgtttcacaatgtaagactttctagcattgcccacattcatttagatgttaatgaatccagacatatgtatgtgtttagattcattaacatatatatgtatgtgggcaatactagaaagtcttacattgtgaaatggagggagtattagttgctactatatcctgcttttagctcaggttatgagctttgatatcacctactccctccgccccatagaaaaccaacctagtactggatgcctgtctagattcgtagtactaggatgtgtcacatccggtactaggttggttttctatgggacggagggagtgcatgtttctacatgcttccaatatgaatttatgcaggacagctgtgtcctgcagtcctgctgttaaaaagttgcctcctcttctgtagaatttatgcagcatgctgttaccctaagtttcagtttaagcgaacttttcctgaagtcacttgattctctagttaaataatataagctgattggatgcttggatgcttgataaaaccttttgcaggagactgtcaaatgtttatgtgaggaattacttgattacattttgaagaatcatcaagtcagtcaggagccaaagggcatattgcatgcattcaacattgccctgggtagattataaaaatattttataggttttttagctaaatttgcatggctaaatgctattattttttccatgtgcttttcagtgttggcgtgctgcttctctcttaaagcataagatcaatcgaagagagtcacttgccctttctgtgagaaacttgaactatgagtgcgatgaagtgctcgctgaatatgtttatgagaagctaaggatcctcaagaaaaagttttcgcgtagagcaagtgaaacaagcaagcagagccaatctactccagtaaataacacatcatcttacaaacaacagacctcaccgaaattgagaagtgacggatcaatttgtcatcaggtaacgacaattgatggtgatttggaaaatgtttcacatgaagaggctccacatgatatcttgaccgaggagatgatattagaacagaaggaattgatatctgttctagaaactcatagagaagaacatgttttaagggatgaacttcttgaaagaatcacagagaaaagaattaatttaattaacatggttttctccttaagagaaaagaatattcaggataaacaaggaaacgagaccacactgttagacatgcacaagcaaaaggaagtggcaaagctgcaagaaacatgcaatttggtcgtggaacatcttcgtaaaggtcacattgattcagaggacagggatgccacggtgaagctaataattgaatggtttactttgcttctgtatgcatttttgaatcacatgagatgccagcataacaagttgaagatgcagcaatcaacttcatggaacaaggagttacaattgaaggaaattttccttcagcaagcaaaatctggccacttagatcgtagctttgatcaacaaattcctttaccagattcatgctttactttggaagaattcagccacttcaaggaaatagttggtaatttccctgtcggtgcagctacttcagcaaattgccagcattctttggcatcaaccatggaaattgcattggtccggagtgtcagtccatctgaagttgggaattcagaagcagcgataaatggggctgttgaagttcctgtccacaccgaaaaaagaccaacatcagaagttgggttgtcgcagaacaggatggacaatgattctgatggcattgactcacaaggagggccacctctggctgttcaacattcattaagttctaatcctgcaattgacaattccaataatttggtatgttgtattttgttcatatgccttctttttctgcgtgataacgtatcgtattctgacttgacaacttattacatgcacagctagtcgacatttattcatttaagtagttgccctattttatataaaaagattaaattgcctggacactatatattagtaggaagatctagttagttgctctgttaatctgtccagcatggattgaacatcatgctaaccgtatatagtatgtggcctttgatgcatagcattctcttgggcattattcatttgctctatccattttacttgaatgcattctttagttgtggacatcttcagttgatgcagctggtacactttgtctttgcatgggaatagtggttagaatatttcattcttttttaaaaaattaatggcacctcactacttttgtgaaattttgtgctgtaaatatcattgtacactatatttattttgtttgttgttatttatttcataaaatatataatgccagaaacagcacgttgtaaaatgttgtccatattatatcaggaatcttcagttgccagccatagaagcgaacatcttggggatattgcagtggaagttaatgccgacaattgtggcactactcttgcagattcacctcacttagaggcaccaactgtggctgccctgcccagccagagtgccttgccaatggctatggaagttgacattcagacagatcatgtagttcagtctgcccagcagaacatagtgacaggacgagttccacaagaagaagagcgagaaggttcgaccactgtaacatcagctcagcctttgcaacctgaaatgcgaccatcaagtccagtatccggtattttgcgtgaaagaacaaatcctgatcagaggagggaaagtcgtcagccagaggctgcacctagttcggtggatccaacacaactctttcccgtggcatcactgatgtttaatcacccaccacttggcaatgaaccattgaaaaatgagctgcacagattacaagtacacatggattctcttaataaaatctacgaactgaaggtttgcatatttctccctcttgctaatataccaactgctcacactattcccagattcatcatagtttcatcaattctgcttttacctctggacagaaatcacaacttcaaacggagtgcagccaagaaatcgagaagataaaacagaagtatgatttgttaattaaagaacaagactccgctcatcatcagcacaggaagacactggatgacttgtatgggaaagttctcctaaaccaatcactagctgatgattttcgggtcaaatttgtatcaacatctgcagctcaaggtatacttgatatcttgcaaaaaaaatgttttctgatattgttagtgtggatatgaaacaatctgggccaaatttctgctacaacattatattttgataatttgaatttttcacaaaaaacgaaatagatctcctacaagccattgtttgtttttgaatttaggagatcatatcgcttactgtgccttgatgatccattctcttgcttatccaaaggagggcctaattcgatcctaaggtcaagtagtagtaagtaacctatttgttaagtcggacccaagagctaaaagataacctcttccttattatgattggaaggaaacatcaaaactacgttaaaactgagcgaatgcattccgttctacccctcctgttaatgtaggcctttccctgggagaaaggggcatggttgttctggatttctggtcctatagtggaagaataatttttcacaatgagataatgccgcataggaattgagcgccaggaaatgccaagttcatttgcagtgcttgacagacctagtgttttgcacaatgaataagattgtgcttaaaaaagatttgtaaagaaaattattgtcctggaccgagttgttttctgtagaagtattgtttgttactaatgttcactctatttggactgcagccagagccgtttctcctccactttgccagacaactcgccagacagctggggtatctcagcaggtaccaactaggccttcggtggctggatcgattgcattgccagtcggttcatcatcagctagtcgaccatcgctgcagaggcattgtgctcaaccatcgcatgtggatcggtcatcatcatcgggggggagtcattcatcatcgccatcttcacaagttgtacgacctcccccagcaatactaggcagcgttgtcagggcaacatcaactccttttagtcacacacctgcagcccgtggaaactatggagttgggagtgaagtagcacgggcaccagctccccatctccagttcaggctgccacgagcacatcccacggcccctgtaaatcagcagcagcggcagctcccagttaggctagagagcacatgttcaaggacacagttgactcctgtgagcaccccagtaaacgcaaggcagttgagttcacaatcagtttccccggtgagcaattcatcatcatcgtcaagctcacatccaggtccagcactctcaaatccagccttggcagcaaattcaagttcaaatccagttttgagtgcaggcacagtggcattgccgccaagtccacacccacccgagtcgatagcagcaccaaggggacagcaaaagggggcaccgtcaggcttgaatacagtgcctgttgtaggctcgggtttgccgccaagtaggtccatgtcagattcggtgtcgctggatgcatggcttacatccaatcttggtctgaaggacggtgaaaccagcacacctcgcactcgcatggatagtcatcgtacagtagatgtggtgtgcttgtccgatgacgaaccagaagagcactagagctagagctagactgacctgacttttgtagtacagcagtattttcttggaatgccattttttgcctgcctggcacaaggagctgaatttggccggactggtggcttgcatgtatatgttgttactactagtttgttattagtagtaccattccattctagcttagcttgtaagctgggtgggttggggttcccttccctccaggccttgtgcagcatgcctagtaaggtctgctagggtaacttaggttgttgtaaatagtactaagtaattagtactgtacaagtaataacttgctaaccagccaaccaggaagtgaattaagcatggtggtaatggcctccttggttgcttgattggttgtagtcgacgaccttttggtttactaatatacttgtgtccttgaatcttttttttgttttatttttgaaagggtgtactttagagaaagactacacaacggtataccgttgaacggtatactgcttatcccccatgccacggccccgcgtgccggcttcttccgagtatgtcgcctgctgctaggattatcatcatgcacgtttgctgtgtgtatcagtgtatagtcttgttcctgacagctagctagtacccagcatgcttgtcctgcctttgataaatattttatgtatatgataaaagtaacttacatatgtaataaaagtaatatacaaatataaatattttttcatcgtaatataatcatgtaagattttgttctgaagatttaattgcaacgagtacaatgatataatcggattatagatcggataagtaacttgagagaaaacttcataagaagataaaaaagacatgtataacctaatagcaaaaaaatagttgcatatatgtgaggtgcaatagtacttctcgcacgtattgcgctgtcgcctagcaggagatgtctctcgaaatagattttgcgcaatttaatatatatttttttagacggagagggtaatagtcgagaagggttgagagtgaaaaaaaaaaggtggaaatggaaaatgaggtgggttgcgagtgccagctgtgcggtgggcggcgtggcgtggtgttctgcggcgcccacggcgggcgcctctgcctccaatgcgaccgagccctgcaccaagcccacggcggggccggcgatcacccccgcgcgccgctctgcgactcgtgcaacgccgccgccgccgagctgcgcctcaacgacggggccacgctgtgcgggccgtgcgcctacccctacgcctacgcctacccctacacatacacctacgtctacaccggctgccccaccccgctggagatgatgcgcctcctccatgccgccccgccgccgccggtattcagtcaccctcatctcttctctcatctgaatttggctctatagtttcctgcagtcggcaggtccaggaaacccgatgctggtacaataatgcatcatatgcagccagctacctgcagtttacaacaacgaggagaaggagaagagctacttccaactctcttatctgcgactgcgactcctaatactgctactgctgcgccaatggcaatgccacccccaccactacaacaccacaccaccacctccctcatcatgatgataaggaacattcacaagcgggaggagaggaacagagccaagctcaggtacaatgataagaagaagacgaggaagtacgtatatatatactctacttattactacttgcaagtgcaacaacccccaaatgatctcatcttaacataagctaattaaattaaattgatgcaggttcagcaagcagatcaagtatgcctgccgcaaggccggagccgacgcacgaaagcgggtcaaaggccgattcgcaaaggcctcttcctcctcctcctcctcctcctcctcttcttcttccatcgatcatcgattatgataacccacgctctcaactctcaaccacatttcctattcaattccacatcccctatctagcgatcattctttcatcttctggaccttgtgttccgtcatgaccagcaataatgacctagcaacttctcagtgcgcacactgtaaataaaatcttcccacacctgagtcatcccatccctgatttttttttttttgagaatttccttgattgttttatgtcccctatatacttctgcctgtcctttttctttctcttctttagaaaaaaacaatggaccaattatattcttgctccattcaaatgatgtaataatccttgtattcagtttaattagctcattgatactcctatcctatgttaagtcccagcaggttctgaaattcaaaatctgcaaaatcatctgccctcagatcgatacgtgatgagcttcctcatttcggcatcatcaagaaactgcagcctgacgatgctgatcactactacttgattctggacagttaacttgttttgtaagcagcagcgcagttttggttaacggactatcttgtctctaatcttgtgcatcagacgtacttgagttaaatatatgccatcctgtcaagtcaaagttagtatctgaaatctattagttacttgatcgggttgagcacatgcagcttcctttgattttcctcttcctccttttctgttagtacatttttacattaggaattcgtctacgcaacaactagtagcctttttttttaggccggaccggaacaagtagaaagaaggggtgtgctgctattgcagaatgcaggtagtctccaggcacattccctagttcgttcctaaacagtgaaactggcaccattcatcagattcaaactttggctgtttgtcttttttagaatatttaagaagcttgaaaacataagatattatattatttaagtatgtaatgtcataaataacttttattcgttataatataattattcagaaataatttgtgatcgaagtaagatgagtagatgatgataataattaacagtcaggttattcgagaatggaagaaatactctttcctcgactcatccgcttttgtacgtgtatatcaataaatatactttctctgttttacaatgtaaaatgtaagtcattctagcatttcacatatttaattcattaacattaatatatgtctagattcattaacatcaataaaaatgtagaaaatgctaaaatgacttatattatgaaacgcaggggtagtatataagtgctaacacgattattatgaatggtcttcttgctttcaaaatagaatacccagtgatgctgatgctaatggtactaagtcgacggttattctagaattagttggatcacatggagtactatttagcagccggaggcataggcaggctcatgtcagacgtgacgactgacgacttgtactagtaaactgtagaacctgagcttccatttgaaaattcagtcaatcaacgtgtcaaaacctgagcttcagcctcaagtccactagtattccctccatgtaaaaaaagcttaaccttgtgtactagggctgcgttggagagagtgagtttgtttgtttagtttttcacgcgcacgtttcttaaactactaaacggtgtattttttataaaaaaaaattatatagaaaagttgttttaaaaaatcatattaatctatttttgaaatttaaaatagttaatactcaattaatcatgagctaatagctcaacttgttttgcgtatcttaccaatctcctcaatccccttctcctcaaacacaccctagatgctgatacatagtagttaggggcaaatcacaaaccctaagaagtaggagtaaaatcacaattgaactagaaagtaagggcaggaacacaattgcccctagtagttactactcctacgtactaatattatgaatttgaaccgctgtacagatttatagtactaagatatattaatatttagtatgaggttaaattttttttgaaacggagaaaatagacaagttaagaatcaacatggaaaatgcatatgcacgcaccgtgcagtaacagtagtaagtagagggaaatgtacttatatgtgtagtgtagtaatatgctctacagttttataatgggtgaatagctaatttagtcccttaagtttcaccgaaggcttaatttggtccttcatgttttattttgtccacatagctcctccaaatatttgttttgacttgaaatcatccttggacccacttaatatgttatatggctatttctagtcaatatttctattaaaaaaatgtcttttttgcccttaatttgcatagaactatatactagaaaaaagaaagtcaacatgaataaacaacattacagatgtacttcccattatttcaacatgtgcacatgaaacttaagcaattactatcgtatacacttgctagtacataatttattttcattttacatcatatactatgtattatctataaaaaattcaagcatgcaatttttctcttatatatgtgaatgatgaggggtataagtgtcatttatgaatagagttgttggtttaaggataagtttgaactaaaaagaaaactcgaaggactaatatggatagattgaaacatcaaggactaaactgagtctcagatgaaacttggaggaccaatttgaccattcacccttttataatactgaaattgacttgggaaaccatttcttcaacgactataaaattggtaacaataaatccttgcagtatttgacattaattcctttttctttcttgtttgtgagtaaaatattgttgggccaccaacccacagcttacattgccttgtagactagtactagtataaatgaatgggatatacacgtagtaataatccaatccaatccagtaatatcgcaaattaagcagcaggtgcaggaggatgtcgtcggcggcggcggtggtgcgcgtggtgtcgaggcgcaccgtgaagccggcagcgcctcggccgcgggagagcatccccctcacctcctgggacctctccatgctctccgccgattacatccagaaaggcctcgtcttccccccgccgccgccttgcctcctagtcgtcgaccacctcgccgccgccctctccaccacgctcaacacctactaccccgtcgccggccgcttcgtcacccacaaccacccggaacctgaaggcggctgctccgtctccatcgactgcgacggccaggcgtccagatcgtccacgccgtcgccgatgccgtcactgtcgccgacctcctccctcccgacgcccacgtcccgcccctcctccactccttcttcccgctcggggacgccgtcaactacgacggccaccatctccccctcttcgtcgtccaggtcacccacctcgttgacggcgtcttcctctccttcgtctacaaccacgcgctctccgatggaaccgcattctgggacttcctcaatgcgtgggtcgagattgcgcgcgccagctgcctcgccgcgcccacctcgcccccacccttgttcaaccgttggtctccctctcccggagacggagccccggtcgtgctgccgtacgccgacctgtcggagctgatcgagaggctgcagccgccgctgctgtgcgagcggatgctacacttctcatcggagtcgctggtggcgctcaaggagcgggctcgccaagagctcctggcggccggggacacggcgggcgcggccgcgctgacgaggttccaggcgctgagctcgctgctgtggaggtgcatcacccgcgccaggcggctgccggcggagcaacagaccatgtgccgcgcggccatcaacaaccgcgggcgcctccagccggcgctgcccagggagtacttcggcaacagcatctacgccatcagcacggagaaggtgcaggcgtcggagctggtggagcgcgggcacgggtgggcggcggcggcggtggggcgggcggtggcggcgcacacggacgcggacatcagggcccgggtggcggcgtggaaggtgaacccgataatatacacggcgaggtacttcgacccgtcgggggtgatgatggggagctcgccgcggttcgacatgtacggctgcgactttgggtggggaaaggcgctggcggcgcggaacggcaaggccaacaagatggacggcaaggcgtcgctgtacccggggcgggagggcggaggaagcatagatgcggaggtggtgctcactccacaccacatggcggcgctggacgacgaccacgagctgtgggccgccgtcacgccgctactgctcaacaacaacaaaccttgaagcttttcttcctcctccttcctgccttaattagtgcctgccttttcttccaaaattaaataataaaataagaagctttaagcttttccttccgatgatattgtttcccgtctctgtctcaggttttggtttccttagtgtttgtttgcttgcttgattgataatccagcatcaacaaacaaagtaaagatatatctattcatgtcatgacatcattccagtgaggatgcaatgcacaacaccttcttcttctttttttcttttgacgtaacagaggttgcaaacttatgggttcgtgtctaattcattatctacaaaaactgaggttgcaagcaaactacatagatactgtattatcttacaagtaccaaatcacttgagccatccagcattatcttcagttgctacacaagaaagattggtttggtttccttatacaccaacaccacaagtatgcacatatgagaaaattgatgttctggactggaggaaaccctccatgcgttcagtttgagaccaagaatttgacaggttccgctctaaacaccaaaccaattattatatcataggtccaaaaccaaaaccaaaatagatcaattttatctatctcaactccccacatcaatctgtatctcaacagaggggaacatgttaacagtcccaagttgcgaatgtaacatcttctttccggcggcatgttaatggtacctcacacggtgtccatccatccattcattcattcatggtgttacaaacacgcctgtactaatctgcctacagtgtaggcaacctcttattgaaattgacattcttgcttctgataatgctatacccacgattgtacagtacaggctgctgagcattattgtctttacttacacggatctggtgaatggttcagttacagcctcacaaaatatacacaagcacagcatcataagctactaaaactgatcaaagctactttctgcatggttcttcgctggttgcccctccattgtcatgtgagaagtgggatttcaatccaatccagcactggtagtaatcgagatcccgggatggggaatcgagggcccattggcaaaccctggggatgagtgcagactcgaacatgaatgcaagcgtgccgcttagccttgatggctcattggcatcaggacggctgattgttgcctgcaaattgatgcaacacaccatgttacaaacacatcagcagccataccacctacaaggaaggaattcctccctaccatcggcatgactaacctcgtatgtcttggtgtctgggccatgaggtgtcatgcaactgtgaaggctagcacctccaggaagaaaaccatcagctttggcctgcataagttcagaaagatgagttctgatcatgactagcttagtcaatacacaccagagagaaagagcagatgctagcgaatgatcaggtctgacctcgtatattccatagatcaatcccataaattcactcatgcaattgcgatgatagtatggagggcgaaatgtgttctcagcgaccaaccatctaggcgggaatatcacaaaatcaagcaatgcgacaccaggcttatcagttggtgcagtcagcactgaaagttgaagaaatatatcatgtaaaatccccctcactgaattgaatgaactatacacattgtgttttaagataatgtaatacaactattatcattgtgttggtcgtgaaaagcaatcacctgtatttactgatggatcagcatgatcgaatagaacagtgttaaatggacagaatttactcaggtcgtactgaaagaaagaaagaaaagaaaatcagatcatatgcctctacctgcaaatttctgcatagaaagaaaggaattaacatggctagataaaaaggtttaccttgtaagggacataatttccatgccacgctaccacattaaatggagaaaagtcctgagtggcagtgaatagctcaccaccatatttctgcacaattgtgtatcctgggcggtggacttgctcaaaccatgctgttggggaaaggaaatcccttgccgaagccaagccatttgcacctgcacaccaaccggacatcttctagcaacataaaccttgtatgcttacactgtaaatatttttctttttttttaaaaaaaaaagaaacaaatgcagaaaggttgaaggcactggtattaccaatcgggccaagatcagggagctgaaagtgggtaccgaaaatctcagaaacatagccacgtgaaggaccatcgggcaaatcaacagcaaagcgaaaaccctggggaatgacaacaatttcaccaggtgggactagcagcttcccacattcagttgtgatcaacagctctgggcttgatagaaaaaggaggaactacggttagcatacatattcctgtagaaggtaggcataactgaatggaaattgcattaagcattatactacttttgaagcatggtgcttgttttcctttttttttttaaaaaaaaagaagaaggtacgttaacaaccacagacacagagtggcacaagtggagcactggaaatgatgaagattgaataattcaggggagaagagaaataatgtcattgttcatatggtggtaagcaaggcaagtggcaatcatgttgtggtgtggaacaattgataactggaggggaaaagtgtcatgaggttaattaatagtacagtagtgggttaatttgcagagatgaagaaggaagggcagggcaggatagaagtgaagaagggaatggaagatactacaacatacttccttgctgggggacaatgaggaaatcgccgtcagcgttgcaaaaggcgcatccgtccatggacttgttagcagcgtacctggagcaagcaggatataatggattgaaagaaagtagaatcagcatggatatacatacatacatacatacatacatacatacatacatacatacatacatgtggatggcgtatccgtggcgcaggaaggagctgccagcgccgcagacggtgtagaggccatcgatgaaatcgaggggaggatggtgggggggcacgtcggcggggcgccagcgcagctgggtgggcgtggcgacggtgtcggtggtggtgcggtcgaaatccccaattaagcgggggtgggcggggcgacgggggtggaagggctcgtgggtcaccgaaggcttgatccggtacagccatctgcatctttctttcatttgatctgatagaattgaggaaagattgaagaatctgatagaattgcttacgttcggaggttgcgggcgcgcggggcggtgaagggcgtgccggagagctgctcggcgtagagtcccagcgggcagaccagcgggctgttctgcccgcgcgggagcgtccccgccaccgcctccgacgacaagctgttgcccagccccgacagatatacgtactccaacccccccttctcctgctgctcattctgcgccgcgggggttgccgttgccatggccatggccgctggccggaggagagggagaaggacaacacaactgcttgtctcctttcagtttcaggaggcttctcctctcctgtatctcactcttcttctcaccgtctgtatatatcctccaatcaactactcctcctaaataaaaataataataattactctctcatattactactacatactagtagtaatctaatactgattactaacacatattctatgtattagcatctcttctttatcaatatacttttaccctcttctaaagaaaatttgttctgtattagcctctcctattagggggaggagtattgttgcaagacgtttgcttattacaacacaacaattttcgcaactccgaatgtgcgtagtgtacaacaagaagaagaagaagaggaggagcagtttgtcttgccttcacttactcagacagcgatggattggatgccatctccacgtactaagtatctcttatcttcttcatctaacactgaccgttctaaactataagatctatattttgtttataataacatattttgattattaatttatttcatatttatattattaataaatgcataatacttagcatttactattgttatcattattattattattattaccgagttgaattttttaaaaaagtataccctataattttggactactactgaccagtcatcctaatcttctcaggaaactggagtagtttgctgcctctgcctacttaaaagaaaaggaaaaaaaacaagtcaacttaacccaagctatgatgcacagatgcacccctatcttgtttcttggtggaggagatgcatttgctgaagctttagttgtagtatctcgcggttcaaacagacatgcagttcagcaaataaaacttgggagtaccacctttgtggtaactggtaagagtcaaacaaacgacttgctcttcaactatcgatcgcctgcaggcaagcaggcctcacggacacggaggctgctgcggatcagggcaaggagtgatacaagttggcaggtagacacgcagaggacggaccacctcttctgctgggacgttgtccatccaactttagtatcaccgatgcccatgaccacttcgattgcgcaattctagctatggctcaacaggatcatcgcttgttcaattaatgatgatccattatatatgttcaatcctgatgcatgcatgttacagtcaggctgctcaagcagattgtttgtttgcagcagtatctatgcaatttgcgtattttagtgagttgagtattgcctcttaagtggtctccttctcctcttgtaaaggtggcttgagctgagcaacaacaactcatcaacatcatgaatgtctgcttcagggtcccccctcctagccatccaaacagaatagataaataccggtcaatccccctgggcaacacaaaacaacccatttgatgttcctcaacagcttctgtacaaatcaagagatcaatcaatcaagcagcatctcaccaacacaacaaacatatgcctggtgaacaaacacatataacacagctttgttaaacatgcacgcaaacattgcagctcacaacaaggtgtagtaagacatcccagaaatattcttcatcgtatatgtagaaccatcagcgacacaagatccaactccataccattaaattgacagaaacaagtccactaggcttgccaacatttagatttaggtaccaccggcaacatcaacacatttcataaaccaaacctaatgatagaacaggtcttgcacaaaagcatcagttgaaccttcccctgtacataagtaataaccagctccaaatcttttcaatagctttccaggataagatgaacctactgctaccgctgcatcaaaaatctatgtccacagcccgagagccaatcaaagtctaagtagtcaatcctcgtcgacgacatccaccagctcatactcgaccagcgacacgttgttgtcttccttaacttgaaagctggcagggtccgtcacctcgatccggccccatttgtcaactgccagcctcatggtccccttgaacatgtcaatcttggcattgcggaagatgaccgtggtgcctggcttcaccaagtcaactgttgacacgaaaaaaggatagggcttacttagatggatgagacacacaccacagcttttgaacaaaaaagcgaagtgattataatgatagtaagtgactagcacatatccatcatcgaccaagatcaattaacgggcataatatagaaaagtaaacatacaccattattatgtaatgaagtgaataggaacgtgaggcagtgtttcagatcagaaagcaataagaaacacatatcactttgcatcaatgtggtatagaaataataagatgagacaccagaaatatttgtctccttcattgcctagggacacacgcggtatatgtgttgcatcaagcgcaatttaagttacattagaaaaaaactgtgatccttgagcagtggcggagcatgggtctccacaatggtggttcagacttagtatatggcaaaccaataaagccaaaggcacattgaaacaagtcaatgaatggaatgattcaattggcatacaaaagttaaatggttttttttttctggcataagcttcttgtttcagtatataagggtatataatgggtgttgtgccgccaatttgcttgagcaaaggatacatgagaggttgcagttgaatactgtaatgaataaggaagtaggaggggagaggagaggaccttgttggttgcgggcggtgaaaaggacggtgccggtgttgtccccgacgaggcactcagcgagacgagcgcggggaggagggttgtcgaggatgatgcgggcggaaaggacgcgggcggtgagggtgtggccgtggctctggggccgcagccgctccacggtggtgaacaccggtttacgcagttgctgcggcggccgtgcgggagcgggagcggatggcgaggggttgggtgcgcgggggcgcggcacgtaggagggagcggcgccgccgcgacggccgtaggggcgaccggtggaagacatggccggcaatctctccgaatcttcttcttgttggattggaatcggaaagccgcagccgccgccgccgccgccgccgcctaaaccctagcagcacagcacagcagagcagagcagctagtattcccagagtatgatttatgaagaagaggatcggatcggatcggcgacgcaacgcaacgcaaccgaagaggcctacgatggtgggcctgggcctttcgttcctcatggcatgggatgggccttactcctactactggaccggacagagttttgatgggcctaaatataatccacatgtacggtactagagagaccgttcgaatttgagagcctttctttgtctaaaaaatttaaaaagaaaacagaaaagataaggaataaactccaatttaactccctcaactattggctggcatagcctccaaccataacatgggatatattaacccccaactcctaaaaccgatgtaaaagactcactgaacggttttcgctgacgtgtcttctactctttatctagtccaatttgaagatcatatgttagcgcctctttctcttttctactttctttgtgctaaaatattacaacatccatcctagtacaacgaatgatagtctagattcgttgtcttagaataagtcaaatcctattataaattataatattttgggacggatgaagtaccccatgaacacgtacgtactgcgccaataatgcagaacctgagcggcgtgtaggtgggtgcatgtcagtgttatccgctagctactactccacaacatagtaaaaaaaccggatcgggggttgacctgctctggctgcggttcaccgatcgaaccatcggttatttatttatttattattatattatatttctactatttttaatatagaaccatcacaaatcggtgaaaatatgtactccgaccacatcctttctcttctttcaaagtggactactactactcctttctccgtcctaaaatataaagcatttctaaggttgacacgagtatactaagaaagtatgtgaggatgattaaataaagcgtgtaattggttgagaagagaaactaggtgaaagagaatgcttgtgattggttaagagaaggatgtaggtagagaaataacctcattttaaaacaaggtattgtactgttatattttgggacggaggtagtacctgagtttatccgacttcactggactggacaggggtatggacagtgcaacctatttgattgagattgatgtggtcgtgttgcgttgttcacaaatcacacaaatcattgagattgattggacggagcaacgagctaaacgtgccttcttcgttagtggtcaactatttgattcgattccatatattcggattcattcaacaatcgtcatggatgcatgcctttcttatataaaaaggtcactggtttggacaagtggagggagcatatcaggccctgtaatatcaaaaccagcggcgctaggagctgttcccacccacgaatccacgatctttccgactgcagtctactcctctccataaaaaaaaaaactgggattccgtgtttaacggttgactgctcatcttatataaaattttcttataattagtatttttattattgttagatgataaaacatgattaatattttacgcgtgtcttgtctttttaacttttttcataattttttcaaataagacaaactgtcaaacgttagacacggaaatccaggtttttttttgacagagggagtgcttcacaagttgatatgaagtggagttgtggagttggctccaccctttaattcattatgtgataacactctaaccaattttataccgttcatatgtagagttgaaacttactccaacttcaagaaaggtcaagctgcagctaaaactatgccaaacggccccctaagcatatcgactccaccattttctcttcagcttaagctaaaattttaatttcaaaacttaattttatatcctttttaaaaaaacatagtataaacttatacggtcttataaatatacacaccacactttacctatatcaacatctttgaaaga

SEQ ID NO: 25250 - DNA, 21839 bp, Oryza sativa
  unsure (1)..(21839): unsure at all n locations
tagttttagagtgggctttgatattttattcatgctaatttatcttttaatattggatttaaatcactaaaaaattatataaaatttttatccataaattatcttctagttactaataagcattataactttcaatcatatgtatacgaaataatatgactgatacgacaagggaacgggtaatataagtactactccctcgtctctagagttctccaggaagactaaggctatgttcggcaccccttattcccaacctctctccctggttttccacacgcacgctttttaaactactaaacggtgtgtttttgtatatatatatatatatatatatatatatatatatatatatatatatatatatatatataggaaagttacataaaaaatcgtattaatccatttttcaagttaattttagctaatacttaattaattatgcgataataagctgttccgttttctatgtcgatgggatagactcccaactggcacaaacgagcgcaacctaaggagagatgcgagttaagttagaaataattattatttgttaagatgaaaagctaaggggagaagttaaatgagacataattatgatgaaaaaaaccatagattgagatttgacactacatagaaaaaaccaatctaaatgaagatttgatatcacatagataatagaggtatattttatgacggagaaagcgactgctcgtatttgctacgcacagataaatccgtaagcgcatggataccgttgtatagcactttcccttagagcattccaagggtattaaatgcaagaaatgagtgtgtatatctacaaacaggattctacaaactacaacaatttgatgataagattggctagagataatttctatagattcaactagttatcttaagttaaaggtaaaattctatcgaatgcttcgagcattggccctctcttagtttgtcaaggtgaatcttgccttgagctctataatgcacctgaacatggagggatgcaaaggatgaacaaggttgtcaccacctaccgcctatctcactttcagttaagcgcacaacaaataaggtaactgctaacctacacaccacttattgactactaccctagtctcgcgtaggaacttccttttttatcgagagtcttagcactactatatcactttattataagctaagcgacaaacccgcaccgatgagaatatatctcactcaagtaaactaattaaacaatataagaaatctcgaacacttatttataaagcaagcatccgctgaggtacaagcaaaaagaaggctgacagctctggcgcttcttcggaactccaatggaagaatgctgacaaacctgacactcctccggaagttctcggagagaactctcatactttagggcactccttctggaactcccctcattcactcaataatccaacatactaagcaaaacctaaaagtgagttgtactctactttgtgtgttgagctcatcattttatagcttccgtatgatggttggaatgttcgttgttggcggttcacccgaaccaagagttcggttgatccctgggcctcacccctctccaccaactttcttcagcggcttacaggtgggcccttatggcagttgaggattgtttggtcccactttaggtctttttgactgtcaggtgcatcatccaatccgtgtacttgcgtatgattggccggaggtttcttttgtcgcatgacaggtgtattttcatccataaataacctgcatacatatatttaccaaatttagtggaaatggttagttgttagcccctatcactaagttttgatataactttttatattctttttgcaggagttgatagttaaagtttgcacttaatgaccatcaacaacaactattgtagatctattggagacaaaaggaaaaaaaagtattactccctccaattccataattcttgatgttttagatgagattgatatcaaacttttataattttaactatcaatagtttaaaaaatatttaatttaaagacactagaacaacttatatagacttgtcttacaaagtatcataacaaaaggaaaaatatatgtatttattagatatattataattaaaaaatatagtaaaaatatattttgaagtcaatgccattattcaaagggtaaattggaaccatgccattataattttgcaaagtttgagatatgacatcgatatctcaataacatatatggcccacatgagtcaatggcatgtaggtcaggatgacatatctcaaattttacaaaacgagtagtagattttgtagtatgttgaatgatgtatacgggcgccgtccagttagttgcacttaattgtcaattaagctggggttgggagggatgtataccttaatcattggacttaattgtgaatgttgcctttgatggtaggccgaaccatcgatagctacgagtttggtcgctggtaatgtaggagtagtttgtttgttcggctcgatcgatcggcgcgctgtttactcatactctctcttctttgtttcgaaatgtttgactttattaactttttagcacatatttaaccgtttgtcttatttaaaaaatttaagtaattattaattctttttctatcatttgattcattgttaaatatatttttatgtaggcatataattttacatatttcataaaagtttttaataagacgaacggtcaaatatgtgctaaaaagtcaatggtgttaaacatttcgaaacgaagggaatatatcataataacgaataaagcccttgtgttcaagtatataatctaaatatatgcagccaggtgatgaagcaatcagcaggaataaattaaggatattctcgatggagccaaagatggaaaagatagaaaatatactccgatatatctagatcgaaagtaatcaatcaatatatacagtcaatggagtcgagtggtagctgtgtattgttaattgcctgcctgccttggttttaacgatattacctcccataataggtgatgttttgactttttatttacaacgtttgaccattcgttttatttgaaaaattaatataaatttaaaaaaaagtcatatgtaaagtacttttgattataaagcaaatgaccaaataaataaataataattccaaattttttgaataagacgaatgatcaaacatcgacaaacaaaaactcaaaaaaacaagtaatatgagacggaggtagaactaaatagagtattatatatctgcgccgtgcgggtggtttattcttctataagactgtgtgtttgatggtggggttggaaacccatctcttatacacgaaaaacggaacggtttagtagtacataattaattaattattaattatttttttaaaaagatcattatgattttttaaacaactttcgtatatattttttttaaaagaaaacggacagtttatcagttttaaacatactatatacgcacgcagtatgtacgcacttgtgaatactgtagtaatatatcatggtatttgtcgacggtggacagccgtaaaccggatataaaggtattggggtacgttggtaccaagatctacgtagtacgacttcaaggaaacatgaaacaaagattatactggttcaggccccttaataggtaatagttctaatccagttggtatgggattatatggtgagaaccacaaattacaaaggaaataatagaactcgatgataccgacgagatcgtagtcgagttggttcgactagatcacccggcgacttggctcttgtagactctggcttcgtaggctgtagttattgtcttggctatgagattctatgccttaggtcctcacgggggtcccttttatatcacaggtcaggtggtcttcaagtaggactcggagatatcggaccctgcacgatacaatgacaacctagtcctatacgggtaggaactcttccactggtgaacttcgtgatgaatttccttagcgtatacagagaacgtccgtacacgcgcagatgtaccatatgtaccatatgtcgtacagcgtacatccaagggtagagggtataccttatccgtaaccctaacagtattgataatcagtagccctgataattaagataagataggactggactaattaatcactactgctagctgggtaggtactgtatttgcaagagcaaaataatacagcatgcagttattttgtgtacagtaataaaaagaagagaaataattgagtagagcagtagtatgcaggtagtaggttggtaggtggcgtggatgaaccgtatactcctagaaataattgagcacgtttgtctacacaaacgcaacgcaagagactagggaagcaaagtacttgatgcatacgatctcaactcgactagtatgtatcatgtatgtacgtacgtatgtactgtattcattagggtgggactgtatactatagttattattactagtattgttgacaaaaacaattcctaagttttgttctaagaagaagagcaacaaacgtaagtctataggagtactagatctttgcatatagtacccaataaatagagggagagagagtgcgggccaaactcccaactcccaagttgcaatcgagaataaataaaaatcccaatcccctccttctcttcttcttcctccctgttcccttttcgattcgattggattggattgttttgctggctcgctctctctctctctctcgtggtgtggtgtggacaagaaaggaaggaaagatggagggcggcgtagggggggaggtggaccacctcgccggcgagagggccaccgcgcagttcgacgttgaacacatgaaggttgcctgggctggctcccgccacgccgtcgatgtcgccgaccgcatggcgcgcctcgtcgcttccgaccccgtaacaataactttctccctctttctttctttctttgcacagatagatagatagattatcaacttcggctccccggatctctgattaaattacctgtatgatgctcttcttctcttcccccaatccttctttccttgttcttcaacaaccacaccacgccggcccgattttaccccacgataataatttcatatattatttttagtttactagcagcagccagcaggagtatttagttgatactgtttcgctgacttgtttgctaccctaattattattattaaggagtattttttttgctagatgcgatgcgatgcgatgcttattccactgctcctgctctttcttccacacatatctcctcttttactattattagtattgtcactagtaatattatttatattctgctatagtgattttctcctcagatcagatctaccaaaaccttgtacccacacaaatatcttctactctcttttttttctgatactaaacattataatatagctagctgcgctacaagatcgatagaaatttctcagcaccatacattatgaatcatctccatatatgatgtatcagtaataacagtaacaatgtaccaattgctacgtgtttttctgtagcctcctctttgctaacaaatgctaaaatgctataaacaaaacaatccattacgctcacaatggtttccttacatttttgactcctttccaatctaggtgttccgcaaggataacaggactatgctccccaggaaggagctgttcaaggacacactcagaaaggcagcccatgcgtggaagcgtatcgtcgagctccgtcttacaggtcaggtcccaatcccgtgatgcttcttcttcttttattaacaactgatcttcctactcttaactcatgtaatggtgttgttgtccattaacagaagaggaggcaaatttgctaaggctatacgtggaccagcctggttatgttgatctgcactgggtactaatatcgaccatattatcttcactatctactccaatatacagcactgaagctgctcaattttatccacaagctcgattaattaatagggaacaatactttgtgcaaaattttattttgcagggcatgtttgttcctgctataaaaggccaagggactgaagagcagcagaagaagtggctacctctggcctacaggttccaaataattggatgctatgctcagactgaacttggtcatggttccaatgttcagggccttgaaacaaccgccacatttgacccaaagactgatgagtttgttatacacagcccgacactgacctctagcaaggtaatactcctatctactcttcctctcttatctattaagatgctacatttcttctttaatttggaatttcttcaatatcttgttgcatggttcatgattttatccccatgtgcagtggtggcctggtggcttgggaaaagcttccactcatgcagttgtgtatgctcgtctgataactgaaggaaaggactacggcatacatggtagagtctcttgtattttgaaggtgacttttaagcagtatctttctttttgcgactcatgactatctatatatcaggtttcattgtgcaactacgaagcctagaggaccactctccccttcccggtgttactcttggtgatatcggcggaaaatttggtagtggtgcatacaacagtatggataatggagttctgcgatttgaccatgtgcgcatcccaagggatcaaatgttgatgaggtttgtccattgggttatcatgttttgttcgggcacttgtcaaatacattctgataccttgatgtaaccattctcaagcacacccatgctactcgtgtaggctttcacaagttacgaaagagggaaaatatgtgcactcagatgtcccaaaacagctgctttatgggacaatggtttttgttcgtcaaacaattgttgcagatgcttctaaggctttatcacgtgctacttgcattgctgtaagatacagcgctattcgaaagcagtttggccctcaaactggtggccctgagactcaggtactatgtcagatttgaatttttttttgtattaccacttattaatttgtttttatgctcttgaaacatttcctgtgacatgtattccttttgcttttactggaaaaaccattgtctgagttaatatttgtactttgttcatctaaaagaattaaattgataaacgagtttaactttttgctaccaatgacaagtggctaatggtctataatggttacaggtcctcaattacaagactcagcaaagcagactctttcctttgctggcttcagcttatgcatttaggtttgtgggtgagtggctgaagtggctgtacacggatgtcacacataaactggaagccaaggatttctcaacacttcaagaggcccatgcctgtactgctgggttgaaggctgtgacaacatctgcgacagctgtgtgtacaattatttaattcagtaccacttttaatggttatacttgctgactggtcatactaagcctgcaaattcatacttttgctttatcagtacacatccttaaaatgaataatggtcagatcgcatcaatgagtttacacgcatagctggtccaacagtctagccagtttatataacgagtgaattacacaattttcattgttctcaaacctgtttttttttaatgcaggatggaattgaagaatgccgaaaactctgtggtggacatggttacctgaacagcagcgggcttcctgaattgtttgctatctatgttcctgcttgcacttatgaaggagacaatgttgttttgctattgcaggttagtatgctattgttgttttgttctgtggatactaataactctcctacctgcttgtggttgtgtggatggcctagcttgttgggccgaatcataggtccagtccttcaagtttcctcagttttggtcaatttacagtcataacctttggtgctctctgcaggttgcaaggtttctaatgaagactgtatcccagttagcttctggaaaacagcctgttggtacaacggcttacatgggcaacatacagtacttgatgcaatgcaaatgtggtgtaaatacaggtatatagttgtatcttctggcaggctcctgttttagacagctgtatgccagtcatcactgtacgttatgtatatatatgcccattgctgggaagccattgatgttgagatgaatgccatagtgattcatttttccatgattatcgacagctgaagattggctaaatcctgctgccatacgagaggtatttgaagctcgggctctcaggatggcggtgaattgtgcccagaacataaacaaggcgccaagccaagaagaaggttggtattgcgccatatgattattaatcgagaataaaatatagaacagaaaccatagtgcatttgcatgtagtttcgtattaatttccgtggtctattataagaaattgcatagatgatgatggtgtgcgttgctgaatatgcagggttttatgagctatcccctgatctgcttgaggtggcggtggcccatatccagttgataattgtaaccaagtgagtattgcctaggatgaaagaaatctgaagtatggcttcatttatattttattggcatttatttatttcggtgtgttatggtacgtataatggttaggttcatagagaaattagagcaggacatccctggtgagggagtgaaggagcaactgtgcatcctttgcaatgtgtacgcgctgtatcttgttcacaagcatctgggtgacttcctgtcgacggggagcatcacagcaaggcagggagcgctggcaaacgagcagctgggaaagctgtatgcgcaggtatggtgtcctccgtcgatgtcaatgtcaaaagtggatgagaaactgagaaatgagacaaatgcaaatgcaggtgcggccgaacgcggtggcgctggtggacgcgttcaactacaccgaccactacctggggtcggtgctggggcgctacgacggcaatgtttacccggcgctgtacgaggaggcgtggaaggaccccctcaacgacacggatgtgccggacggttaccaggagcacctccgccctctgctcaagcagcagctcaagctctccaggctatgatcatccatccatcatcctccctttcttgctctatcaatcatatcatactgcatacgatttgagtagtagtaaaataacaccagcatatgcaaggtgctggctggctgctagtattttctttttctttataatttatttatttggggagagctggtattgtcttatttatttgggaagagctggtattgtatgtctggtgatttggtatagctgtaactgtgaacttcaccacatctcccccttctcaagggcatatgcattctactcctatggctgtgtttagttccttccaaagttgaaaatttgggttgaaattggtacgatgtgactgaaaagttatgtgtgtatgataggttgatgcgatggaaaaagttggaagtttggatctaaacacagcttatatgtatattgtgagattgtccgtgcggcgcttctagtgtgaaatatcctcccttgtcgagcatattaacattgcatgtactgagatacctcagtgtccctgaatgctgacacaacttgaacccaacgttcgtgctgcgatgattcagaaaaaaacacaaaagcacatactcctaaggttgtacagaacttatatagaatccaatgtcaggttcatcctacattcatataggcaagttatattactagtacattcagtcaaaaaaatattactagtacatgatgaacaattccaaccgattatttgtttattgacgtctttgattattttggtatttcaacttctgtatatgtttgtgcaaattcacacaattaatacacttatgattgttctgaaattttaatcactgcaacgcggtgaattagactgtagggcaactgttcttttcggcgacttggtcagattattacgtggaatactttccacttgctctacgcctttgaaaatacgttcgttctctcaaaacacctttttttttctaccacgatgtttagactaacccatttcacattgatctacatatatatgtttcgtggactatgtgcctataaattcatatggatgttagtgaatctaaatgaacaatggagatgtctagcaacgtgaaacggatagagtattttgttaagtttattttttaaagtagtagtacttaatttatccctatacaatcgagtagataaatccgtgttttcaaatgggaagacaaaaaaaatgttttcggcaccattttcaaggcatgtattccatgtttttttagaaaggggaaaactcaaattattagggcaatataaaaacttaaaatacataaaagatactagcgtttttcattctctattgaaaccttggggcaaaatagaattttgttattaaaaccttggagcaaaatactaagatagtccaataagaaaagctttaaaataaataaatgaatgaatataatcatcatcatcatcttcccgcttatcctgtcgtggattggagtccgtccaggtccaggtccagtgtagtcgtagccatggcgggtttggctccccctcccctcctcctcctccccctctcctcctcactctctcctgccgccgcctcccaccacccaacctcccccccttctcgcacacgccgacgacgccgcctgctatccgccgtggcgtctgccgacggtgatgctccctccccagtctctgtctccgcctccgccgccaccaaggggccttcctcctcctccgtgctcaccttccagcaggccatccagcgcctccaggactactgggcctcagtggggtgtgccgtcatgcagtgcagcaatacagaggttggagcagggaccatgaatcccttgacattcctcagggttttaggccccgagccatggaacgttgcgtaagtagaagacttcccttccttgtattctggactactcctccatttctcactgtattattcttctagttatgtggagccaagtataagacccgacgacagccgctatggggacaatcctaataggcttcagcgtcatactcaatttcaggtaaatgtttctaccataccatatccatcctatatatttagctcattgctgctgccttcctccgttatttaatctttcttttccgataggtaattttgaagcctgaccctggaaattcacaagacctctttctgcacagcctttcagcactaggtatttcactactgctttctcttttttttcatcataaaatgcacgccgatattcttctgtttctaccttctcatttatttatttcctttcctaatacattgttgtgaatacaaaatgttgtatataaatgtttgcatcacaggtatcaatgtccgtgaacatgacatccgttttgttgaagacaactgggagagtccagtgaagttcctcctcttttactctttccttcttaaaatatcaaccaatgcaatcattgaaccaaagtgtatctggttacaaaaagccggatcgttatttcaatataatgatctttcctttaaaaaagtctatctggttaagtcatcataattgcaactgaatatctctaattcattaccttgttcatgtttcttcccattgatggacaggttcttggtgcgtggggattaggctgggaggtttggatggatggcatggaaataacacagttcacatattttcagcaggtacaggcgttagctaaaacaattcacatatttttagtgcattatgttgactgctttggcatcacagtatttttttgacacttgatgtgtgtattatccccttctaatccttggaaaattttaagacagtttttcttaatgctaattactgtagtcaggaagccttccattgctgcctgtttctgttgagataacatatggacttgaacgcatcctcatgtctcttcaggtgagcctagtagtgttgttatctaccttagtagttttttatgagttagaagatgagcaaacgattaacaaactacctattgattttgttgattgtgtatattgcaccctttatgttcagagtctcgtataaatcttagtggactttcttttgcgaatattttctaccctactggatcatataccctttgaaagagctgaccttactttgatttagatgttttgacagggtgtagatcatttcaagaatatacaatacactaaaggaattacatatggagaactattccttgagaatgagtatgtatcttcttgaaagttctaggagctttgtgtaccttttcttcttctttagcatcttgcctgcaatgtgccatttctttcccatcctctttttactacattaagtagaacaatttcgtgatatatttctgttgtcttttattgattataaataattatatgcttaggctcaatactatatatctggtttgttgattcaggaaagagatgagtgcatattatttggagcatgcaaatgttgataacattcaaaagcattttgatgattttgaagaagaggctcgctctttattatcactttggcttcctattcctgcgtatgtttgattgatgcactcatttcttggctttcatgttttatttgttaagaattgacaagctgaccttcgattggcaatggattaggtacgatcatgttctgaaggcctctcatgcttttaatattttagattctagaggctttgttggtgtaaccgagcgtgcaagatattttggtcgcatgcggaggtgtggacctacataccttgatttttttccctatgccttttctcatcatggaatcctggttttgttgacttgatttatttatttaccagttattagctttacttttttcagttgttcttgtttctagcttctacgtaaagttaagatgtaattctcatactgtcgatgctcttgagcagtcttgctcgccagtgtgctcagctttgggtgaaaacaagagagaacctcggttatcctttgggcacttatcaagagtctaatcttatctatcctcatgtctctgaaaagcctagtagaaaggtatttcatttacatgaccatgtactattacttgtgttattttaatatttgaacccaatgggtgtggatggcttatgtcataacttctgcaaaagcacacccatttttacttatctttggtgctttttgtttagggagttgtcggacagccacgagcatttgttcttgaaataggaacagaagagttgccacctcatgatgtgatagaagcaaccaaacaggtaaaccaaacttcctccttcacccttataagatgagaagaattttgaacctaacattggcaaaatgatgtcaccttttggtcatatttgtttttttatggaatttatacttcaattctaggtggaatgacttttgcttttttcacctttgaatctttgacatcctccagctggagaaatctttaattcaaatattggagaaacgaagactgagccatgggaaagtacgctcttatgggacaccaaggagattagcggtatcagtttaacctttgttgtctcacatgagttttttttttcctagcgaagtctcacatttgtttctatactatcgcaagcttcctcatatattcttgccagttatgcatctcttgtgtctaggtgtgtgtttggaaaagctggccagtcctaacattccggaggcctggtgcagaacaacaaactgtaataatagtctaccaagtgcaaaacacatgatggagagatatctaatattaatcagtaggttccctataggtttgttagtaggaatggtagataaaactgtctgaaaatacaaaaaagaaatcacataatgatgcaccatatttaattgaagatatatcttggtaatgcgtcttttatgcttggtaactgacaattcttttaacatgctttactctggtctgaatctataagaagaccttctttgatttgtaggttgttgttgaaaatcttaatatgaagcaaatggaggaagagattgaactacgtggtccacctgttgcaaaggcatttgaccaagaaggaagacccactaaggttagctatccaaaaaggagctggactttcctctgctcttctgctattgcttatttttagggctttccatatcacttatgaagaaaatggtaaggtacttcaagtatgcagaaagtcatgctgaaagtaacatctattccattaaattacaaaaactgcacactgtttattatttttctccgttcttattaatgctgttgaagggcttttgtttctttgattttcttccttctattctcatgacaggctcttgatatttttttgtggaataattttctactcttattcaggctgctgaaggattttgtcgaaagaataatgtcctgatagatagtctatatagaagaactgatggtacgcgacatggttccctagaatttgtattgcccacttccatctcaatgtgttttgtcatcactgctacagtgcgtgttggttactcaatggtgatctgataccatctccatttcttgttacaatttgttgttcgaatcattatgtggagtcccatgtagaaacgaatccacccttataattaatgatatgaaggtctcccattgttctacagtcccatgtagattggccttccttgggtcaatctcctttgcttgctgcaccagtcgtgtgcagcttgttcctgtcacatgtgcatatgctgcactggcctctcttgcatatcttattctggtatttgatttaattagctagatatggaagatatactcatatgcatgggtgatggcctatatatgtaggcggtatgttcaatcgatactggcatgattaaaaacatgtgttaagaaacgacctatggtgggcgggccctcgtgtacgggttaggggcctcaaagcacgggttaaggcccgaacgatggggggcaggtctgcgtgtcaaggggccagggtttgtggcatttcttgaccggcttttgctgaggtttcttcttagcgcaatgccgtgggggtggtctttcccccgtcagtcgagttctttcttttttttaattatttatgctgtcaataagattcaattctcaattgcttatgctgcataaaccaactgacagctaaatactgggttttattttggttatattaatccgaaccaccgctacagaacataggccaaatgaaatcatgttagttgttagcctgttacagccaatttatcatttactagatgtctaacatatgttcttattgtttcataaagaggtctaaattgtgaatacacattttcaggtaaaacagaatatatctacgctcgggtcaaagagtctgcacgttttgctgatgaggttttttttcctttcctttatgtactcttgaaagccattgcatcagacaattgctggaagcaggacctttgctattgcttgatgacttcatgaactgcattttcaaaatacaaaaggtgtcccttttaagttactggggttcagggaatagactttttgctcgacaaatcaacccagtcgcattatgtttagtactagctctttgagccagatggacagtcatcaagattaagcatacttactccataacatactattcaattcaagctccacaactcataataggcatgcttctaatgcttgaaaggacgatatcttctaattggatactgataggtgatgattaggcaccatttagatagatcttgcactcaacaccccaagacatccagtacctagcaagtatcaactaaatgcattctgcataactgcatagttatatattcgtagtttctttactgctaaaattgtgcaagtttcttatgttatttaggcctcactttcattttttctagacttgttcaatagttgtagcatgtgaattgcaggtactaactgaagatctaccgactattatatctggtatttcatttcccaagtctatgcgctggaactccaatgtaagtgttatttaactcatcttctttacagatggtaattcaaatgtttactttgcagctgcttgaactccatgttatcattattgtgctttgagggatcatagccatctataaatgctctaatgccatagcagacagttaaaccggttgattacttgattatgtgttagtgtctctatttctgcaaatagaagcaaaatccgatcatctgtttgctgtttttagcatcattttatcactggagatgtctgttttattccaactgagggtgaatcacttgcagattgtgtttagcaggccaatacgctggatctttgcccttcatggggatctcattgtgccattttgctttgctggcatatcaaggtaatattttactacataataggtaatgcacttcagtttctgtttacataatgatacgcaaaacttcccggaggaagaaaaattctagattgcactcgagccaatttctgggcttctcttttaagatcttgggaaactagaataattgacttatcacaactacagtgatactatccattgccataatgtgtacaatattttgtagaaatgaaaacattacttgctataacaattttttttagcttaacatgtccacttatttatagtcatttccttgagaaatattgtttctcacagttataattattaacatgagttgcaatggcacagtgggaatcagtcgtgtggccttcgtaactcctccttggctaactttaggtaccaaatgtgttgtggtagctagctggttctgcgcaaccacaacaaaatggactttcttgcattattgttttcattatcttcatgttcttcgggccagattgatatccactatataaaaaaatcttcaatttcttcattctgattttcttatctaagagtattgctgcataaattgaaaaattgaaagtattttgcatcaagcagttcggaaaggcctttgatccagattaactcaaacatccagtaggaagatgctaggacatatttgtttctatctattcttatatcctgtctnatctagggaatagtctgaacattctccaaattcaggtgaaagctgcagaattatatttacacaccctggagaaagctgggatcctgattgatatgcaggtgagatgggcacacataatcttttcatgtgctatgtcatgttttgacttttcataggcttcgtagctgtaagctccatttcatgtactatttattccacacaagaatattggtgccaactcttatagcctgcatgaaacagggaaaatgctgcatgagtccattaatggtttttagttgctcagtattccaggtcctactgtaccttatgatgtatatgataccccactgcaggagcgcaaacaacgaatcttgcatgactctagtatattggctgagggtgttggcggtgatatcattgcacctgatagcttggtgcaggaggttgatgctcttctgctcctcagttaacttttcttgtacatacgtttttcttgatgaaattcaacttatttcaagatatattttaaaccatacgatgcaggttatcaatcttgtggaggcgccgatgcccattattggtcgatacgatgtttccttcttagcacttccaaaggatgtattaataacggtatatgcacagcttttgattggtgatgtgtagaagccatactaaattctgttaatttttttgattcagacaccaaaatgacaagtccattaacatagttcatttgttggaagttaaatttattaactgagagaacatctcatattatgtatgtttatgcaggttatgcagaaacaccagaaatatttccctgtaacctccaagaccatgggcaatctgctaccatgtttcataactgtgagatgatttttcccgttgtgtatttgtcttcttcgtcttcttgttcctttttaatttagtgtttgctgttaggttgccaatggtgccattaaggaagaagtagtccgcaaagggaatgaagctgtactcaggttatgaatgttttagcaatgctactgtgtaaaatttatagctggagctttgactggaagacataattctagataatggatagaagtagccatagtttgattaccagcattatgtttgcatcgtcttttcttccctctgcctttttttttattccgcaagagagctgtagtcaactgtagattttttttttgcgaggaaccgtagattctgaattggtatataaatacagggcacggtatgaggatgctaaattcttttataagatggatacgcagaagaaactttctgaattccgagatcagctcagcagcattctctttcatgtaagtacggtgtaccaaaattctcttagtttcttgtatatgtttacgtacataacatctgcatcatgttgaacaggaaagacttggtaccatgcttgacaaaatgaaacgtgttgagaacactgttgcagaagtggccctccttctcggaattaatgagaaaatgatcccagcaatcaaagatgcagctgcattggctatgtcagatcttgccactaatattgttactgaatttacttcacttgctggaattatggcacggcattatgctttgagagatggcctttcagaacaggtttctgactttgttttgtggtgaaaattttgttgttaaacttcagtgtgaaagttgtggccatttgtgcacatttggttgagtagttttcatgtcagattgcagaagccctatttgagataacacttccaaggttctctggtgatgtgttcccaaaaacagatcctggcatagtccttgcagtcactgacaggtatttcttgcatacgtagctttcatgttcaatttataatagtctgcaccttaaaatacaggctgggaattcaaagagccatatttttaggattctgtgccactgtattatttctgtacagttggtatagaggagagctgctccgatttctgttctcttggactggggattacagtgggtgggcagaacagtagggactatgcagctatttagttagttcacatagttgaaagtacaacttcttaccagctttatttaccagcaatgccaggataaaacaaacaaaatggtattgcaatgcaaacacattgtggaaactgagagcttcccagatttatgattgcttttgttttttccatgtgaaccacacaaattgtagatgctttaatatttttcttatttgtaattcagattggatagtctagtgggtctgtttggagctggatgccaaccaagttctacaaatgatccatttgggctaaggagaatttcctatggattggtaagtgaagttgagaatctacaaacaccatcatattatgaaatattcttataatatttttcatctaggttcaaatattggttgagaacaagaagaactttgacctcacgaaggccttgaccttagtggcagaggagcagccaataacaatagatagtggtgttatagatgaggtgagcacaaatatcaaataatcctgatgttaatctttgttgattatatggtttgtgtcaactctaattaatttctcaggtagtacaatttgtcacgcggagattggagcaacttttggtacgtatttccttgaacagtaataatagtctgagttacatataatgcttttattccccaagactccatccttttggaatctaccaaggattagagtagaagcttacctacactggaagagcaagtatcttttcccgtacagactggttttagtgacgttttctccctcgtacacaagaaattccgaagataaatatgcatactatcattgcttcatgtttatccatgtagcttattcagcatagtaccgagcatggattttgttgccatctctgcttctgttttcacttctgatcctttttttttatcaaatacaagtcaacaattgtcagtgaaatccatttcctgtaactgatggtttttcgtcaatttatcaggtggatgaaggaattaattgcgagatagtccgttcagtgcttatagagcgtgcaaactgcccttatctagcatcacaaacagcaattgaagtaagattcttcaattcttctgaatcctctgtatgttggatatggttttcaaatattacgtatttataatcaggaacgatatactatggttgtacagtgttaaattatatctgcttggtactttgctgaatgaatggaagtatgatttgtttttttttaatggtcttgatgtgtggaccttgcagatggaagcattttcaagaactgaagatttcccaaaaattgtcgaagcgtactcaaggcccgcgagaataatacgtggaaaagaaattgggtctgctttagaggtaacggctgctttgtacaaagaataaacaagtaccatgatgatatatctttcagattctgattacagctttgaattatgaactaagcttttggacagtagtatgtaccgctaaccagtaaccaagcctattgcaagcagagtttgattgttccttgccgcaatgttaatctttcctcgctgtgaatttatatgcaggttgatgcaagtgtatttgagaaagacgaagaaagagctttgtggagtgcctacttggaggttgcggataagattcatcctggtacacaatcttatccaaagtgaaaaataatccgagatccactgtttcttctgttgatccttttttctctcgtgtgaaatatatgtgctttgcatcgtctattctttcgggcgtgctgtatattctgtttacttgtatccacattccaccctgtaggtgttgacataaaagcctttgcggacgcttctctggaactgctgcaacccctagaagatttctttacaaatgtttttgtcatggcggtgagcttaattttcgagtactaagcatctacttagccatttattactaaatgatttagactttggtaatggtgtatgctttgctatgtggttggtgatacaggaagacgagagagttcgtaacaatcggcttgcactgctaacgaaggttgcgagtctgccaaagggaattgccgacctgtcagttttaccagggttttagccattttttgttgctcttctagttttatctgtaccatgcttgtacattcataccgactacagttttgcagccaagaaaagagcgtgatccctatatatataatgtataggtagctagcataaattgtcctcaactttgttgtccattgctatgttaaacatatgtttttgttttcaaaccattttggaaatcaaatgccataacttgtatcagactatataccaactcaagcggtatcttgcataaattccattctattccctttccctttgttgtttcatccagatcgtttccaggcttttcagttcttccaatttctgaagtacccacgaccaaagagaattaaacaatgagataatttggttctgatgaactggcgattagagttgttcgaagcacaatcatccttataaattacttctactacaatgtacatcaggagaagaattgattaacagctatatgccgctctagaaaaaaaagaaaagaaaagaagacgaagcaagtagctaccatcagatcagtaaatacactcaattttgtcgagatacaacacaagtctccgaaaactgccaatcaattacctccacttaagaggtgtatgcaatacatctgtgcattgtaacatactgatataaaaacaagatatcctatatcttctcttctcttctcttctcttctcaccctagagagatccactacacctcaacgat

SEQ ID NO: 25251 - DNA, 3516 bp, Oryza sativa
tggtgacatttctagtctaatgttgggaatgaaaagattttattttgttctcaaattttaatcatgcaatggtttaagttgatcatcacctaaattaaaacggaaatttttggctctcgaaatttggagaagttaacctctaactattttgacaagaaattttaagtcctaaaatttcgggtatgttacagtctatcccccttaaaataaatctcgtccccgagatttgggtagggttggcttaagttatgactatctccagaggattgacattgacagcagataataatttcttttaagttgtatgacagacttgctaccataaaacatttggaaacttttatttcgcgggtgagtggcaagttctactcagttgtgggtttatggaagcttagatagttagttaaattgacactagagaagttagttccaacaagataaatgttggttcatattaacaggagcttataaccagatttctaacttagatgaacttatgtttacagattttccaaagttctggacagcaagcacagaggtttctaaattaaggacaaacgagttcttagttactattacatccatccaacaagttcttacataaatggagtacatggcagccatattacatatattacataccacgattttcttccaaaatgggccaccacatacctagactattccttaagcttgtccttaagtcatactaccgtggcagtagaggttagataggactattgattaatctctcatcctcagcttgaagactcgaccataccattgaacatactctggcggtccatacggtccagtggttccaagtggaggataagcagtcctaacatcgacgcgcgaaggtgggcttctttcaatatacattccaacaggtggtggtatatcttctgctggtgcaagcatggcatcctcaccaaacatgaactccggtgtataatgtccctggcgataccttggcataatgattctttctaaactggctaccctggtgcggacgcgttgcagctcagcaaaggttgagcgataaagcatatctagtgagcgcacaaagtttgcaagttggaggtatggggtatgtagtcctacacctatttcagctaaccctgggtaggtagtgtgttgagctccctcagttaaggatggaacgtagcagtaaaattcttctatctcaggtagctcatagcgaaggcggatgatagcaacataagcacagttttgcaaagcggacttaatatcccacccataaccagtatattgaaggtctttctctagtggagttctaccccgaatgcttacacgaaccatgactgcggtttgggatgttccaatgggtttcttgaggatatgatactcaggtggataggtgaatcgggcgtactgaagcataagccatagcacatgctgagttgagttccaggtgaacccacggcaatagcagtacggtgtgtacatggtaggcatctataagaataaaatttagaacacggattagccaaaaacctctaaaattaacacttacaaattaaaggttttccttactgttattattaaggtcgacacacatttttttaacaacctatggttatatagacctctaatcattaattctggtcatattaacggtacagggcttactagaatgggatttctattttaggtctaagaagaattatgcaaggttaaaaattttatctttggttttgatacaaatatggcttactatcccccttaaaataaaataatttttttttgcactaggtttttttttttttaacaaatttcagaaggtaggagctaatctgacatgagtgctaggtgctggaattcatcactttactgtcttaatcaaatttttaggtctagctctaaagatacaaaaattttgacaaaaatcagagagatagatgggttagattaggagctaccctgaaggaatcatgactttatcatttgtagtttaggctacacaaatttgtgaaactgacaacctacagatttcaggacagaactatacagaattatatgaatttttatgccatgatgcaatgactcaaaaattcaaccaaaattcgtggagcctacaggttatgtatgaaaactactgtaaaaagatgcatatttaatcaattatggtttgggctacatgaaaaaaaatgaatgcagctactacaaatttccacaatatgattatgctaactatctagattgtttcactatgatgcacgggtctaaaaattatgccaaaattcatgatgcttactgggttagtctacatgatgcatgtaaaaaattctcaggtttatcacctacggtttagtctagacaaaaataacaagcagactgactcaagattccagaaaaaaaaaagaacaaccggcacaaaatgaaactttaatcaagttttaggttgtataaattttatcaccttttagtcgtattatgttagggtggtccagaggctagatgaattttgggtggtccatctaagcaaacaatctagagggttaagcacagcaaattctattctatacccaactacacattttaggccataccggtgaaattttgaaatatcgggagaggaaagtacaaaatcccaccaaattcatttttggttcagagataacatagggagatggaattccaatattgtctagcaagttttaagttttatcgactcattttcaaaacccatttactaggggctatgtttaacccgatattttagaaatccgtgctaatacataggagtagtttgcaaatggatttcaaaacttttcaaaacactatgttactgttttgctgtgattattaagtgatttcaaataaaattcaacaaaaatagtatttccaaaatgtttcggtcctatagagcaagataagagttttaaaatcaaaacatgagacataaagtaaaataatctctaaagaaggatgagatataagattgaacatgatttttgcaaataatttgtaactgagagcatagcactcaaaataatttttaagaagcaattctaagtgacaacttaaggggctcctgtagtcggtatttgctctgataccatgctgtcataggctctccagaccttccattatatttgagagatgaagtgaataattcaagtcatcaaacaagcataatgaaacatccgacgcctcgagagaggaatattggagacattgctgggcccttagcctgccagtcaacttcagcctgagatgtgcccgtcaaaccactcgaaggcggcgaccagatgtgttacacattcaggagacttgacaaaaatggctaaagatctgcaacctcccaaatattcctaactcatactcatgtgaatctagttcccaggatgtgcactagattcacactttcatcttaagcatgattatacatagcaaacacaactaagatgaaagaaacttaagacttacaacaacttaataattacataggccaaccggccaaatagacttattagagaacagcggatgctt

SEQ ID NO: 25252 - DNA, 1837 bp, Oryza sativa
ttttatactatagacgtgctctctttgagaaatttgaacatataaaacaaggtgacaaaactgttagggagtactttcatgattttaaaatttgtatcacttatagtggtttacaagaatctaatgagaacacaatgactagatttttcagagggcttaattccaatattcagttgggcttgttaatgtgacatataatcatataggccaattgttcatgcttgcttgcaatattgagcgcaaaattttggagaacccaatggagcaacaagctatgcttgtgcctcctatcactgatgttttgcaggaagttcagaaaagtctccaaaatgagaagaacgatatgtttgagatgtcacttccatcactcgcgaatgaggagaaggctgatgaagctacattatttgaagaaagttcgcaaggtaaattaaatggtgctgagagaaatgaaggtgagtattctcaaggtgagctacacttgtccacttttcatgctatagtagagcaaccattagtggaatcaattactgagttgcctttgtcacaagttgatttacttgctgttccttgtgataaagaagagttgtgtgataatgtttcacttatatccatgccacaactagtgaatgaacatgttagttctactatttctttgtgtgctgattctaagcatgttgttcacattgctaatgaagtagaggaacgcaaattgctatcttctttaaatactttgggctatgttcagtttgatgatttttgtgagctcgataatttgaaggagaaattatttgctaaatctgatttgccatgtccaactaatgctatttttcatatctttggcgaatataatgatagaggaatatttttggtgcatagagtttacatttgttcagatttagaacatcttgtagttccggataaaatatgcaagctagagagacatgttactgctaatcatattgtctcgagtttgtcttgttttgattgcaagaaacaggttgttttcagtggactgcgcgaagagcaccatatggaaaaaccgaggacggttttctgtgaagaaggggaggatgatgtgaccatggctactatggatacgaccattgctcacatcatgaatcaacaagaagacatcaagatcaagtcctccatgtgctgcaatctgattcggccacgtgttacattgctgacttcaaacggccgccaaatctacatacgtgctccgttttgggcccgtgagtacttgatggaaagctctcgaagtcctccttccaacggatccagcctcatctcggaaatctatctcgtttggccgcaatcacaaaagcaaggtgctgcgtctcctgtattgggccaatgggcttgtaactttgtttgggaccctggcccatgtggggcccatgtggggtgcgccccaatctggtggagcacgacccttggaccctcttggtcgtcctcccacctctataaatagttaggtaccccttcagggtttcttgggttttgttagattaaagtttagccattgctacttgcttgcagcgcgcgtgtcggctagaccgtccgtctgcttgttcttcggaaccccaacttatcatttgtattaaattcctatttgcaatatcagattgcttttatcttgttcttgcttgtttcttcgatttgcttgcaggaataggttgatctgcaccggcaagatcagcacccacggagaggtgtatcgatcgctaaggcgcaacacaacgtctcgtacggttgtagtcggatcgtcaacgtttctcccaaatcgtagttatcacaactcaccgaaagatcgggccaacaacagccttgagtg

SEQ ID NO: 25253 - DNA, 1215 bp, Oryza sativa
  unsure (1)..(1215): unsure at all n locations
cttttcccccttccctttccctctctcggccgccgctccgccgtgcctatggccgccgccagcgaccataggggcgcgggcgctgcctcctgccgaccgcgccgagtggccgccttcgggcacgccgagtggccgccgcgtggggcccggccgtcagccgcccacgtccttaggtgcggctgaagcgtggggcccacggcgccgaccggtgctagcccgggtgcgcccggtccaccgtggaccgtgaggctgccgcgtgggccccaccccccgtggacccggtccgcgcgccctctcccctcggctgacgcaataaaccccttcttaaattaaaatttaaatgaagaaatccgcaaatattcacttaaagagcatataaacttcaaatggccataacttggccatttgaactcggaattgaaccgttcaagtctctaatttttccttaagaagtcaagaacccatttttatgttttgttcctgctttttccattccgttggtcgtgtagacgctgcagcttcagaagatccgcttttcgtggaggttgaagccgacgtttgggaaagcgagcaaggcaagtcacatcatccttgagcatattgaatcccagtttataaaattattttgatttaaattattgtattatcgctttatttaaattcccgcgttatcactgttttatttagccatgcctatttacctttgttacgaccttattattattgctattgttattattaccttgttcaccctaggataaacaaaaccccaactagtgggtactctattcatggttccactagtatgaatttaggtagatgcttcgctgattaattatgcaacattaggtggttttataactttagactttgggaatactcttatcacctggacactatggaatggttggattattgtggaattggattcacacctccccctctattcaaaaccctcaaaatggttntaggctgggctcggggtgcatggttttgacagtagcacctcggccatatatggaccggtcttcgggcctctgttgcaaagcactaccgtacttccacatgtctagtaggtaaggcttagtttgtggcttagtctggttataaacaaaagtacacggatggagatggacgaagtcaggggtcgatggacatctctagggcaaatgaaggctacacgagctgcggcccggtagtcgagatgtcatggca

SEQ ID NO: 25254 - DNA, 710 bp, Oryza sativa
  unsure (1)..(710): unsure at all n locations
ctatcctttctcaagtgcaaccaaattaaatcacccggttcaagcttaacctcttgcctacctttactaccaacaattctatacttttcagtcatcttttcaatgttgagcttggttgactcatgcattttcagaataaattcagcgcatgccttacatcattatgaaccctctcactagtaggtaaaggcaaaatatcaattggagcacgagtgttgaaaccatacactacctgaaaaggacttaccttggtagtagaatgtgttgcccgattgtatgcaaactccacatgaggcaaacattcttcccacatcttcaaatttttcttcaaaatagccctcaacatggtacccaaagtgcggttgactacttccgtttgtccatctgtttgtgggtgacatgttgtaaaaaacaatagcattgtacccaacttgttccatagcgtgcgcccaaaataacttaagaatnttgcatcacgatctgaaacaatagtagaaggcatacctgtaacgtcccgcctcccccaggccgggcccgcttacatctgatagctntcataggtcatagactgccatcacagaccaacacatatcttttctgcacacttggtcctcactcgtgtgcacccgggaagaatttcccagtcggtcacccatccaaattgctccaggccaagcacacacatatcttttctgcacactttgtcctca

SEQ ID NO: 25255 - DNA, 19671 bp, Oryza sativa
cagtttaattaagttaattgtctcaagaaaataagttatggcctcggtcagaattatggtttcggccagcattaagatagatgaggattggggaagaatgagctagggttagggttctcaccctccccgtcggcgactttttcggcgtggagcgaatcagagccgtccattagatcggacggttcagaccgaccccgcgttaggccatcttcgccgatgggccgcctccgccgatgggccgcacggcctctgggccgcaaaaaaagatgctgagccgcgccgctcaagcttgcgagctcacgcgtagacgggccggcccgattttgggccggcattggaagaagttggccgaaatcaatttaattcactaagcacctatttaattaatttcaaaattacacaattcaatttggcattattttagccatttaaaattgctggaaaattatgatcaattatttggtcgttcagaaagaaattaatgatatgatattatatttgaccaacgttaatatggtttcatgtcaatattattaagattattatttctttaagccatttaatttaattctagttgaatggaaatttaactagaaagtatttatgatttcatgtcaacatcattatgatggtcatttccttaataacttaattatttatactcgaatggaaccaacgagaaatttgactagaaagtattaagatttgaagttatatttaacccacattattataattgcatgacaattataattttttattccttagttattttctaccaaatggtgatataattaaggaattaattttaagattattcataattatttatgaccaatggtgctttgactatgaaattctaagtttattttgcatatgattgattaagccatggtaaactaattatatgcaatcaccaattcttattatttaagatcacttgcaatactgagtaaattatttcaagataaatggaaccaacgggaagtttatctagaaagaaagatgatttcattaagattgttatttccttaattattttctgcccaatggtgatgtaattaagggaagaaatctaagtattgtcaatcactattttaaatattctctgtaattttggccttaatggtgatatgacttagaattttatttatgccattagtgcattaattccttttatcacttctaccttacggtgatgttatcgaggatctaatctgtcagtaagcttaattcctttaccatttctgcccaacggtgatatggctaagaattttaattttaattctatggcatcactaagggcatcattcctatatcatttctaccttacgtgatttgatttaggattttaaattattaacttcatcatttttgcccaatggtgatgtgatttaagacattaatgtttattccctaaatcatttctgcccaacggtgacttgattttgaattacaagtaatttcatttattgattccttcattttgtctctgcccaatggtgatacaaagcgaaataaagattaagttattattgtgcaagttaatgtactattgcacgtaatttgcccaagcaaccacaataatagtgccacttaatatttcagcaataaataatgttgtttatcagttaaagtctatggaattattattattattcctcattgacttaactgagcctaaggcctatttgagtatgacttagcattaaaaaaggattccttgtgtctcccgcagctaatgtcactaatttttcctaaactctagaggcatctttagcctgggagaaggccaatataatgttatgtttcgcatgtcactcataaatattaagattatcatccctgttagtgttaggggagaattttgagcatgacattgcgaaactgtatctagcaaatgttgagatgaactttagaagtttgtcaagactaatgcttagtacaaatttagtgcctatgcacatttgccgccataattggcgtgcaaacttagtgggatggacatcgcacatttcatatgcgccacttgtccatttcatatgattcttctcccattagactacggtcattttcggagttgtaatactaagacaaaatggaccataattgacttggttcatcactcttcaaatcaataagaaatattgaagactaagagacaaactaagtaagatcttgttaatcttgtcatttgatggcaaagatgaagcttcactaagggggagtgttgcaacttccaaatttaatgataataaagctcatattcctcgcaaggggaaatcaaattgcctctatgtcctatgtatgctactcttgaaattttcttgtgtaagttctttgcaaaaaatagggacatgcttaatgtcctgaattaagaaagtagttaataagaagattaatggcattattttgggttgaactattatgagacgttgtcaaaattatggccttaatattcggccacatttcaaggggagaatggacgtctcattgagatcgagacacttcacccttagaaatttctgacatctattattacttagatgataaatcaccaagtaaaattaagtgattcaagtttatgaaaaataagatattatgcttccattaaataaataatacaatctgtgggagctcatcaagagctctaataagagaagattattctaccttatttatgactcatagctccattatgtggacgctagaattttgtatctcttaatttgtgacttgcacaattaaatatatataacataactttagggttttgttatggaaagacaagtcacgcatagggtgcagacctaagaaatccatttgtggacttaatcaaacattgatgatgttttaaattctgttccgtcattagtgaactaagcttaaataagaatgaggagaataattattctataatgatgaaagcaagacgtcattgaaattgtgtcattatctcttatgtcacatacctaggggagtttggaacgtctcatgagatatagatattctttcccttagattttaatggcgttgtttagctttaagtgaaaatttcacgaagttaagatattagccaacaaatgattttttatggctatgtttacccataagcgacctccgatttcctttaagaaatttaagacactaatgctaaaatcaaatgaagttatgagatcggattatggtggtaaacactaaataaagcttgttcaccttataagacattaaaaataagcgttcatccaaatagttttcgaatcatgtaagaataaattgagatggatgaacaaaataagacattaaagtgttcatataaatggttttcgaaccatataagaataattgagattgatgaacaaaataaagaatttagtagaagtttctgaatgagtcaaaatattgggccatttaagtgggttaataaaattaagcctgactctgatggaaatttcaaacaattcaagtgaggtggacaggtgcatgaaaattaaaggtgggaatttcattcaccggtactccattctaatgacattttattgtcaagcaatgcatattgctcttagaaactaaggaatttttttccatgaattattttggtccgaaggagtactgggtttatatcagtaagtcatacactgacataaagaaataatttgagagaattcaattaaagttagtcaagctgacattaagttacaaagataatcatttatgattcagctgacagaagcttgagattagctcaaatctggatgcatacagatttggcatacttttttttactgggaatcttggcagtatttaattaaatccagactaaaccactggtattaataatgttttccattatttgcaagacaatcttaagtaacatgctcttttttcctaaagtccattgatctcagaagtttagagatatttggacacttattttatgagatgtgtggatatttatgaagattattcagattaagctatgttcacacataggggagcaataaccatgtaaaagctccaaaaataatctcttactgcatagtcgacgatgaagttagattttaaagcgtgttatgattaatcatatttcccaaaactaagagtagtgaatagcgctcataaaccactcaaaagatgttaaccacccaaaatatactgttataagttgtgcactaattaaacacagttttctattctagtagcaacatgttgtgtgttttctgcctaacacattgatatggttgtgaaagacatgtcccatgatcgaattattaagctaagcatttgctaatggatccatattctaaaggctcataaattaagattaattaagattatgttttggccagtacatatgtaaattagagccttactaagatcctggatgagggggacttaatttttcaatcaacactcactaagttaagcttgagtttatttgagtattatagtgagctataggtcttgttgtctcagtgacgcataatgttgttgaagacacattgccttgggagctattttatttaatagactcataagtaagtctcgaaatcaaggggagaatgttagctgattttgtcgacttgagtcgataaggattaggagaagaactaaaccaccggtttccttatcctaacaagaaacaaactaagagataaattcttttttttgtgtgatcggcacagaaaacagaatcctaaactaattgagataacccccgagccccaccagtgtcgcttatgtaaagaaagagaaggagggaggctaggtgacaatatgatttctctctaacctcaaaccctaaaattaatggcctgatcgtttagacactggaaggggttcatcaggttttctctgtgcttcctttccatcaacagagaagaagaaaaaacagaagaattggcaaagcttatggcttcagttcatccggtcagtaatcatctcaattccacacttagaatttgtgaccatgtgttaagctaagcaaattagatcctgagaattaaatctaacaagatgatgacacctcccacctcctggttgagttagcactcccatctaatagggtgtaggattggctgctccctggttgctaatctagcttacgcatatttcaataaagctggtggtagtgaagttagaggtgcaacgttgacgtgggaggaagggggaggggggcaacatgtggcaacaataacactaagtccaatggggttgtgttttggtattggttaggatgttgaccttgttcacttgtgcttcttagggatgctagatttgtccaatccccgggaggggggggggtgtagatggtctaatgtcaatggcattgtgtagggagtatgctttgctttgagcttattaattagtcatgtggctgttgctcagagtatttaggttgtttttttccctgttgttgtttcggttttcactaattaaattagcattgtttagttcggcctcattctatctttaaaactagtatatgcccgtgctaacgctacgatctttaatattttttaataaatgactaaaattttgtgttagtaaaaataatcagtttaatgggagctttaattcaaattatgccatatatttaaggcaaattacaaagtaggtacttcacattgttcgtctgaaataccaccaaaatacacactatttctctccaatagcaatttactttggtaggtgttccctgcacctgtaagtcatataataacttgtcaccatgagctgaatcagaggaacgtaaaatatcccttatcctaaagttggcatcaatatagaatataatgctatacctcactttatacatggcaatgtctccaatcatggccagctgcaataaaattagatattaaaccctagccaatgcatattagccattcttcctaaaaaatatatggcaaggtgtcctaccatggcctcttcatttctctacaacagacatttttctaggtataaaataaagcaccttctaacattattggtaccattctgaaaacaatggaactaatgaaaaatcatgctccaattgagaaattaaggcagaaacttgatctttaatcatctcatcacagcacacggaggaaagtacttcacgaaaaaaaaagagaaactttcgcctccgcttctgcctcagacccttaggctgtgttcctagcccaggtttcccaactcatcttcctcactttccacacgtacgcttttcaaacggctaaacggtgtgtttttttgtaaaaagtttctatatgaaagttgtttaaaaaatcatattaatacatttttgaaaaaaaaattagctaatacttaattaatcacttgttaatggaccgttttatttttcgtgcacactgttccagttgggaacaggctccagcgaacagacgaacatagccttagtcttgcggcgatcaatctcgtggacccgatgccatgccccattgttggcggttgttaaatgacaatcccataccgccaacatcttcataaagtctagataataaaacatccaacatagtaataggtgcttaatcttacatattccacaagtgttggtgtatatttgtatgcagatgataaaccctgaagttgggaggaaaatcagactaaagtgaggagaattatgtatccatacaagtagggttgtgaacttcatcgaaacatcagtaaatcaaccgaaaactccgagaaatgaatagaggaaggtcccgagagtccaccgaccgaaggccaggccaggagggcccagcccaggtttgaccgaaccctctggttcggccgaaccccccgatcaccgttcatcctggggtttggcgtggatgctccagatgttctcccaatgacggttgcggtgcagttcggacatttccccttctcacaaccgtcataactgccctataaaaggacctcacttcattcactctcacacacacttccaagcttgagctgaattataagaggctctattgtactatattgtacactagaataggaagagagtagagtagaagaagtcggaagaattccggagttgtcggtaatcttctcctatttcttttattctatttattactctgaattcaatataatattcttcttgaataatttagatttatcttgtgagaattatctcttggttagttcctaaatagcatacgggattattgttcactataatcaactaaaatatagtgattgctttgatgagttataaacactaaagtagatattaattgcttagacgtggtatttaagtaattgttatccagtaattgctgcgtatcccacggtacgtttgaggtaggtgtagaggtggtgacagcccttgagatcacttaagtcctccctttccgggtacgtactagagcgacatctgggaacagcgggttgccagtgcctgaagtattgcattaggattaaagttaagctttccctagatactgtctctcactagtaaatcctctctatcctggcctatcatttactttgtgtccttggatgaaccggaggaagatctgaccatacacgttcatttggattcgatacccttggaatactccgtaggggaagtgctacctcggtatatccgtgcggttgcagattttatctgtaaccgtattaaataccaacaagcattcctagtgccgttgccggggaacggttgctgatcatttccgaacccagttcatccttgtatcctttttacttttttagtctaccttcacccctgctatcctagagaagtattcctgtcaaactcttctcgaccatggagcaacctcgttttgagatgtctgctcctcggggcgaattctatgagccacctccttcatcgaagcccatttatacaactggctatgaaattcgtcctgaactaattagtacggttagggaaaatcctttttctggctttgatctagaaaatccctaccatcatctgcgagactttgaacaagtttgatcatgccttaagattcgtggcatgagacaagaaactgtgcggtggaaattgttcccgttctctcttcaagagagagcaaagcaatggtacacctctaccgttggatgtgtaaacggtagctaggaaaagttgtgagacagattctgtcttgccttctttccagttactcgtattactgcctttcgagtagaaattcttagtttcaagcagatcaaaaatgaatcaatcggtgcaacttggtccagattcactaatttagtacaatccggaccaaccctgtccttacccgagtatgtgcttctgcaatatttccatacgggtttggataaggaatctgcattctatctggacataaccgttggagggtcgttcatgcacaaaacgccgtcagaaggaagaacaattttggatcgcatcctagaaaatacttccttcatgacgcagcccaatgaaccccagccgaaggcatccctgtccaagatagtggaacctctaacgatcgagccactcactgaaccatccacttctgctagctcgattgatgaaaaggttcctgagcagccgtttgtcgagaatgaagaaattcaggttccggattgtgccacaattatgttcagggacggttttgacaaagactacggcaataccctgaactattttagcaaaaggaaaccacccgttcctttgtcacctcccaatcctatggaactcgggttcctacgagaaactgtccgggagttaacatccataatgagcgatgaatggctaagggaggtagagctttcatccgaagtaattcggataaatgcgctccccgaatcattccttgccatctggaagggaacgatgtcggtattctctatagtccaactgtcggggccaacctcgtctctgagtcttttgcattcgcttatttaagcgataaggcagtgaccccgataaacaaattcttcaaacatccgaacggaaatatcatttaaggatttgagattgtacaagatgtacttgtctactttgaagaaagggaggcaatcttggatttccacgtctttgaaatccaagattttgacatcctaatcaggctacccattgagcaacttcttatcaacacacctcatttaggtagcctcaaaataacactgggagagaatgaattctcaattccattttcacgggcaaggatcaccttgaccgaccctctcccagaaattgagttagtggaagaggttaccgcagttcctcctcatgagtctcccgaggcccttctggaagatgaggtccccgatttcatcaaggaagaagcagatcccggtgagactctcgacctgccaatcatggaaccgccacctcaacctccgcttgagcttaaacctctacctctaggcctacgatatgctttcctacacaatgacagagaggcccctgttataataagtgacaagctctctaaagacgagactcaacgtcttcctaccgtattggaaaagcatcgttctgtacttggctactcacttcaagatcttagggggattaatctcgcgctttgcacccatcgtattcctattgaccccaagagtactccctccagggaacctcaacgacggctcaataatgaaatcaagaggttgtaaagaaagaggtcttgaaactcctgcatgccgggatcaatttatcccgtaccatatagtgagtgggttagcctagtccagttgtgccgaagaagggaggaatgacagtcgttgcaaatgctcaaaacgaacttattccgcaacgaaccgtaaccggatggaggatgtgcatcgattacagaaaacttaacaaggctacaaaaaaggatcatttcccgctacccttcattgatgaaatgttggaacagctggcaaatcattcgtttttctgtttccttgatgggtattacgggtatcattaaattcctatccatctggaggaccagagtaagactacgttcacatgtccgtatggcacctatgcataccgtaggatgtccttcggactgtgtaatgctcctacatctttccaaagatgtatgatgtctattttctcagacatgatcgaagacatcatggaagtcttcatggatgacttctcggtctatggaaagactttcggtcattgtctgcagaatttagacaaattcttacaacgatgccaagaaaagtacctggtgcttaattgggaaaagtgacacttcatggtctgtaaagggatagttcttgggcatcgagtgtccgaacgaggaatcgaagttgatcgtactaaaatcgatgttatagatcagcttcctcctcctgtgaacatcaaaggaatctgcagtttcttaggacatgccggcttttatagaaggttcatcaaggacttttctacaatagccaggccgctgactaatttgctagccaaggatgcgccctttgagttcaatgacgcgtgcctaagatcttttaaaattctcaaaaaggcactagtctctgctccaatcattcaacctcctgattggactctgcccttcgaaattatgtgtgatgcaagtgactttgctgttggtgcggtcttaggccaaaccaaggataaaaagcatcatgcaatctgttacgctagcaaaactctaaccggagctcagttgaattatgcaactactgaaaaagagctgctcacggttgtttttgctatcgataagtttagatcttacttagtgggagccaaggtgataatttatactgatcatgccgctttgaaatacctgctcactaagaaagatgctaaaccacgcctcttaagatggattttgttgctccaagaatttgacatagaaattaaagataaaaagggagtagaaaattatgtagcagatcatttgtccagattgcacatcactaacatgcaggaacaaccgataaatgatctcttgagagatgacatgctgatgacggttcgcgactccaacacgtgatatgctaacatagtaaactacatggtatccaagtgcataccaccaggggaaaatcaacgaaaactgaagtatgaaagtcaccgtcatatatgggatgagccctacctatatcgggtatgctccgatggcttactacgaagatgtgtgccaactgatgaaggacttaagattatagaacgatgccacgcctcaccctatggaggccattacggtgcattccgcacccaggccaaaatctggcaaagtggtttcttctggccgacaatgtacgaagactcaaaagaattcatcagaagatgcacaagctgccagaggcaaggaggaatcactgctcgcgatgcaatgccccttacatacaatttgcaagttgagatattcgatgtttggggtatagacttcatgggacctttccctaagtctcgtaactgcgagtacattctggtggcagtcgactatgtctccaagtgggttgaggctatgccgtgcagcgccgcggatgcgaggcacgccaagaagatgttcacagaaaccatcttcccaagatttggtacccgcagaatggtcataagcgaccgaggttttcacttcattgacaaaaccttcagagacctcctacgagaaatggaagccaaacacaacgtggccactccttaccatccacagaccagtggtcaagcagaaacatcgaacaaacaaatcaagaatattctgcaaaagacggtcaacaaaatgggaacagaatggaaggatagattgcaggacgcactgtgggcataccggacagcatacaagacacccattggaatgtccccatatcagatagtctatgggaagtcatgtcgactacccgtagaacttgagcatagagcatattgggccatcaggaattcgaacatggattttgagggagcaggagaatggagaaaaatgcagattgcagaacttgaggaaatggaaaaaatggcttaccccaacgcaaagaatataaagaaaggactaagcgctggcatgacatgtcataggctctccagaccttgcattatatttgagagatgaagggaataattcaagtcatcaaacaagccttatgaaacattccacgcctcgagagaggaatattggagacattgctgggcccttagcctgccagtcaacttcagcctgagatgtgcccgtcaaaccactcgaaggcggcgatcagatgtgttacacattcaggagacttgacaaaaatggctaaagatctgcaacctcccaaatattcctaactcatactcatgtgaatctagttcccaggatgtgcactagattcacactttcatcttaagcatgattatacatagcaaacacaactaagatgaaagaaacttaagacttacaacaacttaataattacataggccaaccggccaaatagacttattagagaacagcggaagcttgactacccaaacacaagcacaccgactaggggtataccccattaagttctcatcctagaagaagcaatcggaacccgcatcactcaaagactaagactaaacctgcaaacaaaaggttatatcaacagcaagagtcagtacattaaacaagttaatgtactggcaagcacaagtcaatcctaccatactacatgtaaggcatatattcaaaggaaggcaatatgtagttcattttcagcataaagcaagttttgtttcgcaattcttttgtaaaggagttgatgcttcaattaacaaagacaagttttaagtttcattattagcttcttcataattccgtcataaacaatctcttattgccatacttaataataagtcataatgtatcaccacatacacaactcaacacatttatcaatttcaaaccaatgtcacatgattacatttttaaaacatagtctatactcatgacacatcaccaaagcactcatgaccgtgagcacggctaatcaattagtttaaagaactctgcagagtttgtacagctttacccacatgatatgaactctctagtttgttttgagtttgcaagactccatcacactcttcatgttgaatgtgatctagaggtcataacgaagcctttacactacttagaatctagccttgcaccagcacgatacgtgttcctccatcctaggcatacttggaaatatgtctagaaccgttaagtggcgggcccacgccttaaacttaacgccgtggtggcggacacaacgggaacccacccacgtggcacaataccgttgtattggacagacttagtcacctaaactaccacgtcggggcaaataggaagttcctctgaatcatcgactaattcctcagaattatcgactaactcatacacaccggcctaccagaatgcaaggctagtcctaaatagattaatcagcttaggccatcccatactagcacatgtggatgtacgaataactttaaatgggtgacacaagttcggtccttatggacttgggcaaacactccccctatcggtatgcaactaacactatatgcacaccacttgctgcccaagtgtaaaatcacattttacacattttagttcgcaaatactcatcatattcattttattccagcaaaggttcaagtatcaaaccacattttaattatagatggaatgagcatttgcatatttctaagcatggctaagcaagtagttgcacatagagcatatataaacccatttgagcacaaagagtgtactctaaccatttctaggggttcaaacagcaagaggatcaattattcaaggtggaatatgtagcaaataggtcataactaccttaacccaatttcaaataccgatatagtctaagttcacatgcaactttgtaaacaaatattttcattcctcaaatcatgggattcaatgtgttcaaaggatgggaggagaaaactttccttgatcagagaattgttagcacctaatccacttcttcaccgattacgcaattatctagataaaggacacgatatgcaattaaacaccgaaagagttgaaaatccaaaatgctctaaaatgcatgatttatgcacagtgggttggtactgatctaaaataaatttaggtgaaagaatttttattttatctttatcttattccattagggagttatgaatttttagaagttttatcggtttatagtagtatagtcttaggtagtgttatggaatacttttgtaaagtgatttttactagattagacttcacaggggtgtggagatgtgttttctaagactaacacatttggtttcacaatttttggatttataatgaattctttatgcattttacaagttacaacgtgttttaggcatatagtgttttatatatgtatgactcctgagttataggttcagaacatgctacttcatgtttaagttgaataaaaggaataatttggttaactaaaacatttttatctcacatgtttatggtctttactactatggttcatattttataaagtagagacgctttaatctaaactagcaatatattatattaacctagaaattgttatatgagccaagttcttctaagtttagtggatgaggatggaactatggcttcactggtcaatcaagtttttatttaggtttaattagacctaaagtgtatatatatacttatacatgtttatgtattacttaaacaacactatgtgtttaaattcttatttcactaagttaaggttttgatcaatgttctctacagaaggtgccaaattttattttactatgttgaagataactatttgctggttctatagaaactttgttcatttcatttggactaaaaatgaattttctacaagttttacaaattaatggctgctctatgttagtaaatccttatatgaatatttagagacttttactacacagcaagtatataatattatttcataacttggaaatacatgtgttagtgatcctacataacttaagtttattcaaattgaagctaaattgggttctacatgaatttctaaagtttagcttatctaaaactagtcattttaaagataatagttttagaggcttttgatgcaaagtaagtcattacttttattttacctaatcagagagtgtctgatgatgaatctgaagtttttgagtttgtttcaaaatgagttgaaatgaattttctttgtattttataagtttgtacatgttttatgcatgacttatcttagataaatcttagagacattatttgtacagtgagtgtcaagttttatattcctggaataaagttcataacttcaagaatctacagaaactggaatcacttcaaaatgagctatatttgattttatatagattttacaacttgtgcatttttctgctaaacatataattgtttgggcattttcctaatttttcttcagattttaaaggatgggtccacatggctgtgagggaccaatatgcacaaaggcccttgagttttctaggaatcaacccgcagtcctaggcccatatgtcagtgtgtttctataattgtaaacggatccctgcacttaatctaattcacggaagtcatccctctgctctagacatagcagagctagccatggctgagctcgatctggagctcgccggcggcaaacggtggctcgcttgaggttgaggtcaaaagataaaatgaagagcaagctctcgcgattccattcctctagttttcttggttagaggacatcggagtagcgccgatggcgagtgtgagcggcggtggttttggggtgaaagtgcatgtgcgcatggaagtcgattacgaacgaaaaggatgcatgcatgtggtcttctagacttcaggatgctcaccgtgggtcgagctagggttgtcgaggtcttggcggcagcggtgacttgtggaacggctcggcgacggcgctcctcctcgggtgaacgacgacggctcgaacgggacaatgagctgcttcaagcaagcatgcacgagggttgtgaggtcaaggagatggtgtatgcgcaaggaatcgaacaatggctcaccgaggcagcggtaatcgacgatgacggcggaggcgatcctagattggcgccggtgaagaaaaggatgtgttctccgtgttcttgatgtttccggctggggttcttgaggcgttttgaagaggaggttgaggcaatgacaatggcgcagcagctttctctgaggtgaatgagaatggccggacgacgatgatggttgaagcggcggcgctccggtgcgtgctccagggcgttgtcgacgtggcttgcgttcccggcgatgcactgcacgagaggggtttaggtcaaaagaggaaatgctcggcattgtgtggagagatgggaacgcgaaagagatggaggtgaccttgactcaaacggagatggcgaaggtcgtcgtcactacgaccggcggcgaggttgaggatgacggagaggcagagaacctctccctcggcttcttcagctccaaagtgatgtgtggagaatggcgacgcgtctgggaggagtagagagcgagaaaagggaaaccgagatcgacgacacgttgcggccacgcgtcggctcgctcaatctctccctctctcggctggaacagtggaggaagtgatggacagagtcaaggcaagcttaagaggctgtcaggtgggtccaggtcgtggcaaactaggctagggtgagagggttgggtaagattctgggtaaacttgatttttagattaattttcggaattattttctcctctaactttgaaactacataattcaatgtgtggaccaaattaattagtgttgattttactggaggtaaatgattacacctagattccattttctttggttgcactcaaaaataatgggtggactgctcacagaaattaaacaaagatgggctattagaaagctagattgaatttttaggaggcttaaacagagaagaaaaattctagaaaaattacatttattcatgataactaatctagtatttgaataaattattttccatgttcacttatgtgcagttaaatgtacttttggatgaaatatggttttagccgattaaaatttaatttgatttcttttagttgtctgtttcgaccgattaatttgagatatcaacttgagtgttaacacgttaccaaattacggaggataagtttgtgctaatcattgtccacataaatttttccatgattttatcttgcacaaaatattttagagaattaagatgacctttgtttgtatatgtgttcccacttcataattgcatctaatattattatagggattacattaaacttcttttagactgagaagatgatatttgagtttaatattaagtccacatgttatcactcaagattaactataggtttgtttagtgaaataattcttttagattatgctcatgggagctattatggaatacaagtccaaaactccaaatgcacaaagaactcgagggttaagtttgcttggcctggagcaatttgggatgggtgaccgaccgggaagaatttcccgggtgcacacgagtgaggacaaaatgtgcagaaaagacatgtgttggtctgtgagggcagtctatgacctatgaaagctatcagatgtaagtgggcccggcttgggggaaggcgggacgtgacaaaatggtatcagagccgactctcgcggtttcacgggcgcgtgtatcgcagttgcgcaggcatggtgcgcatggctggtgtagacctggagtggttacacagcatggcacatgcgctgtcattggacacatgggcgtggccaagagaggacgttcctggcctagggttgatcgacgggggcgtcgatctctcttaagggggtgagggtgtaacatcccggcctagggcttaataggattaatagaatactcatatcaacaagttgcaacttcttttccggaagccaatctccaaagaactccagggttaagtgtgcttggcctggagcaatttgggatgggtgaccgaccgggaagaatttcccgggtgcacacgagtgaggacaaaatgtgcagaaaagacatgtgttggtctgtgagggcagtctatgacctatgaaagctatcagatgtaagtgggcccggcttgggggaaggcgggacgttacataacaaaaggataaaaatcaagaaattcaagccaggagacaaagtactgatgttcaactccagggttaaactcttcggccacggaaaactgcgcagcaaatgggaaggaccattcgacgtcatcgacacctcttcgcacggggcaatcacactccgcgatgacttcggtaacatatttaaggtaaacggtcaacgcttaaagactttccttgagccaaatgaaactttagatgaagaagtggatgttgttaaattagttgattatgaaccatgatgatctcatctattgcatgcttaaaacccggtaagttgtcatttttgtgcttagtttaggacttattaggcctaggaaaaaaatggagctcaatcggacccaccaaggtgctggttcggccgagccagggaggcgcccgatcagccccatttttgaacttcgctctcccccgctcgttcctagtttgtttagatgcgcatttggaggtagaacgctcggatctcgctagaacacttcttcttcctctttctctccacctttgcatactctcctctccaatccaacccaattcctcgaattcccactcatacccaccaatggctggcaaatccttgattacattcatcggctcttcatccaattccacgtacgacctcaccggagaggcgacaccggcaaatcaattgatcccggtggaagaatacacgatggaaggggtaaacgctgtatgggctcaaccccttgcagctgtgccaggctcccctgcaattttggagccgatcgacgagctccctggttcggccgaacccttctcagccccgttcggcagcgtgatccctctcccctcgccatgtcacaaggacaaaaatctggggggattcacctacgcgacggccgacaacgggagaactcggcttgttgaaggcacgacggcttttccaagatgacgggaaggccgcgccacctctcgccgagcgctatgtgggcaccctgttcaccaaggaaggagatgagatgctccacaagtataccacacccaccgctactccgtctactccgaaggaggagcgattccgcatccaaggagtgagaactcccggcagtgggtatggtaagagtttactacggcctttgatggcatcggaaaaggagggggcagcagaatcccgtagccctccacctatgaaggtgaagcgtcatttgaagccccctccaattgtgagggctcccagccaattccaagaagaggaggtgaaatcgccggagccctcgatccataagctcgccgcacaagtgaagaaactccgcaaggagaacatagagcttaaggatcgcaacgcggagctaggggtagagcttgctgacattagaaataatttcgatacccttagtcgcggtttgtgcgctaaaatcaagcgtgcattcatagagataggaaaggaaaataagtattatgctaactagatgcttcctttcccatgagtaaaatagtagtaggtgcttggtttttatttttccaatcatataagcacttgctatgaataatgtggctcattggtgttaaccccaatgtttgccaaagtttgtttt

SEQ ID NO: 25256 - DNA, 22345 bp, Oryza sativa
cgaaccaagtctggccccaatccctctcaactttcacaggtaagcaggtgagcacgtcttgtatctgtatatctccactatagtatagtactagagctgaaaatttagaaaacaattggttcaagcataagtaagagataaaatttccaattaatgaaattcttcatgtgattgatctagtatattcatattcccagctgaacttgtgcttgtgaacaatcatccatgtttagggaactttatatatctaagtgattgctttttgtgagatgattaagatgaaaggaattcttgcaactattcttatgactcttgggaatttgttttcaaaataaaattgttttaaaagctcacctccaattgactctaccttatacctaccaaggccatgtgcaagtacattaatgatcaaaccttatcatgcatatgactgtttgacattatattaagctttgtcaaatttatgtgacttgtgttagatatctttcatactctcatgatcaaggggtcattatcattaccactttccatttccacatataaaattaagctaagcttctacactagaagttggctttccacaaaaatatccattcaaataaactcctacattgaactatgctttcttctcctagaaaagttcttggcaaaaagaaaatgagaaaaggaaggaaaggcatggctagaaaaaaaaagaaagaaaagaaagaagatggaaataaagcttgctctcaaaatattgagcaaagaaaatatagccatgccccttccataatcatgccaagagaaccaattagagcgaaagtataggaaaaagggagaatcatttctttattccatcattccacaaaatattttactttttcattttccgccataaataaagacccttgttctaggagtatgattgattatcttcttgagtcaatatttttggctttgcactatatatgatgcaggtatgtcacagtttatccctaccaagctccacatatcagccttctaatagggatgaattatggcacattttgccttggtaaggatccaaaaagaaaatatacatccttgagggacaagagaggaagtcaataggaggagaagagctgatttgcgaaaatttataaaaatcccatgagtgtaacagggaagcaaggactggaatcaagatcgttctatttctcaattactcaagatggtaagttagccactgataaagttcacaggtgcaggtatggttgtaaaataatttatatgcttgatacatatcttgaagaaattcattttacactaacctttactcagtgacgagcaaagggctaagtgtgggggggttttgttggcggttgttcaatgccaatcccatactgccaacatctacataaagtctagataataaaacatccaacatagtaataggtgcttaatctcacatattccacaatattccacaagtgttggtgtatatttttatgcaaatgaaaaccctgaagttgggaggaaaatcatactaaagtgaggagaattatgtatccatacaaggaggggttgtgaacttcatcgaaacatcagtaaatcaacccaaaattccgagaaatggatagaggaaggtccatggactccaccgaccgaaggccaagccaggagggcccagcccaggttcggtcgaaccctctggttcggccgaaccccccctgatcaccgttgatcctgggtttggcgtggacgctccagaagttctcccaatgatggttgcggggcagttcggacattttcccttctcacaaccgtcataactgccctataaaaggacctcgcttcattcactctcacacagacttccaagattgagctgaattataagaggctctattgtactatattgtatactagaataggaagagagtagagaagaagtagtcggaagaatttcggagttgtcggtaatcttctcctatttcttttattctatttattactctgaattcaatataatattgtaacgtacccaaattctagaccttaaaaatttcctatcaaaatagttggaagctaacttttccatttttgagagctaaaaatttccatttttaacctaggtgtggtcaatctaacttgaacctaagtaaaatttgggaacaaattaaaactttttcatttataacctaggacataaatgcaaacacgagtaaaagcatgcatacttgcataaaacatgttttgacttgagtccttcatgtgcatttgaatctttgatttgcatttcataataggtctcatgaatcttaactaagatctagataaacaagtaaaccattagggcctagtgctagctagaggaagttaaaatagaaaccatacaccttaaaatatatcaacatggctaatgtcaagcctcacaaaactaatttcaacatccatctaaagacatgtcatgaacatgaaagtgaacaaataaattatatcatatagggtatattctatcttaatcatctctataagcattctcttcatttaatactaaagtaaacttatgcataaataggtaaggagcttatgacatgtgtaaggtaaactgtaattctaacatatcaatatcacctcaggttaatgagagtccaaatataacttttataaacatttacatgcatttaggaaagggaaacacatataagacataagtcttgcgaattatctaaaataattcgtgtaagataaaatcgtgggaaaattcatgtaggctctacttaacatataaaactcactgtaattttggtataatttaataactaaatttcatacctcgaataaatcagtcaaaccagtcaaataatagactaattatagttcttaatcggttaaaaccatacctaactaaaatgtgcatttaactgcatgaaagtgtataggggaaataatttattcaaatactaggtcatttatcatgaataaatataattttatcagaatttatcttctctgtttaggtctcctaaaaattcaaactaatttccaaagggcccattttctcctaattactgtgagtaatctatccaaaattttttaagtgcaaccaaagaaaatggaatctaggtatcttcaactatcatcacaaaaattcacactaatttatcctggccacaaaataaactatcgagttacaaaggaagggtaagtgaattaatcctgaaaatttgtccaaaatcacttacacccaattatctacccatccctcacacccccacctagattacaccgacctggacccacctggcagccttcttggcttacccttcccctgtgcaacttctctagccgaccagaactgagagaaagaccgagccgacagccctcgggcgcgttcgacgcgtggcctcgacgtggcagcgccgaaccgaagcttcacctcacccagctgcgtcgccactcttcacccaccatcccagtgccgatccatccgagggaggaagctccaactttccctctccacctctctttcatcgtcggccgccgaaaaggggcacgccgccgatcgccaacgagtcgtctccatccctatctgattcacgttctattatcttctctccatgccgagaaaatccttttttgactccatcttgtttcgtccactgcagcgacgggaacgcgacctcgtctacggagctctggagcgcgctccaagcgccgccgcagccgacatcgtcgccgttccgaccgctgtagaccgatccaagccgagccgtcacgccaacgccttctccttgaagtcctcctcaaaacccctcaataatcccaggcaacggcgcagcaagtgcggagatcggccaccgtcttcttcacctccggttgccatcgccattgtcgtttccgcctcctccggtgagccattgttggattactcgcgcacaaaccatccctgtgacctcacaaccctcgtgcacgccttcctttagcagctcgtcgtcccgttcgagccgtcgccgttcacccgcagaaggacgccgtcgccgggaggatgcgcgagccgttgctgtcaccaagaccccggaaaacatcaacctaacccgcggtgagtaccctagagcctggaagaccacatgcatgcatccctttgagtacatccagtctatagcacgacatgcaccaccacccgaaaacttcctctgctcggactcgccgctggcgctactccgatgtctgctgtctgagaaatgtataggaatggaatcgcaatatcatgcccttcattttctattttggtcgcaaccccaacggagtcaccgtttgtcgccgacaccggcgagcagagatgccgcccatggctgctctgctgcttatcgaatggaaaaggagacagggacctcgcttggagaatttaaacaactataaggttcattatgtaatgttttcactcaatgacatatgggcctaggactgcgggtttatttactgaaactctaggggtctttttgcatattggcctgggactgacaatgcacacctaggaacaaaatctgaaattataaaagaacagtaactaaaacttgtaaaatccatataaaattaaatatagctcattttaagatgattcaaatttctgtgaactcaccaaattgggaactttgatgttatggaacaaaacttgcactcacagtacaaatttagcctctcaaatttatccaaattaaatcacacataaagcatgcacaaaattataaaatgcatacaaaattcatttcaactcatttcagagcaaacttagtttctacagatccaccaacattttctctaaaaacaaagtaaaataaaacatctacacattctgcatcaaatgcctctaaaactattatctttaaaaataactagttttatataagctgaactttagaagttcatataaaattcatcttagatcctttttgagtaaacccaagttctgtagaatcaccaaaacatatacttccaaattataaaataaaattatatacttactgtatgataaaagcctctaaatacttatgtaagtaataaccaacatagagcaaccttaaattgtaaaatttgtagaaaattcatctttagtctaaatgaagtgaaccaaatatctatagaaccagcaaacagtgggcttcaacatattaaaataaaatatggaaccttctgtacaggttatagctctaaactttaaatttataggataggtactaatcacatagtattgattgagcaatatgtatatatataaatgtatatagaaatacactctagctataatgaaacccaaataaaacttgttagaccagtgaatgcatagttccatccccttccaccaaaacttatcaaacttaactcatataacaatttctaggttggtgtgttaagtaactaacatagaacatccctaattataaaatgtgtagtaaaataatataaactctaaaattatgaactaagattagattagttaactaaaatactcattttatacatcactagctagatgaggcaagttctggacctaaacctctaaagccatgaacctatataacactatacacccgtaacacgttataacttgtaaaatgcataaagaattcatattaactccaaaaattgtgaaaccaaatgtgttagtcttagaaaacacatatgttcactcagcaaacataaacttaataaaaatcaccttacaacagcatttcacaatagtacctaaataaatcctatactataccgatgaaacttgtaaaattcataactcccaaataaaaaaagatgaaatagaaattcttccacctaaattcattttagaccagtacctattcactgtgcacaaatcatccattttagagcattttagattttacgcatattttggtgtttaattgcataacgtgtactttgtatagatgattgcttaaacggtgaagaagtgatttaggtgctgacattttcctgattcaaggcaagtcccacctccctctctttgatcactttgaacctatgttttggaggttattgaaaatgtttgcaaatcctgcatgtcgattgtatactaacaaattaaaatggtgttaaacttgttagacaaattcctattatttgcattatcaccttaaccccacatatatccatatccatcattcctaaccttaggaacaatatgactataccactttttatatgagttttggtgacactaggttactataaagcttagccatgcttagaatggtcttccttgtcattatgggctcattacaaacatgaaaattgatttataattaatctgggcagaactttaatacttgtgattttgataaataaaatggtggaaaacatggattttaggtttaggcctcaagtggtgcacatatggtgattagttgtgtaccgatagggggagagtgtgcccaaaccgacctaaggacttcactcaatgtcagttcatttcgtatacagtacaaccacatgtgctagtatgggatagcccaagcttagtaaattatttatggtttagccttacattctggtaggccggtgtgtatgagttcggataactcagaggaacttcctatttaccccgacgtggtagtttaggtgactaagtctgtccaatacaacggtattgtgccacgtgggtgggttcccgttgtgtccgccaccacggcgttaagtttaaggcgtgggcccgccacttaacggttctaggtcatataacgtgtatggcttaggatggagtaacacgtatcgtgctggtgtaaggctaaatcatgaattttggaaaagctttgttgcgggtaataaatcgggaacttatgtatcgcgtgccatgctcttgcatgattattatttcacatcatgtgggtaaagtgtacaaactctgcagagttaaaactaatcgattagccgtgctcgcggtcatgagcggcgtgtggatatctattgagtgtagagttgtgtttattcttctaaatgctgaaatttaccttcaaattgtgatgagatttgagaatgatctccttgctgccatggaaggcaatgaggtgcatatttatacatgattaatgcctaccttgatgcccaatatgtcaagtactagtttgctgaaatttatttgaaagtaaacctgatttagaaatgttttatgcaaataaaacttgctttatgctaaaaagaaccatattatgccttccttggttatatgccttgcaaaagcctaagatatctacttacttaaaggactacagttagctttacgggaaatcaacactttgttgaaggtggaatgtgaatacagggacagagactatccatattaccagtagggtgttaggcttgtcttggtgcttgccagtacattatttctaataatgtactgactcttgctattgaattaatcttttgtttgcaggttttagtcttagtctttgagtgatgcgggtaatcgactgcttcttctaggacttgaacttaatggggtaaacccctagtcggtgtgcttgtggattgggtagacaagcttccgttgttctatatatttatttggccggttggccaatgtaactaaagtagatgtagtttataatcgctttcatcttatttgtgtttgctatgtataatcatgctcgagatgaaagtgtgaatctagtgcacatcctgggaactagattcacatgagtatgagttaagaatatttgagatgttgtagatctttagccatttttgtcaaagtctcctgaatgtgtaacacatctggccgccgccttcaagtggtttgacgggcacatcttaggctgaagttgactggcaggctaaaggcctagcaatgtctccaatattcttctctcgaggcattggatgtttcattatatttgtttgatgacttgaattattcacttcatccctcaaatataatggaaggtccggaaagactacgacaaatattcttcttgagtaatttagatttatcttgtgagaattatctcttggttagttcctaaatagcatacgggattattgttcattataatcaactaaaatatagttattgttttggtgagttataaacactaaagtagatattaattgcttagacgtggtgtttaggtatttgttatccagtaattgctgcgtatccacagtacgtttgaggtaggtgtagaggtggtgacagctcttgagatcacttaagtcctccctgtccggctacgtagtagagcgacattgggaacaacgggttgcctgtgtctgaagtattgcgttaggattaaagttaagctttccctagacactgtttctcactagtaaatcctctctatcctggcctatcatttgcttggtgtccttggataaactggaggaagatctaaccacaatgttcctttggattcgatatccttggaatactccgtaagggaagtgctacctcggtatatccgtgcacttgcggattttatctgtacccgtattaaaaaccagcacccatatccttcaaatccaactcacaaaaaatcatggctttgattgaagaagaccagttaaagattgaatctttaatccattcctctcacgcataaaggaaaggactatagcaaaaaaaaaacaagaagaagaagacgaaattctcactgttgctcgtgcttgcgttggcgagttgacggtgcccgcgttagtgccaggcggcttccgagttaggcatcggtcactcgaagagtactcgttggacacgcatgcgttcgagctacgagaatggtgtcgtgagcttgaactcgtggcccgcttcatcacgttgaagaaacgtcttgctctcttcttcatcacgcacacaccagcaaagaacacacaagatgatgttgcgccctaaaatcattctaaaattttatcgtctaaattatttctataaattgtaaaatgccaaaaatagccttcaacaattaaatgtcatcaagtttcaactcaaattcatgtgtgagaattttctttaagttcctcatgctaaaaaacacttaaccattttttagaattttaagagcattataaataattttagtgtaacaatatcatttctcacgttttcaaaaataaagaaaaactaaaataaagtcctgctctggctccggcccttctctccttcctggcccaaccgagccacgagcccatcagcgaccctcctctccgctctttgggctgccccctcgcgccggcctatcgcgcccaccaggctgcccgagctgcatgtgcgctgcacgcgtgcgccccccgtggggtccgcctatcggaggcgtcccctacctccagcccgaccgttcctctctctcccattgaaccctagcgccgccggtcaccttgatcgacctcctcaagttcaattcatcgcaaaaaccggtttcttgtgtagtgggcatcaattcccccaacaaatcccattcaataccgcactaaatcatcctcaattttaatccgtaatcatcatgttcaatagggagctccaccgtcactgccgtcgtttcctgtcctgtagcggtcgaccgcgagtctggagtaggtggtggcggcctccttctcctgtacacgcagctgcgtcggcagtaacggcagacgggagcttttttttttttcccgggaaaacggaacatatgggcctcggctaggggacattggtgacctcgaacttcgccttacgcctccgcggaagcattggaagggcaaaagtgggagagggtgccagagaacggaggtcaattggagcgacctgggatggccatggcgagcaccgatctgggcgtgcgaaagaaaagggccggcgactggttttactggctagcgtgattttcggccggtggccccacgtgcgcgatctcgtactgggtgatcccgcgtgcgtgcgttcgctgtcgtcggatatgatgtattggatgattttcgatcgttggatgtgtcacacgatgaataaataaaacaacttgtatagggtagaagattagccggttttcttttttaatattaagctgtaaatttgtcataatatttaaaaataagcaacaatccgtgccgatacagagatcattttagtacagatggcatccggagccagaggagtcgacggagtctcgggactagagttcctgatctggttggagatgaggaaaggatggactgcagcttcagatctggatgtggagcaaatccataggggctgcagctacagatcgacacatgaacattggagcaaaccctagtcaatggagagatacaagatgaaggggattcgagaggagaaacctacatataggtggatttgaatgatttagagtggggaggaggaagaagctagaggggatgagaagaggaaaagacttgggatgggagtgaagaaagggttatagtattatggagagtggtgactgtgaagtggttcttttccctttttttttttatccacatgaaaatttgccaatggtcattcatgttggtgaaattacttgtgccaacaaagtacccaaatttttggcgatatatgtccaaccatctggtgccaaagtgaaaatagctacccgcccaactcccaccgcgcgcgaacccattattttcactgattgcctcgttcacatcagaataatcaaattattgtgacaagttgtcaagttgtgtatccacgttaagaaaattatatttctttgatgttggtataggctcgtatggaatattagaatttccacgatagtagcctttgtacacgtacatcagtaaaattatcggccgtcaggcccagttcagttttctgtagtgtgtagcttttttagatagtggaatagaatatcccagtctttgctcaacgagctacaatcaattattacaggtagcacataaaataaaaagtttctcacataaaaaagaagacacctaccaaccaagataaggagtacgcaattattgaattctgtttgtgaatctccatccaaaattggtaaacagttgcataaccattgcctcaaaattacgacatgcaacttttaaacgctcgccctcttcattacacttttgtagcagtgcccaagacctaagccagtgcgttgccctgaaaattacctgcatatatgaaacagatggtgatttgtcaaaaatcatatcattcctactcaatcatagagcccaacatatagcagaagctcctatgagaataagtttcctattttacttgtccacccccagaagccaatcatcaaaaatatgagatatgctattaggagggtaaagactaaaagagaactgtacagctctccaaataaactttgcaaaatggcattccataaaaagatgctgaatagttccattcttcacatagaaacaaaatctcaaactcccattccagtttctccttgccaaattatctttagttaacactacccctttaagcaagtaccacataaagatcttaatcttcagaggcaagcatgttaagcttccaaagaatcttatttctcttaatataacattgtttattaaagccagatacattgaccggacaaaaaattggccattcagatgatagttccatctaaaacaatcactttattgattcaactgaatatgtacaatagaagcacacaattcatgccactttgttagattctgaccaactaaagcctttctaaaagaaacatttagcggaacagatctcataacattagcaactgaagaacttttccttcgaacaatagcatagagagatggatacctatctttaaacgccaagttacctagccatttatcttcccagaatctgacttattccccattattcagaatccaggaacccatgtttaaaaaagtattcttaactttcataagacctgaccaaaaatgagaatcaccttgtttcctatcaacttgggtaatatactgattataaagatactttcttttcaataagtcttgccaaagccctcgctcatttattaatttaaacaaccatttactaaaaaggcatttattttgtatttctaaattatggacacctaaaccaccttgatctttgggttgacaaataatatcccatcttgtaagtctgtactttttcttatgatcatccccttgccaaaagaatcttgatctataataatcaattttttgaagaacccattttggaatctcaaaaaaagatatcataaacatagctaaactagaaagaacataattaatcaaaaccagtctacccccaacagacatatgttttccctttcaactactaagtttcttctcaattctttgttcaataactttccaatctttgttactaagctttctaaaatgcattggaataccaagatatatgacaggaaaagtacctaatttacaaccaaagatagtagaatattgttcataaaagtcctttgcttagccaaaacaaaataattcacttttatgaaaatttattttcaagctagaaaacttttcaaacacagataaaatcaatttcagattcttggcttgttgtaaatcgtgctccaaaaaaatgatagtatcatcagtatattgcaaaatagataaaccatcatccaccaaatgtggaattaccccattaatggtaccaacatctttagccctcttaattagtagagctagcatatcagccactatgttaaagataatagaagacaaaggatccccttgcctgaggcctttgtaagtttgaaaattattcccaatttgatcatttactttaataccaacatgaccaccctgaacaaaagaagctatcaattgacaccatttaggagagaagcccttcattctcaacatttgttgaacaaaagaccatttaaccttatcataggctttctcaaaatcaatcttaaatattaccccgcttttatttttacgacacatttcatgaatagtttcatgaagaataacaacctcttccataatatttctcccaggaataaaagcagtttgagtaggactaattactttttgagtaacgccaattattctatttgtagcaaccttggtaaaaattttaaaactaatgttaagtaagcatataggcctatactgttgaattttcatggcctccacacacttaggaaaaagaataatagtaccaaagttaagagagaataaaggcaaagtaccattatgacaatctttaaaaagatctaacaagtcggctttaataacattccaaaacacttggtaaaactcagctggaaatccatcaggacccggagccttgttgtgttccatttggaaaattgcctctttaatctcattctcggtaaattcttgagttaaagcctcattctctaattgagatacttgagggatatcatcaattttactctcataaacctgaagatcaaaatcatctggaggaccaaataaacctttataataagtggtaatatgcaattttaaattcgcatcaccccttattaattgatcaccatcctgtaattgaaaaattcttgtttttctatgcttaccatttgcaaccaaatgaaagtacttagtattagaatctccctccaagatatctttagtcttagccctttgataccacctaatttcctcttctctcagaagcgtagataatctatttgtataatacactctaatatcaatttcctcctgagtcaaaagaatggtttccgtttttttatctagcaaatccaacttatctaataactcttttttctctttttaatagatgccgcttgtatgtttagcccatcccctcaaatgttgtcttaaacgatgaattttagcctctcaacgctccatgggagtattaccttcatcaacattagaccaaatctcttttaccatatcaacaaaaccatcccgtaatagccaacctggttcaaacttaaaactatgttgagcattacccggagacgaagaatttgtatttaaaagtaaaggagtatgatcagaaatatctctattgagagcaaaaaccgaggataaaggaaatttatgttttcactccgttgacattaaaactctatcaagtttctcatagattggatttgctagattatttgcccaagtaaaattcctacctaacataactagctctctaagactcaacccgtcaataacagcattaaaaagaaagggcaatctatcatcataattagcattgtttttctcatcagggctacgaaaaatattaaagtcaccaccaataagaattggtaatgtttcatgactacacagattaactaattcagcaagaaattggtccttaaactcattttgagccagaccataaaataaaattaaagcccattaaaattatcagctttgttgcacaaatgaaacttgatgtaaaaatccccctcatcaattaaaccaatatcagcatttagaaggttaatacctaagactaaacccctccctctaggaggtttgcaatgccataaaaactctttaccagcacaaagatttttaagtgcagtaggagtaaaatctttcttaacggtctcagataacgcaataaaatgttacatttcttttaatggaaatagagtgctaaggccctttgatcaaaaaaaaaagataacgcaataaaatacctgctgtatgtgatttctctagctattccgtgtcgtacgtcgtctggtgatcgatgtgatgatgatacgatggacggatttcgatttagtgcaaattaaaccgtccagacaagcttaatcaatatacatggagtatataggtatcaaatcgatccatatgccagcgacagcgagcgatatactggcagttttaattactactcatagccagtactgttattactgtacatgtataaatacggccgggatacagctaacctggccataaatatatatattgctgcccgtattcctgtgagatcgatatatattgctgaaaagaaaagaaataaagaatgagtcgtcatcaccagcaaatatgtatgcgtgcgtttaacttttgaattcatgtcgtttgcgcaacagaaagaaaatagtccagcaagacgatgagttgtaaaattttgtttgtatccatctacaggtgatggttggcgtcgttccgaaatcaacacgaaagagaagaaaaaggaaagaaaaaggttggcgtcattttgtagtatatacgtgtaggtgtatttgcttaactacgacgccagcatcggcctttatttcttttgagcatgtagttcgatgggaagtgttagctagctaggcatgtagacacctggcatggcatgcacagcctccgaggccagaatagttgtgctgatgatatacacacaatagatggcacgcatccacgctcgatcggttgatcgatctgccttttgagttttgtacacatccatcttttcctagcatgtatagcgaaaaagggcaagtagtaaacatgtgtacacgcgttctgaacttgaagctattagctatatatctatcttcctcacaactctccttttaattagttcttccatttccacaactactccatatttccttttttctcatttcttcgatttgtgcgtcgaactgcagctgctggtatccagccgccgcttctccgtagctactttcaggccggccgaccgagcggacaggtaaaccggtgtggttgtggcggaccaggccgtctatcatctccgtaggttgttctatttgatccatctatgcatctgtattgtattgtattttcacgcatgtatgtcttataatatcctcttatccggtcattggtcaaacagactcgcaccagctgctttcgctctcccttattaaatcttcaccggcgggtcggatcgcttttcccctttcttttggtttcagatctacacccttgtaaaaaaaattgatcccttggtaaaaaaaaattaaatcatagggacatatttagataagcactgtgtccagattaatctatgggattggtttttttttgaacggagagagttatttgattagcttggtattttctctcttcgcctcccctaaaaaagatctttcttctccttttttttctatctaaaaagaatatatcttgacaatttctgctgtttttgttttgtttgtgttcaaacgatatgtatgtttgatttttattttgttaacttttgatatactaatgatctgttccgtaggcagatttattggtcgaacaaaacttccaaatctgtttatcgaacaaatcatgaatataccaagtgttagaaaaaaaaaaccatcaaacacaagtaactcagattgaagttataaaaggcaagagcactatatcaagtggtaaattaaacacggtatcatccggttgcataaatatcatcattaaatctgtacttggcaggggcgtgcgagcgagacatggagaacgcagctggtggaagaagggcacaacaaacgcaagtgactgaggagaggcagaagaagatgaagcacaaggcggctcaggagattgctgatggcagcagcactagtgacacagtacatggtgctgctgatggtgtctgcttcccgtgtggtacaagtacagctacagcccacctcttgcaacccaagcactcacagccacagcacgaggtaaatatgcatgaccctgcttttaaaatcaattaatccttgtactccatatatatgccccagttaattatatttatatatatatatatacatattacaaaacagagggagtactactttaattagcatgctagttaatttcttcaagagacaatatataatatactacctccttcccaacatcaaattttaaaaaagggacgaggcatgactgaaaaaataaaacaaaaaagtagtcaaatatatactgcgatgacacgaatgttgtcaagctaaggtagggagcgtccaagcaaaaacaaaaaagatgtaatatagcaaatttaagtaaataataaaagcaaaggtgtggtttttttggggggagggggttgcggcggtacccaaccgtgtaaggaatatattaaggtaagaatataccaagtataagttaaatttggttccctcaagtataggtctgatctatttcattcgccttaactgtaaatccgggttgatgcctccaactactaaaagctagcaacacaactccctcagctgtttttgacagtggtttcgctgacatggcgtccacgtggtagcctagtcatcaaagaaatttaaaaatatacttgggccccaatgtcagtgactacctcacttattcttcctccaccgcacccttctctcctctctctctccctctctctccctctctctctctctccacgagcagcaccagtgaggtcgcgacaacaggtgctgcgtgagggccatgtgggtctgggcatctggccatgctctgccacagggcatagctcccgtggagcgccagtcaaggtcaagctcagtggccatggctatggcttaggagaagtacccgtcatccttgtgcaaccgacaacaggagtctgggccgaactcatggaggagcgagaactcggcgtcgagcaagaacccatcccgccgcgcaacgccatacagctgcacacttcgttggtgttctccacctccttgggtcgcacgtacgtcaaagcagttgcactagtgccactcatgtcgactacgttggggacaccgacgaaaagcgtggccatattgctcatcccctgcacccatgcgacggggttgaagtaccagtcgccaaagaagttgtttttgtcgttcatcatcgcaacactaactagactcgctaacgtggttgtcttggatcaccatggcatgacacagttcttgcctaacctgtccaccatggccccaaatgactcgatcatcgagaggtcgaggaaccccgagttgttcgccttgacgccagtgatagtttcagcatggttgtggaccaggagcgacatccaaacgttgagtgacaacagtgtcgggttggtcgccagcacgatcaagggtaggtatgtccacatgaggaaccccaaggcaagcaccttcttggtgatggtgtccaccggttgcatcccaagcccctctgtcaccaccagcttcaagtgtgatgactagttgacgcaagccaacttcacttgccgccccgcctcatcgacgatccaccgcgatgacgttaatgatgcgatggacattgttgtctctctggctgtagtaaaagaagagactagggagtgaggagtgagtggcaaaagaactttgatgctgctcatggtcgtggagagagagaggggagtggggagtggagaaagaagataagatagtgacttacatatgggccccatatctattgtttaatttgtctgatgactgggctgccatgtcgacgtaggggtgggcaaaaacctcaaaatcgatcaccaaaccaaaacatcggtttttttagagttcggctggtgatgtggtttttgttttgttctagttctggtgttcggtggtttcttcggtcttcatctgctgtgaactgagctctccaacgaaactgaagttgtcggatgcaggagtggttcaagcgaattggcctcctcctcatttcacacgattttcgaatgtgagtatagtgtttcattcttgtgagcttgggcggtggagcccatagcattcctcggctatgctccatgcatttgcatgctgtggtaccatgccttgcttcaagtgatgtgcgttgagaggatgtttgatcgatgggtgggtttagttggtaaaaaccgtatccaaaaaaacaaaccaattttgtttggtcttttttactcggtttttgttttattcgtactttctttggttgtcattctacggaaaccgatctttcataaaaccaatatgaaaccgacccgattaaactggaaaaaacaaacacccagcccatagtggatgccacattagcgaaaactgcctcaaaacagtcgagggagttgttttgccttttagtagttggaggagtcgatatacccagctttgcagttgatggatacaaattatatcttacctacatttgagagggtcaaattggacttttcctatgatgataccctagttgggttttaatttaggcccccttcaattggctactcaaattaaacaagagataactagctacaagagggttagctagctaggggtgcagttagtttagtctaccgtcaaactgtatgaaggatgcaaaaacgatgggtcaggaagaaactagatgtgtctgcaacaacagatgccatatatgtatgatttatctgcccatacgacatacgttggtggtgaggatcgatacatagctctaggtatccatccaagaaatatatacttgaggaggccaatgtgaaaaaaaaaaactttcgaaagcagggattattttgctatttggttaatactaaaatagtaaaagttaaaaggcccttattatgattattgtaaagctggagggggccatgaccccctctttatctctacaaagcttcggctttgttagtcacccccattcatttatccaaaaaagactcatagaagtacaaatgtacctacggaaacaggttacccatacttggtacgacttagtacacgtaacacaccttccaacaatggccacgctagccaaattacgggaaaaccaaatgggagcacataagtcgaaggacaacagcttgttttgacattgttgcaattaagtcaattggtgatggtagatgcaaagctcatatctcgactggcactagtgccatgagctctatatgtaaaccaactattctctctcctatctctgctactagcacggaaggtcaatacaagatatagcaggcgtataatggacgggcctaacataagttggtagtttgtcaaaagacgccgcaatgacacatgggctaacaagagagatattaaaacgtgtgggtgttcaagcacactcctagtgagtcacgtgccttgagtaagccatcaccacatcctgtgacgacgctcaagcatgatgcctcggagttaagcgtgcaagtcaaccatgtaattaacatgacatgtaatcgattagtgctaaatatggaactaaataagtaaatatatgttagtgcaatttgttaattcctataccgttgtaagattttgggtgaaactttggaagcacgtgtgtccaatcacactcatgttgatatatcggatgcaatatagcaaatgtgtatgacactgacgaccatcacaatgtttcttaagtgaggttccttcaaattatccaaattaattttatgggttgtttttgtctggaaaattgtttgtaacacaggcaacactcaatattggccacactgaccaatttaatgtttgagtaaagaagaagggaatgagcaaatttatagaacaaatgcttcttccccttcacattcaactcatttgtatcgttggatgcaaaagctctcatcttgaccattggcaaagtcatgagttatttttatcaaccatgtattccctcttcctcctaccactagagaggtcagagtatcaaactgctagatatagaaagcatactcaactactgccatgcatagacatgcttggtgcaagttgacagttcgagcatgtcacaattgcacatggtctaacaagagcagattacaatatacaggcgttcgattacatctccggcgagtcatgcaatttgagtatgccatcacaatgtttcgtcgtgatgctcaacaaatgatgccttggagttaccatgatcttgtgttagaacaaatctatgccaaaaatagaaaagtaaataactaaataagaatggatgtattgtgataagaataccatcacaaaatttcaggtgaaatgtaaaaaccagtagcgtaaagtcacattcatgttgatctatcagatgcaatacaagatgtgtatgctatcgaatgacattaatcccaatatccgttaagtggggttccttcaaatgatccaaattctatgagctgtaggaaaactcttgtaacttatgtaactcgtccttgccaacattagtttgtttgcctgcatgccacactcgatattgtccacaatgaccaatttattattcgggtaaaccagatgagagtgagcactcaaagaaaaagtgactcttccctccttcgtattcaactcatttgtgtgtcatcggacacaaagctgatctcatcttggccacccgcagaatcaaaagctctctttgtcgaccatgtatcccctctccctcctcctattaccaccatgagaggtcagagtatcaaactactgtatctagcaagcatacctaactgtagacatagccatgcttagtgcaaaccaattgttaagcagagcacatcacaacaacacatgggctaacaagagcaatattacaacatgcaagcattcaagccaacctccgttgagtcatgtgggctgagtatgccatcgtaacaatctaccacaatgctcaagcataatgtctcggagttaagcaaaatcaaccatatcattgccacgatcttgtttagcactgatcagtgtgaaatatgaaatgaattaaaatagtaaatatgggtgggtgcatcatgataagagtatatacttgattactgtacaattccacgttttcagataaaatgttagaagcacatgcctatccaagtcacacttatgtcgctatatccgatgcaatatggtggatgtatatgccacgaggaccataaatcccaatatttattaagtgagtttattttgaccatccaaattctatgagtgtattttgtaggaaacaatttgtaactcatccttctaacataagtttgtttccatacacgccgcacttgatataggggccaccaaccgattgaatatgcggataaactagatgagaatgagcatactcaaagaataagtgcatcttcctcttcacatgcaactcatttatgtcattggacgaagctctaatcttgaccaccagcgaagtcaagagctctctttgttgaccgtattcccccaccctcttcctattaccattgtgaaagagcgaagtgtcaaactaatagatatatagtacacatgtactaaactaaggccatatatatgccacaagtcatcagttaggaaaagcacgtcgtattaatacataggctaacaagagcattgttatggcatataggcattagagcacacctataaggagttaatgttggctgattgatccatcacaatgtgctctaatgttgtgttaccacaataccatagaaataggcaaattgaccatattatcacaacaatcataggtgattgtagaccaatgctaaatatgcattaaatgatagtgcaaatgatcatgcaataattctcattgattgaggaaataatacataaagcta

SEQ ID NO: 25257 - DNA, 1840 bp, Oryza sativa
aaaagggaattaatatatggggggtcccctttcatttgatagattgaatcaccactaggatgccctaactattataggtttaaatgcaattagagtatgctagagttctttgaaacaaatttctatcattatgttgacataccaacatcccaaactgtaagatcaatatgactctattaacactagtaaatgataggaagttggaggtttgtcccatcacctcatgtctatttttccctttttattcaaagaacttattggatttgtgccttatggcaaaagctggagatgcaaatcatatccattatcttaaaaaataaacttaagaatttacaaaggaacgtttgttactttgatttagtattggatatggtccaagtgagtggttagcaaaaatatcatagaggggcaacccatggatcggatgtccacctaatatttcatgtatcttagcgaagaactactattgcctattgaaactagcatgtgtgttgttcgtggttccttctccagtagtttggttgatgtacatattattgctaatatttataaaagatatccatgtattaattgtctaccttctttcagggttataattcaagttatcagaaggtgcttgcaaatgctgacatggacagagatagcaatagctcgacaatgcaaacacaagtccctactaatactagggagggaccaactttcacacaactactactcggagacgaagattttgacctaccaccatatgttcccgaagccgaagagaacaatcaattctatcaacaaacaatgaatgagaacctaaacatgaaccaattgggcaacaatgggatagaaactgctgagttggaacctcaggagcatataatgacgtttgcatcaagttttggtgtaggttcacagcttttaggttctcaagcaatagaagtagttgatgttgtaggaggtttaacttcacagtggggaacacaactgcatgggggtcatcttgcacgtgtaatttcatatatccgtgcatttcatgacccagagcagcagatcctttccaacctcgtcacgcatcaatctattgagacaatgttgaaccactatgcccaaactgcagagatgtcatattccatgagatatccagaaaatgcagttactcgtggacctcaaaatgtttctgggtttcctcaaaccaatggacagatcaacacactgaacaacatgaattctgagttccatttcttgcttgaacaagcaaagaatccagagaacaattccatgcgactcatcaacatcaggggccatctatgtgctttcaggtgcacacataactcatgcaacttttagtgttttatttatagtgtggttgtttaaattagcttctcggtaagaatatgaattttgtggtgccatgtgttgtttgaatcatatcttgcttagatgagattcgttggcgttactacgaagaaactattatgatattgaacctcatgccatatcgagcatcttatcccatcttaaagttggtttatttggtagcagcatttcctaatttcactttttgtattttgtatatgcagcattgatccgtttggaagccgtttcatacaacataagcttgagagagcaacaccggcagagttagctatggtgtatgaagaaattgttcctcatgcccacatgttggctattgatgtttttgccaactacgcggtccagaagattttcccaaatggaaattgacatttattttcaaacaaaaatatttgttattgattattacatcatgaatatacattttaaactttttacaaaaaataatgaaaatgtggaacttatctgagcttttttt

SEQ ID NO: 25258 - DNA, 3060 bp, Oryza sativa
actagctttccgttttatttcttggtatatataatacatttaaaggtgtttcatggattcttctttaattaattaatatgtgtaatgtataattttgacgtgaggctttaaattaatgtttaattaaactatactttatatattttcttcatagaaaattgatccagtgtgtgctttaattaatcaggctttcgaagtaagtgatatggatcagaggatagagatggccaacgaggttggcagaaatttgatgcagtgtgtatatgatcaaaacggcaatcacgttgtgcagaaatgtttgcagtgtgtaccacctaaatatataaaactaatccatgcaagcttctactggaaggccatggttttatccacgcatccctacggatgtcgtgtcatccaggttgatagatatatatgcttttcgtttaagtagaatttaaacaatgctaaaataagtcatatcgcaccatttctacgccatgaaatagaatgtagaatttaatatatttaaaagatgaggatgtcgcccatattaaagaatttaactttgtccctgttacatataaatttccttattgtcacttcaactcattatcaatgtttaacatttgagtacctattaatagatgaaactgcatatgtaccaacaaaataagcctaatacatcattaatacactaaaatatccaatagacctaattgtttgtgtctcacttattttcaaatccatatatataaatattctaaaagtaccacttgtaccaattaataggatagcatcgttaaagtatacataaatgcccctttaaagggtgaagccaattatagtggcaagacatactttctctgttgccttgaaacatgcggtctcgtatcgatatatgagtgcccacctagactagcctggagcacaattttaatgtctaattcactatcacaccctcgtgaagtattgatcggtaagtagtaaattgagcactattggtgatggtggcctccaatgaagtcacctcaactcagtcatatgtatgcagcatagcaaactctattgtctatgcttggttctctttaggtcgagaaggaaaaagagaagatgaaggtgatcaaaatagtgttttttctaaggttttgagtagatttgcggtatagagtagacaccatttgtttatagtgttaatcattgctactcaactatttatggtatagatgagcaaggttaatcatttggcagtacttaaaaaatatagctcaagagacataccatcaaggtgatctccatagcaccaattattatttatattttgaaaaatatgtatagtttagtgctcggttttgttttcaacacttgttgataatcacatgagacacctttactaatttgaagtatgtatttactttttaaaactttttttatagtaactaatttgtgggagtatacttatagtcacgtcgatggggtgtatcacatacatccatcaattatatctgacatgttggaattccttaataaataaaataaaacatgagtagtttaatgcacattttgattgtttatttgttgccaaaactatttggcaaagaaaaaacatacatatatgataataaatctcatgatggataaagggtgcaaggttatttgctgaaaatattttgatgattttttttacatctatgtaccatgtatgctacttattagtagttttgagaaattctaaaaaccactttcaaaatataaatattaaataaatcaaaattaagtcatatctagttaaaaaaacacaactaaattttattgttcttctttatagatatatatttaaattagcgttgtatatttttaaggggattttttacaccctaaaatatgatgtgaaatttttcggaaattatcttaacattaattattatttgtcaacccatgtgtcgtgatgtatttatgaacactatataatttttataatacatcaatacttcatttaattaaaggaatacaacaaatatcataaattggatatatattataaaaatattttaaaatgtgaatgtttatagaccgttgatttgatattttatatttatattatagatatatcttaactacatatgtctgtggaataatatattttatctttgtatggtgaaaaaaaattctattttacatcaatttttttcaatggtattacgtacgtatgttttttgctctatcgtttatgctagaaaattttatttgactttttagatgatactacgtatgtattttttgcttttatatttttttacatgtggctttatcttttcaaccgtatgtatgtgggtatgtttttttctttcggcgagccatacctttttgttccaaatcatacactctatgtgcttatgttcttttttgttttttttaaaccaaccgttcatattttctcatgtatagatgaggaaagtattacaaatatacctaggtctaaaattatgggtacgccaatttaaatgaaaattaccgtaaggttagacggtgacatgtggtggtttagttatgtttgtaggaatgccatgttatgacttagaggcgtttgtaggaagtttaatttacttttggtatataataggtgttggttcccttctatagatattaagaatatattaaatttaaccgtttgtagtcccggttggtaaccccctttagccccggttgtccaaccgggactacaaatccgggactaaaaatagctatctttagtcccgggtgaaataaccgggactaaagatcaatctttagtcccggttcatgttaccaaccaggactaaagatcgatcagccacgtggccggccaaaccatctttagtcccagtttgtgttaccaaccgggaataaagatcggtgcaccattatatatatatatatatatatatacatatgttacaatacatatatatgcataatatataggcatatatatatgtgtgtgtatgtataaatcatatattacacacacatatgtataatttaaagcacttaacattttatgtgcatatatatatgttaccaaaatatatattaacacaa

SEQ ID NO: 25259 - DNA, 4177 bp, Oryza sativa
aatatacatatacatgcatatatagtacaattcatttgctcggtagctatagctacgacttcgacgtcggcgttatgtcagaagaggaaggaccgacgttatgaattgtctatccgtcgtagtagaattcaccgtcgggattaaggacttcttcgttgatgaatcccatcagttgttcttgaacagccgtgataaaatccttgtgtgggagattatccctcatgtgaatacgctatcgttcgaaaaataatgacgtatcaatatatgaaattaataaacaacttaacaaatcgagcaatgaaattttgaatgatttatgtatacgtacatcgagctctcgtgttgtgcatatttggtttgataggcaatgggcatactcgcatacgtagtagccgcataagttagtttcctggtcctgctttgcacactacatgagaaacgatgagagatttaatatactatttatattaactgtaattagagattcaattcaatataattttggatcatgcatgtactcactggaaaatgaaacctccgtccaagtttttctttccaagtcccgcggaccaattgacggaaccgatcccaagccctacatatgtagttgcaagctatgattaattaattattacctgagatcaacataatagcaatagattccccgcgactttggaatagatggcattatattacctgtctatcagtttgaagaccttgtcaaaaatcttcttctctttattcattgagtcgtacacagtgactctgcatgcgtccaagtcgaagaataacaggacccagtggaatctggaatatgcgtgagatgagatatatatgattgaaaatgtacatgctatatgtatgggaacgaaatttgttcgagcgacaataaaaactcactctgtgttgtacggcagtagtatgtacgtcttgaaatgctgctgcgttaggagatggacgagattgtcctctgtgtctttctcgtacttgtcgatcatttcggtgttgattttccgagggtcgatgaacccagtatcgcagaccctccgccatcgggccctttgaatctccattctacaacaatgaaaagaaagtattattgcttacatatatgccaggagctaattattgaacgaaacaaatcgaactcaaagatactcacaaaatccatgcgctcagaagagagacgtcgatggcgtccaactggtacagatcgaagagatccttgaaatggatccagagaacatcttctccttgcaagaagttggagtttctgatcctcgctccgaacatctctctacccttggcgctcatttccatgtaccgttcatggaatttgtatatctgtgtcggtagggactgcagctgttcaggtttgacaagcggtttaccgagttcaaacttgtatgccacttccgccttcgggattggtgcgcctccaaccaactgatccacagttagaccggtgtctgaaatgaattccgttatgccaaaatctttgccggtcaccaacggctcgacctcttggtttggttgttctccaagctgagggactggtttggacttcttgtgataggctctctgaagtgttcggtcatagtccgatatctgtaacgcctccttgtttgttgtggacattcccttgaagaagttcttcacgctcgggtcaataggtatcttcttttcagaactccgaggcttgagttgcctcttcacctctcctgccacataagcatcaagctcctcttgactgcaatcgtacggtggctacttgtttttggtggcgtcaactttcgccttcttcgttgcccttgtgcgggcaggcggtggagcttggcgagaccttgtcttgggaggtgcaggcggacatggtggaggcggaggaggcagaggagccggaggagccggaggagatggtgcagcaggaggtggcggaggagccggaggagatggtgcaggaggacgtggcggaggaaccggaggagatggttcaggaggagatggcggagccggaggagatggtgcacgagacgctgcttgtcgcccaggaaggatgatgtaccgcttgcgccatactatgatggcgtggcttgtgtctcgtagatgcgtctcaccatctcctcctgggtagtccaactcgaggtcctcatacgcagcttccaccagctcaacttcgacccttgagtatcctgctggaatcggcctacagtggtaagtcccgaaagggtccgttgagatggccattcccaacgccaccttcaagtgatgagaggttatctattggtaatcaacctaaggagcaacttgcgggatgtactagtcaaaaatcatcaaactacgagcataccttgattgataagttcttgaagggaatatgcagctcacatggtgtccgctgcgtgatctcatcaatggggcaggtggtttcgtcctgggtttgcatggcgtccatgctctgtgatccgacctgccccgttgaggcgcagctgctacgattgcctgatgggctgaccattgcaggatgaatgtacggctggggatcttgggaccgatgtgcggccatacgttcatccaccttccttgccacctcctcttgcatgctgaactcgtagctcgatatcctgtactcaagatctgcaatcttcgcctcggtatctctcttgctcctcatccgactcctgtacgtgtggatgtcctccttaaatccaatattctagggaatcacgcctttccctcgtgttcgtcctggatgctcgggagtctgtagggcgagtgacagctcatccttctctctgtcgggtcggaatgtgccctgagaagaggctaccactgcgttcgttagtcgactagcagcctcgcgtatctgatcactgaagacaagggagccatcaactgggttaagcattccaccgtgagcatagtaccaaaacttcgatcgatcaggccatttagcggtggtcggtttgataccactctcaatcaaacttgcctccatctcctcccacttcgacattgtgacgctatatccgcctgaccccaagtggtgatggtacttcttcttggcggcattgtttttgtttctggccatcatcgcttgcccttgttgccctgtcttgtaagcaacgaactcgtcccaatgatcccttagctttgggaatacatcgaagttcggtgttagtcccttcaagatgtatttcttgtagagatctcccttgaagctctggaactgttctgccattttcttcagagtccactgtttcactatgttctccgtacccgcgggtagcgtgaacgtctcgagcattgtggtccacagcatttctttctctgagtccgggacaaagctgtcattatccccgcgtgcccttgttctgcgccagtacaccatgctgaccggcacgttgtccctcacaacccaaccactgtggcgtacaaaatttttggctgcttctgctggggcactaggtcggccgtcttcgtccacctcagttatgatgtgccgaccctctatcttcttcgcggcacctcgttgtccgcgtgccctcttctgtccagcggagggatgacttccactagcctcctcctcatcgttcccctcctcattcccctccgaatccctctccacgttcccctcctcgttcaagtactggtttggatcctcgttcccctctctttcgttccagcactggctgcttccctctgcgattgtatcgtatagtatctgttcctcatcgcgatcagccatctatgcatacaaaaaaaatttgttaggtatataggatgtatttgcgtaccgtaatattaaaactctgctaatcttatattaaatctctaatattcttatattaaatggctactaatctcatattaaaattgtaataatcatatatatatatgctaagtctaacaatcttatattaaatctctaacaatcttatatttaatctctaataattttatattaaaattgtaataatcatatatgctaagtctaacaatcttatattaaatcgctactaatctcatattaaaattgtaataatcatatatgtatgataagtataacaatcttatattaaatcgctactaatctcatattaaatcgcggctaatcttatattaaaattgtgaataatcatatatatatatatatatatatatatatatatatatatat

SEQ ID NO: 25260 - DNA, 2883 bp, Oryza sativa
ccggtcgttggccgtggagagagtgatatcgagatcgagagatagagagagaggcagcggcggctctcacccaagagatgcggcggcggcgtctgcggcgaaggcggcgaggaccaccaagcaacggcgagagacgacggtggtgtcgacgccgggttgccctaggcacggtggcggcgaaggagatcgagccgagatcgaaaaacgtctaagtgttggtggagaagacgagcgcgcaccggcaatatatatacccccggatctttactcccggttcgtgacaacaaccgggactaaagaaaagatctttactcccggttgttcgtacgaaccgggagtaaaaatatcacgtaaaaatatgatatttttactcccggttgttctcaccaactgggactaaagatcttttcctgctatttccaaattctttttaaacccagttagggttaggaaccaggactaaagataatagcagctgtgtcttgaatttcattgcatatgtgtttctaaaatagtaaataatgcattacaattatttaaagtcgaacaattaatgataaaaccttcgaaaaattattgttgtatgtactagaatacgtggataatatataataagcacatgaatgatttaaaatttttaaaaattctaaaaatcatatataattagcatatgcacgatattaaattgttaaaaattctaattaacatatgtaaatagcacatgcatgatttaaaattaatacaaaatctaataatcatatataactagcatatcatgatattaaattgttgaaaattataattaacatatgtaaataccacgtgcatgatttaaaacctttaaacattctaataatcatatataactagcatatggatgatttcaatttgattaaaattctaataatcatacatatttaacatgtgccatacaacaattgatttgtatggatattcagtacatccaacatagtttacatcgtgtacagaacaattacggcaatacatcggcggttacggttgaccgcacgtactttctcctcactattgttccttccttgtgatcactacgtgagtaaggggtgtcttcatttgatagaaggatgctagggtcaatcgtcaccgtgaaagagggttgcccatcaaactgatcgtaatcctcgtcagtcttgtcctctactccgacgatttttctttttcctgggagaaccacgtggcgcttcggctcgtcaagccctttggccttttttcctttgctagacatgtccttgacgtaaaaaacttgggttacatcattggcaaggacaaaaggttcgtccgagtatccaaccttgttaaggtcaaccgttgtcatcccactgtcatcaatcgttacgcctccactagtcaacctaacccattggcaccggaacagagggaccttgagaggtccatagtcaagttctcatatgtcctcgatggcaccgtaatacgtgccatttgtaccatcgtgtcccatggcatcgatacgaacagcactgttctggttcgtgctcttcatgtcttgggccctcgtgtagaatgtgtacccattgatttcatatccctggaatgtcacgactgagccagatggtcccctcgccaggaaggccagttgttggttaatcgtctcgttacccatgagatgttgtcgcagccacttggagaaaatatcaatgtgatgccttgtaatccatgcatcggacttaccgatgattctagcgcgaactagagccaagtgctcctcgatgtagggagccaccaatgaagattgttgcagaaccgtgaaatgggctttacggaataaattattgtctaccatcattattgctttccttccgagagtcccctttccccgtagtctccctttatggcgtgattcaggtatcccgattgggcgatgcttgcctctggacgagcgcggttacgaacatacttcttcagaacgcccatgtacttcttgaaaggaaacatgttgtgtaggtacacaggaccgagaataccgatctctttgacaaggtgacaaagcagatgcgtcattatattgaaaaatgaagatggaaatatcaactcaaagctgacaagacattgcaccacatcattctgcagggcttctaatctatcaggatcgatgaccttctgcgaaattgcgttcatgaaagcacatagctttgttattgttgcccagacattgtctgggaggataccccttattacaactggtagcagctgtgtcatcagcacgtgacagtcatgagactttagatttgtgaacttcttctccttcgtgcttattattcgctttatattcgtgaagcatccagacggtaccttgatgctctccaagtattcaaacatactttccttctctgccttgctaagagtgtagctggctggactcaagtaatggcttcctttctcctttggttccgggtgaaggtcaccgcgttgttccatatgcttcagatcattacgtgcttccagtgtatctttcgacttttcatatacacctaggaagccaagaaaggtttacgcaaagattcttagtgaggtgcatcacgtcgattgcgtggcggacgtccaagaattcccaatagggtaactcccaaaatatagagttctttttccacatcgccgcgtgaccatcttcgctctctataaactggctgctaagcccatttccaaacactactttaagatctttaaccataggaaacacttgtttcccgccgcgatgtttaagcttcgtacggtgatccgccttatgttcaaagtgcttgcctttcttccgaacctggtggtttgttgcaaggaatcgacgatgacccatgtacacaaccttcctgcagtgcttaagatacatac

SEQ ID NO: 25261 - DNA, 5119 bp, Oryza sativa
atgtttcatgcgtcctttccaaagtctttaaattttctgtcgatgtttcgccactgcgaaccatcggcggggtgtctcagcatcccgtcctgttgacgctcttcagcgtgccatcgcatcattctagcattccccttgttcctgaacaaaccccttaaccctggtattatagggaaaaacccctcacccttaccagaattctcttcttcgttagctgcccctaacttctcttggatcatctcgtctaatcttggatcatagtgctttgcaaaacggggcatgcttctagattatcgtactcctcaccgcgacataggatacaatcattcggagatgcgtgaatcttctgaacttccagtcttagagggcagactatcttcttagcctcgtacgttgtctccgccaatttgtttccctccagaagaatgttcttgatgagtttcaataaatcgccaaataccttgtcactaacaccattttttgccttccattgcaagaactccagagtggtatccaactttttgtgcccctgctcgtaacctgggtacaacgacgttctgtggtcctctaacatcttgtccaatttatgggcctccttttcactttcgcaatcctccttggcgtcctacaacatctgactaagatcatccgcaacgttgttaccatcagcatccctttcctcctcgcccgtttgatttccttcaaatccagcgtactgagcaaagtccggaatattgtcgtcttccacttcatcttcttccatttcaacaccttgctctccatgggatgtccaacaattatagcttggcatgaaccccgactcaaaaaggtggaaatgaatagtcctggatgcagaatactcctcccgattcttacacttattgcatggacaacaaataaaacccttttgcctgttagcttcggccactctcaaaaaataatgcatgccgtcaaagagttaataaactctttggaccgccggtcagcgtacatccattgccgatccatctacatgacatgaaaaaaaatcgtacacacataattattcgtacaataatgacagtcatacaataattataaaataattacaaactctttcaacagtcacacaataatgacatatcattattcatacaaaaattatgaaatattacaccgaataattatatatttactatttataaagttttaaactaatattaatgtgttgtacttattttaatttttcattttactttattttctattattcaagattaactttcactatattttccttctcaactattttataaaaccttctttagcaaataaactaaatttctatatattctttcttctccacacaaattttctctctcatcaactaacaacaaaattttggagacaaaaaagtgtgcaaaacatagatccaaatgtaatatgaaaaaaaaaacattggaggatgaagttgctaaccttttaggcacctccgatttgtatataatccccagaataaattcactagaaattttggcatgacctcccctcttttttgaagaaattttgaagcttgctcgggctggaggaggaagaagacatatatataggggtgggactttagtcccagttggtgttatgaaccggggctaaagatcgccgggatgtttacaccaaccgggactaaagtatctttagaccaaccgggactaaagatcccgagggggcctgacaggccctgacagcatttgaaccgggactaaagatcatctttcgtcccaaccgggactaaagatcaaatatgcccgttaccctttttaaccgggactaaagatcatctttagtcctggtttttgttgcaaccgggactattgtggaattagcccgaccgacgaaagatggtttctccaccagtgaaccacagtagacaaagtctctcctaattaaaataatattaagtaatatgtcctataacttaatgtgaaatactagagaaagaaatcaattaagaagcatatttgattgtgttttaattactacatggatgaaatattgatatgtgtgtgtgtgtgtgtgtgtcgtatagtaacacatagatgcatgcctgtatatatatatgcagtatgttgtggagcatggaggggagtcagtgcgagcgatgatggtgatgaggttgaaggggttaatggttatgatgagctgtcaaaagtacggatcgaatgtgatagagaaatgcctgacatttggtagcatccatgaccgtctcgtcatcgcagctgacatcgccggtgccggcgaggaccaaatcctggtcagtactacattttgtcatcgatcacacacacaaagacacacaaatacacacacacaaacacatgtacacacaaagagacacacacataaacacatgtacacacacagacacacacatatgtgcttgtgtgtttatgttgatgctaatgttgatgggcatacatatatgcagatgatgatgatggacgagcatggaaattacgtgatacaaaagatgttggagacgatagcggatgagtgggtggtggacttgatagtcacagttgtcaaccgcaacttcttcaggctcatccacaacatccatggcaggcacgtcctcgcccgcctccaaatcatgctcgccgctcgcggttcgtatataccttaattactctcttagtttcattttttttacctagcttacattgttcagttcaattcaattcattatctactaattgatccattagcttgttctagacaattatatatgtataatttcccataaacaagtactagtactaaattgattcattcaattcattgattgattcatgtgtccaatcgttgctgcacgcagagaggaggcggctgctggctcttctcaccccgccgctctactacatgggttaattttagttgacaaagagagtataagctagttgttgggtgaattaatgttgctttccttcgttgtaccatacatgcttgttgtaactacatttcatcagtccggtggtgttgtacaatacaatcagttcattagaactgtagcgaacaagccttttaattttaagcaaattttgctactggacaccgtaacttcgtggtttagctatatcctataggacaaggcacgaagtgacttttgggggaaaacactcccaaaagttggatatttgctggtggacaccgcactcattaaaataataatttccggttgaagaggagagagaaatcatgtgaaatgtcaaaaatgcccttgggcccacatgtcactctcctatctatcttctccctcccatgtcgctccgccctagccctcccgcagccgtgggacctcgcctgccgccatcgtcgctgacaagtgagatgagagagcgaagaggaggagatatagagagaagagagataggggacctgacatgtgggcccaagggcattttcgatctcgttgttgtgttttgccggcaagtatttactcttatatgttttacgtaaatgtatgaaacaaacttccattcctttcaagttgcataatataggttacaattccgggaagcggaaagaacaaggcaaccagttggtcatttgatccaactagggttcacaggacgcaaaatattgtacagcttcatgagaattacccagaactaaaggataagatatatgaggaaaaggaagcatatatcaagaaattgcacaaggaaaagaaggtcgaggaagcgacatacttgggatgagcaatgctctcacacaaagataaaaatgtcttgatggtcccttacgcttttatgtaagcagcaactcttccatttgattattatattcgtagtaatacatcattactagcaaatgtcaactccaattcatctatcttgtttgcagcggctactatattttattcctaatatgtccaaaggaccaattgatcgtagtgcttgacccaacacagtgtgataagcaaagctacatggagttcctcattattctaaatttgtataataaaattccccctcaatacctatttgctattctgaaatttttaaataactcgaacaaatgttttatcggcacattgcacatgggttttacatcacacataatgggctaataaaggatccacaggacaaaactaaacatcaagacaaactagctggtaattatgttcacagtgttttaagcaaatacaataccccctcaatacatatgccatgaacacaaattctttgaatgaatacttgtttataatgaccggtgtgataattatgttcacagtgttttaagcaatcccgagcactaacctatgtggatattatgtgtgtgagattcttaggtcaacgggaagtacacaacaaactgcaaaaatgtaagttcggagattgttctctacagagtatttcatccgcaattcatttcctaacatttattgtcaattttgtccattgatccctcaaatccctcatgtagcaaatcggtttgacaatacatcaattatgaacgtatgcactgacatgtgccacttcatttgccgtcactgctgcaatgccctagaaaaattctatgacaatgagagccaaactggtattagaagagaaaattcaagcccataagagaggagaaatttgcatatgtgccactcaaaaaacatagtttcgctagaatgccactctaaatatgggattcgatcaaatgctcaactcgcgggcattcgttgcaatgccacttttgggctttgttgcatttcgaaattaattttcctcaatttcatattttctcggacgcttttgcccttgggactggttgaattggacgctgagccccgacgaacagcgtgcgcgagcaccagcgacaccggcaccgccccgatcccccaccgtactgcctcctctcccactagctgcgcgcagcctctctccgccagccgttccacttccgctccgacacttcagccatggccagctgccgccagccaccacgtatgcctcgcggcttcccggtccgatggcgagggcgacgacggcgtccggggccagtgggaggtgtcggggcgggggctggtaggcgacgagccgccgctagtggcgcccgccatggcatgtggccttcctcctcctcctcctcctcc

SEQ ID NO: 25262 - DNA, 7263 bp, Oryza sativa
atatacggatccggtatatcgtccagtataaggagaggactcatttaagataaggaaatcaatgagttcttatggaaatattccttaagagcgggaattattagaatactactcgaaggggatagggattgtgtcataccatacagggtctgttgtctccaagttctacttagagaccaaggtgatttgcggtataaatacatacccccggggaggtacggggcatcgaatcttagcgcaagacacccgccaccacataagtaatccggaggacttgaagcctattcgccgatagatctcatcgagcccttctcgacaaggatctcgtcagtaatctcgtagttcggttgttctcttttataatatgtggtttcttctataatcccatataaactgaattagggctattaccttacgaggggcctaaaccagtataatccttatctttttgtgtgcttgatatcgtatcgtgtagatccttataccaacgtaccccaataccatcaaaatacggtccgcgggtatccccgtcaacaatatgtatacgaatgttttcagttttacatattgaaatactattttatttgtcagtgcaagatattaggtattatgtactaagaacgacaaatcagttaggccctatgcatagcatttcagatttcgattagaaatagcgggaaatattatatcacatgggggcacaatcttcccaaatggccagtgggttataggccacgtgagaaacacattattgcaggctggcacatgtgataattgatcttccttgggatcacgttaagagactggcctgcaataatgccgtgagtcttcgcatgcggttgggccacctgcatgcaaaaatgttgattttcgcagacacatgtatgcaggtgagccatcaaaccgcatgtcaagatcgttttttgtcgcatagaaaaactaattttgtcatcaagaatttgcatgcatgtgccaaaaagtctttcagcttacaacattatatggtcatagattagtttcagttttgttgggcagcgagaggccgatccataacttctgcctttgtgaacgacagcaatgccaccaatcgagaaatgaacggctgaatggcttggacccaccgtagtgactaatcatgtcagccataaattaataacaccaggtgtttactctatagaaaagatcaacgaaaataatcaccggtggcaaagaaagataaaccaaaactgagcacatccttccccttttgctcccaagtcccaacgtcgaagaatgtatggattgacatcctatatctattcatcctgctatcttcgaacgagaaagtataacatgaaaatcactcgttgatgcagcctaagaatgatgcaacaaacttctttttgttcgatctcttaacataccgtgccttactgcctagagcccactacggtgctctctattgttagtaaaaagtaatctaaaccgtggatctaaggttcagatctatttatattaccactcatttagtggtagtagaaacatgaatgggaattattgtaaaaaaaataggtgcggaagggtataaacatcatttatcattgactaaacattttttcttctttgctaatatgagcgatatcagcgcaatggatatcgatttagttaggaaaaaacataaatgatagttactcctaatcatgatattagtaaattatttatttgctcctaataatattggtcgtataatactaacagtagacaacaccggagcaaaatatactattgtataatgttattcaaattctctcttataaggctatcttgaaaagctcttgctaatactatttgctaaacataaaagttatcattgaataagactataagatctgtagcttttaattttgtttattgtgcttttcagctggagattgttgtttgttttttttctcttaagagtaaatacttgattatccttttttgaagggccaaaatatactactctgtaatgttattcaaattctctcttataaggctatctagaaaaactcttgctaatattgtttgctaaacataaaggttttgtttgaataagactataagatcagtagcttttaattttgtttatggtgcttttgagctggagattgttgtttgttttttttctcataagagtaaatacttgattatatcaattaattggcagctaaatacttactacggtggttatgggatcaaatggttttagtaatgaaatgtgttccattatttattaatatctgttggtattctatctgggatgaaaaattgttgtagaaaaagtcaatgaagttttttaactggtaaaacatcttcagacattttggcaacttgttgcaaatttgccatatatatgactttggattcactcgttcactgtatcaggctatgtacgtattagagaaaaaaatagtagtacgatcgtttgatgattaaaaacccaagacgtggcagtcttgcaacatagtttcgtcaacaaacagacgtaatgtgttgcaaatttgtcatatatatgactttggaatcactctttcactgtatcaggttatgtacgtattagagaaaaaaatggtacaatattttgatgattaaaaaccaaagacgtggcagtcttgcaatatagtttcgtcaacaaacaaacgtaatgtggattgcagattgtaggggacacggtacccgagtagccgaggttaggcctttgggctatattacataaggtgggctaagaagtctaagcccatatggcacattgtaatccaatacttcctccgtttcataatgtaagactttcaagcattgttcatattcatatagatgtaaaagtcttacaatacaaaacagagggagtaaaagggatcaaagataagaatataaatcttatccgatataaataggtggtaggtacccggattatatggggtacgctacctaccgtagccggcctccttatgtctatataacggtaggccggaaacaattagggtgatcatacacgtgttacgtgctattcacacaccgtgttgcgcacactttgatacagatctaatctacaaacaactgaagtagggtgttatctcttccaaggtcttaatcagtataaaaatatatcaccatctctcctcgatcttgtgcaccctataaatttacttgccaatctagagaatcgacacagatgaaaacaaaggaatgaaatatcaaaaatacatcttcagtgctcgcataagttttatggcttttcttctaaaggtcttgagcccaaatactaccagtaccaagctagcaaatatatgtgaaagaaacttgaccataaatagtataacgagtgaattgcactttagaccaacttttgttgccgcggtttcactttggaccatccttaatccaaacttttcactttggattagctaaatttatgtttgttttactttagactactcaaaaccacttctttagcacattaactaaatttatgtttgttttactttagactactcaaaaccacttctttagcacattaactaaatttatgtttgttttactttagaattaacgattgaggacattggctccatcacgttggtaaaattctccacctatgagacggtcatatatttaccggagtataccggtcaaaattggatttggggtggttcaaagtgaaactatggcaataaaagatgccccaaagtgtaattcagtttgtaaaattgacatgaaacaaaacagaagttgcaaattgagttacgaattgcgctgcatgaatgcataggacaaaataaccatacttgtttgattaagaaaacataccagcaacaatagactttttaaatgtctctagcatgaagaaaccatgaagaaaacatcgtgcgtgtaaaatttatatgaccaagggccatcatcagtgctttagctttagtggcaggcctggaagaggaacatgagagaggacaagagaggcactatgccaaattgtcacttaataggatttaaatcctggttccaacaagtgttacacgtatatgtctgattaacaggaatttattaagacgaggaatttgtcactagacttcatctcttccattatcatgtgttataagaggtatactcacaggtatttgtgcacagcttccatgtaattaaaaaaaaggcactatatagtggcaaattcagagtaagggctcgtaactagcgcgattcaatgtcaatctccaacctcacaattacagtgctcatggtagtaagtttttgttatttacactgagatacacctaagagaggttttccattattgtacaacagtaacaacagctggatggcttgctatcaatttgagttttcactgatacgctagcattctgcagagaacaaaaaatatgtcaatagagcatgtgccaccggcccaccggcccaccgccccacatgaaagtattgagttatgaatcgctagcataacagctggggctttcacttatgtgctgggatttctacagagatcaacaatgccaacagagccatgtgaaaactgtgagagttttaaactataaattgctaacagcaacgtccacaaatttccaccataaagcaggaccggttttatgccttccagacaggttcattgtttcgttgaagacgccatgctggagagcgaagaatgttttgtttaagaagctagagtagtggggagtgctttggagggttttctacctgtttatttttggttgcaaagtatgttgttgcaaggcacatgatctgtcttagactgtttcaccttttattttattttcctattttgactgggtacattttagtaggtgcagatcgagtttacctcacttcaaaaataatattctattctgtcaagagagattctgctggtgtcttccacggatgaaaagctgatgttaaaaaaaaaaggagttcctttaaacaggtaaacatgttcagatattcaggcaactttttgcgagtttgccaattatgcatgacttcaaatttgcccaccgtgtgtaagggtatgtactattagagaaaaacaagtacggttttttaatgattaaaaaccaatacttgacagtcttgcaataatgtggacggcagatgagaagaccctgaaaacatgggaatgcaataagaaaaatacttatatattttttctatttatttaatgtatagtgctcgtgtaagttttataacttttcttttgaagtgcttgagcctaaaatctaccaggcctagcaaatatatgtgaaggaaacatgaccacgatagtataactgacatgaaaccaaacagaagttcttaatctcacatcaaattcgtttgatcaaaataaagaagaaacttatatattggaggaacacaaaaggcactggagttgaattctatcttacatggccaacttatgttgaaaaggagaaaattacttcctcttgggtgatgttttgctctcgaattgttaaatttagatacaacacataattgaccagtaagttgatgtcctgctaaatgaaaggatcaatgctactgtgcaagaaatgcaagatgaattggttggttcacctctagatagtttcaaccaacgagaaaatgaagaattataataacagtttaaagagaaagatatttaggtgccaaacttccagagttaaacagattatttcacctgacaggactcctcctagcatgttgctggcaaaaaattgctcatgtagacttgtgcgagcatttcaccaagctttacttgtgattcagtggtaagatgcagatgatcttcatttaatgacagtccaaatgcgtccacagttacaacattgggcaggttgataccaagctgagctttcctcactttttcaatgttctttttattcccagatgcaagagcaacctgtttaatgcaaacaaatcttgatataaatgataccccatattacaaatgatatcgagtacaaataaagggtaaggttggttgacacataagatggcatcgtgtgtgtagaaagagtgaaaccagccatcttatattgctaactgaataaagaaaattcaaggttcaaaagaaagattacagagccatgcaaaataaaacatattagtttactagttaaaaccaatcagttatcttgtactgggggatgtaaaagagggcctgatgatgtattaaatcgaaactattaacttcaactttatacatcccttaaagcaacatctaggcacatgtataatcgtccaaccttttttttttctcttatgttttgaatgactgaatgttatcactgttacgaataaatgaggtatcctctccaaagtgtaataagtaataactgaacggtaacaaggccatataagtcacttcctaaattcacgcacaagactaagatgacttatatttagagtaacatatagtagtacagcaaaagcacgaaaacaattggttagtacattttagtacaactctagtataaatcaacaaaacacaaatgtaccgatgaactcaagaggggaacaggtaaagttcaactttaaagattttttagtattacagatggaaaaatgttgcaaccaactttactttataaagattcgtttgtgactaaagttattctaaagaaacaatatggtactcttgcagatggtagcaccttttgaaagtggtgacagaatatagcggtcggttacctcatacatgatacatagacattagggacattattgcaaggctgagaataatgctttccctgcatatttgctcaattataattaccatagccgcaaagatagtacacgaatacgataacttgagcaccggcaacaccaattgaatattgaatatgactaaaataaagtaattcaccatcaatatcctgaattcattctttgtgttatcggagttcgcctactaaactgtacaactatggggaaaccacttctactaaaaatattgggagtgttttgattattttccttttgcattgcctctcatttaggtcaacgcagtcaagaaacatgacacggccaagaaatccccaaatacatttcttgaacaaaattatcgttggctcatcgcgtccagttaattctctaaatttgagagtcaaatcaagtaggcaaccgagatatgatgaatatcatcacctggatgaatggcagttgaggcatcccaagatcctccctgacattggcgatgagcgtctccaggttcccggcgtacgcggccgtggcggcgtcggactcggcgtcgctctcccc

SEQ ID NO: 25263 - DNA, 4411 bp, Oryza sativa
ccgtcccagcgccggtggtggacgccgccgcggccggccatgttgctctggccggagagcacgaagatgcgcatggcggcggggcgtgaggcgtttgggtgtgagctgcagcctgcagtggggcaggtggatcgggggggagttgggacgtcgttttgctctcatggacgagcaattgcttgcactgttcaaaaactaagccgtcaagtactcaagcaatccttttttacaagttacattattcaatcaggcttaaataaactacaacaataattcgagataaatagaaaaacacataaggtaaacaaaatagaattgtcaaccttctgtcgacaaaaaatacatcctaaataggctagattttaaggtaaacaaaatagaattgttaaccttctgtcgacaaaaaatatatcctaaataggctagattttaagccatcagatatgcttcataattcacacggtgattctcctccaacttcgacgacctcctcttcttctttggcattgacaatatcatctcaaactccaatcgagaacctatggattagggttccattttgaggtgggggtaggagagggtaatggaaagaatagggagattatcgggcttacagggatagtcataggaggcaatggaaatggatgggtggcgaggtggcgacggtgtcaatgaagccactggatcaggatctgttgttgggcttggtgttgatggcgggggcaaagtgggcgatggattaggaggcagcggcggatggtgatggatctagcatgcgaggagctgtcgaagatgaggaagatgacaaggtagggcaaccttgtcatcattggtttgagaatgcgtaatgggttgtaagttcaagtgccttaatttgattttggtgattaatgacaaatctaactatatgagactaatcatttttatgagcctttctttgactagtctcatttggatatgaaagtaaaaatgatgagaggtatgtattaaacttcacatattctaacttggtctctcttgtggatccaaaatatagtgtgagcttgctatttaatctttattgattatgtgcatatgcgttccttcatatccatatgtatgcatatcttgagggggagcttattctatattttgtttattataagatttctatcttgatttgaaatcatttttcatctcatctctctatattgtttatatcgggttattatccatcaccaaagagagaaaagattgaaagatcttggattaaacaatttgtgtaattgttactttggtaatagatgataaaccgatgtttatgggattaacctctcttttgcataagttgcctactaggttatttcccgataatgagatgtggaagacatgcattcttttgtgatggaccttaatcatgacaaggatgaaatgcatggagataaaacgatatgtaccacttcttatctcctactttttgataggttcatatatatgatttccatgttattgatatataagtgtgagactaatgtttactcgaatgttatcttatttagtcttatttacattgagaacatggagatcatgaaggtatatgttttatgttggtctacatcattactacatatgccttctctatatgtataggataaacccccattggttattctctaattatgcatacacttgcatctcttgtatatttatttgtatcttgtatatttatttgtatgcatatatttagggggagcaaatcctatacatttattgtgcatgttctagatccatgttgttcacctattatttatatcggatctttgcacttgagcttgcatacgagtatatgacacttgtgatgttaatgaatactcaacaaacatatccatatctttcatatgcaaccggttggtcatcaagttaaggatgacaaccgatttgttgagactaatgttctcctttgaggtgtgaaaaggaataggtcccactacgatgagactaatgaatgacaccatgggttagtggtcaccaagccaaggacatcgtcatgttggcaagaatgaagtcaagcttgtgatgagaataaagtcttgacaaaggatggacaaaacctcggcataaacatggttcaaccggatggtcacaagtgttgatctcagctcaagcttgaccccaagatggatggcgcaaggcaaaggtataatgtagctaagaatgttttcttagtcttttcccggtcttggtgtttggtgtagaccggatttgttagataggcgccgtactatcaagaggggtctatgaagcgagcttgtggatgatcttgtgccatattagttcatatgcatgtaggtgcattttgtggacttgtctaaccaagtgtgatgagttttctcaactcctaaaccaagagagaagtgggcatgtccaataggagtgagtgacatcttgtgggtatgtccggtggatatcctttggagtgtgagccctttatccttgacttaagttgtgtttcttggatggatttttcatgggttggatggccctttgaataagctttccatagagtccaagaacgccaaattccgagacccgagtcaagagatatcgtcgttttactaacggtcggttgagctgacaagtgacctacggtctgaccgtgggccttaggccggtctgaccgggtctgttagccggtctgaccggcgtggtaaggccggtctgaccagccccactagtctgttgcactggtctggtttttggtggcgatacagagccgccagagccgcaaccggtcaaaccgagccgacggcggtctgaccgagccgtggacgatctgactggccactacactgcggtcagaccggccaggttgagtgggctcaatgatttccctgtaacggctagttttctagccattacaaagtagtccggtctgaccggcctcacaacggcggtctgaccggcagagcacaaagttggggatttcggttccaacggctcgttttggtggttgggggtatatatacccactccctagcagcaagggtaaggttttggcactccattgcattatcttgaacccttgcaagagctctcacacccttgtgcacttagtttatctagtgaagtgttagagagtgagttaagccaatccaagtgcattgcttcattgttatagctagtgtggcacttgatcatcctcggcaagcatcctagacttgttactcttggaggttgccgcctcctagacggcttgtggaggtgttgcccggtgacctctccgaggagattgtggaggaggcccgtcaccgtttgtgagtggtttggagttcaccaccttcggagtgaaggaagaactaccccgagtgatcgaggcttgggttgtcctctccgtgggccggctcccgccttgcccaccccttgacgaagggggcgtgaggtggcttcgtggttgagcggtggagttgggctcgcctcaacggggattaggaaaccggcgagtttccgaacctcgatgaaaaattccttgtctcttgtctcatttatttgttgtatttacatttgtgctatttatattcatagagacatatttgagcccatatcacttaggtttgcaaaacttaacttagttgcttagttaaccttgcacctcaccttgcctagcaacttaggttagttttgtttaagtgtcattaagttttaaaaccgcctattcaccccccctctagtcggcctccttaatcctacgtgggtttaggaggctgattgtggggtcttgctggcacggttgaggtcttttggccagttgagtggtggcgtgctgggctggtggcaatggaggagacagcgatgacgagaaacatgcagtaggtgatagtttaggcgtgtcctgctaaggaaaaaagtggaaggaattagggtttgagtatacgaagcaattgttcaaaagttgttagattttgatgggtgttttttttcatcaaatgtataatagacagactcataaaaaaggaattgattacctgtattcgatggaaaattaaaccccaaatcttgcatattggactaaaaatcaaactccaaggacccgttcgttagtcatgcagatgaggatgtagacgtaggattcatgaaattcggatgagacttcctctggttcgggaacataacagtatcctctcgcgtcgtcctccctaggggcggcacgggaggtgacgacccggctgccccttctccctcacctccctcctccgcctcgctgccgcccgagtggctactggcgcacggccacaaggacagtggcggcggggcccctctctctcgcacgctcgggtgacctagggagtcacccagagaggcggcggcaataaccaccagatccgctccgctccagccggatctggcggggacaggaacggcgtaccggcggcgt
